United States Patent Application Publication US 2026/0058010 A1 - sequence listing, part 55

SEQ ID NO: 614 - DNA, 31887 bp, Homo sapiens
  source 1..31887: mol_type = genomic DNA
aagacgaaacataaaaaattcaaccggaaataaggggtttatttctgaagttccttctgaagcaccttctttgtgttcttttcctttgacttatctttaaaaattaaattaaaaatctgcagaattgtttattctgcagttcatgaagcttctccttggttttgattgaatcgacgtccaacaaggttgtccggagccctgtactcaaacagcgtccatccctgttcgcgcagagctgcacacagcagtcctggatttaaagacaatcaccctttgcagattcactctcaccaggcttaataacttccaccccaaattgccccatccctcctcggtccctcctggcatttcttttctgtcccaggcgcagagatcctcttctgggcgtctgttccggctatgagaagctctccgcaccctgaaagggagtagaaaaacagaggggatgggaaagggggaacaggggaacagatgagtattcatttcatgataaaattcagaatccctgcgccttaaatggtgcccattttctaagtctggttaatattgttcttgttgctgatgatgttttcctttttaaaaactatatgaatcatcttattaagaaaaattatacaaaaaaaagaagaaactccacatgcactaaaatatttttcactatctctttgaagacattctgcttaaaccttttcaaagattcgggtggccctttcttgactctccatgattaaaaccacttacaagtcatacacaacagatgcaaatataaaatgtccttggcctctgcaaaaaaggctcaaaattaaccttgtctgaacgtgtgcgtacgttgcttccaacatctgaaaaaaacttgataaaatggagactccagccaagaggaatggtgcatggaatccgttgaaaatgcatacaaacaacacctaaaataacaagcagcacaaactgaggtgtatttaagtttccaaaggttttaggtaaaatgaccagaaaatattagaaatggtcatcaacggtggctagcttttttgttctatggtgacagagataaagttaaaaaaaaaaaagttgtgtagccatcaacacagagatagtccttaaaatcccccatatccagcctttcaaaatactctcttccggaacatacatgaataggagggagcttttgtgtttaaaaatcttggtaagtgtccccctttaaaatctacatagaaaataggggactgatggcccctggtttctcattatgaattgcaaagacttcagttagtggctacaatgatgtgtcattttcgatatagaagttataaaatgtatatattatattaatcaccctgaacaactctttgttaaatgcacatttggagtctgcagactgtgtgacccagaggtgcttatataactatatgtgggtgtctgggtgtaaatacgggtttatgatttttatagtatatatgtctgtgggttgcatctaactcctgtgtgtgcaataatgttttttctctttgctgaggcttacttgtccagcctattgtttgagacaacagatataagttgcgatgggagaggagcgtcggatttggtgtgtatcccccatttccaattatagatggatcattacagacagcggagtcctgagaagccagacatctgctcctcacatgaatgcactcacctcctagagaccaggctgccatcatgctctggaagcttgtggagaatgtcaagtacgaagatatctatgaggtgagtcgacacccccagatgcaccttagagctttgcagatagagaatttgagcttcttgataccccaaatgatatatatttttaagctatttactcgtagatttccggtcggttttctcagctttttttaacttttagaaaagctggctagggaagacttcgctgctctgaaaagggactttaaggctgaaatctgacaactttaatttaggaatgtttttatttattttatttttctttcccttttcctcgcctccccccaccccaccccacccttttaagctctgatggggaatgtggtgctactgaatgtgggcacgctctcagagaaaatcgagattctgataaagtcaggggcttttctcgttttaagtgtggaagagaattgggttttcaagcctcatttgtaacagactcgggcttttaatttttattttcaataaaatttctgaaattgataacaaatggttccaagtagaggacagagaattagcgggaaagaagtagatggctggagatatggatggatagagcaaaatagaagtcgtagcagtttattagtttctgttttcttgtgttttgcttccttgagggtcactgcgtccgaacagaaatcgcagccgcctcctgtgtgggcatctttcacggaaatttctgcccacgttcaatgcgtacgggtctctagcactgaggctagctcaactcttcggggcaggagaagttgcgcccagccaggaggacgccagccgcctccggggcccggaccgcgctcgccaaagcccttttccggctcgggcgagggctgacgcggccagacggctccgctactcgcgggcgaggcggactaggcggacgaggcggccgaggcgggcgaggtgggagaggcgggcgaggtgggagaggcggccgaggcgggcgaggcgcggggcgcgcggcgggccaggctggggaccgggaagcccgcggagcctcgcttttaagcggaatggtctgggacagccccaggtggttgccaggggaagggaggaagggaaggttctgctgagacgtcgaggttggaaataaaaacttcggaaaggcgaagcggatttagaaaaggagggaagtcgaggcgggcgaagcgggccatggagattgctaagaggaaaagttggagagaaaaggaaggaagagaagcagactcccgggtggcgggcgcgggccgctaggtcagacgaaaggtggagggatgcagaggctccccaaagagccgagaaagacacgcgacccctccggatcgggacagctcctgaaagcccggcgcagagccgcctcgaagatcctaagagtgggcgactcacaggcgcggccggcaagctcctgggggactcgggctcggacgagcgcccacaggcagcgcctggcgcccacacctcctgcccccccccgaatcctaatgttggggtgtgtgtatgtgtggaggtatgtaggagagaggaggaggagataagagaggagagggagaaaagcaggagagagcgcgagagagcagagaggagagagattggtcttgttgctgaatgatgcttggggttttccttttctctttgtggttgtgtatcgactgtaacgaagagccgcgcctacgcgcctggtggggattgtttcggttcggcctccttttctttccttaacaggcgggataatggtaaagtccaaggcgctagaactgtcctaaagaatattagcgcccaaagtgggcatgacattagcaagcacggggccatggtgaaaacagctcaagctatatgcatgcagaggcatttcagtgggttctaaaaagtaaccagggtaacattcgttctttacagaaagtaaagtagctaaatggaaaaggaaggagggagagaagaaaggagggagggagagaggaagagggaggggtggagtggaagggagggaagagagaagagaaaagaggggagggagagagagaaagagaaataaacagggagagagagggaatattacaggtggtcctatctgcctaaattttctgctcaaaaaacagaatccgcagctcggtggaaggagcctatttaagtctggactaaggttgaactttaacagaaatggcagtcaggccagttgaacgggttcctgaaacatccaaaaaggttttctgttgcccctggctttgcctggaaaggataagtttagtgtatttgaagattgatggcgtatgttttaaattgaggtaaaaatcgcaaactatgtgagcactaaacaggaaaaggctgcacaggaatgaaaagcctccatctcgcttctgtcctttaacaaatgagcataatcttccacatttagcaaaagtctgcaaaagtcactgtaaataaccaggcccaccaatttgcctttctctcgcctccaaatgatgaagcaaccctttttattttgtttttgtaatcctcacacaaagcacccaaggcgaccaagtcctccggattagggaagtctctctccaggtaggaggacacctccattctatacaacctcccagcactgttctccctcactgccttatccaaaggagcaggggctgctttactcgtgtccccggcacagttaattgaagttctgcctctttcctgctaaactttttccccagtctgcctttgccagccccctcgtctgattacatctagtaattctccactgaatgaacgtcatttacaatagtaggggagctctgcgctcgctgctgcttcacgctccatttgtcctctattctccctttaaagtactcgtgtaatattaatagtcatgaatatcaattattatgaggcggtgtaggcaagcggagggaggaaggggcggccgagcagtctgagcccagcttcgggtgaaagaggactgcatctggagccccgaagaacggcagaagaaaagaggccaaaaagacagcaaagagacagatgaatagttctgtctgtgtgtgacaggcatcgccaatcttgttggggtggggggcgggtgtaattttttttttttttttttgatggcttgtcctggaaacacatcaagctcagctcctgtgtccagctcgcttctctgctggactccttgattttttttttaatcattgtttgattttgagcagtaaccaggcttttttttccagatgttagtccacacctattcatccatggtgagtttggattcacgtgttaccagaattgcatgctccctcctctcactgtctctctgtctctgcgtctctgtgtgtgtgtgtgtctcacactctctgtctctctctgtcttcctttgagcgcctttggcttggtaatttagcaccataattggacgaggctgcagctgcttctctctgcattgtgtgttctccgtctgagctccatgagtcagctgggaggggagaggccgaaaagaaaaactttttatttgccattgctgtttggaaatttaggtgactatttctgcaaaaagaaccatggggagtttaccatgatgtttccagagaagagagggagaaacaaagtccacctccctcatatacacacctcccccttcttctttcacttagttcacactccagataggaccaggaataagttgtctgggcttttatttccccccaccccaactttagttccttcattttcacatcctgagtataacagcattagatatagaaaaacagtcttagaaataactcctatgaaccacaactcaacttaattcatcattggcttaggatatgatttcgaatgagatccatttcaatgaaacactatttaagttatttaatttctcctggagagggaggagtgactgggaactcagaccaggtggattccttggagctcttggaatgatcaggttgtgtggaaagctcctcctaatcagccagctgcatttccagcgaaggcagaagttggtttttaatcagggggagcagcacagcaaatactatgaagttttatttgttgtgatttgtacctctggaagagttagaaaaaagtagttaaaaacacccagaggagcaaacaccatatgtaagactcctacaattttaattaaggcatttagaatctccctccatacacactgttcctgtacccctgccttttgcctgctttgcactccccaaaaagcggctaaaatgttatagttaagtgggtgattcctttcccattttctccccaagcctggggtttgaaattgctgaaatcatgtggccctctgagtcaacttgggggtctaagtttcagatccttgcttcccttgtcccgggaagagcgtacaaaagccgggcttctccatttgtcacttgtattttttttcttcctctctgtactctctgtctctctctgcctctatctctctttctctgtctccttctctggctctcttccccttcctctctccgctcccaggaccggcacgatggtgtcccgagccacagctcgcggctctcccagctgggctcggtgtcccaaggaccctactcgagcgccccgccgctgtcccacaccccgtcgtcggacttccagccgccctacttcccacccccctaccagccgctcccctaccaccagagccaggacccctactcccacgtcaacgacccctactccctgaacccactgcaccagccccagcaacatccctgggggcaacggcagcggcaagaagtgggttcggaagccggctctctcctgccccagcctcgggccgccttgccccagctctcgggccttgacccccggagggactaccactcggtccgccggccggacgtgctgctgcattcggcgcaccacggcctggacgcgggcatgggtgacagcctctcgctgcacggcctcggccatcccggaatggaagacgtccaggtaaccacaaacaaacaaacaaacaaacaaaaaagaccacgaataaggaatgcttctggagggggggaggtcaggagagggcagctctgtctctttttggggagtttgttcccatgtttagaacaggactagacagtcatatagaactgtttatgtgtgtctgtatgtatggctctatagtggcgatttccagaggtctaattatgatcatccaaaccacgagaaattaaatcttgaagaagaaaaatatgtatttgctttgataccttaagattattagaataaaggcgaatgcttttgtcctgcctcagctaccatctcctgcatattctctagtgctttgtggaagccagcttggtaccccttctttaccaacacacacaccccatagtggggctgtcctgctgacttggcaggtgaagacctggctgcctagaggctagagcttcagaatgaagttccaggggcctctgtatgctccagaggttgctgctgaatttgcaaagattttgctaagcatgacaatgagctctgatcatctaagccaggtcttgctttgaatgtctcataagccacagagcttttttccaagagatagttgcagtcctcatctgagaaatagaatatatgtgaaggagaaactcagaacgccataattcaggagtccatgatggtagataccattttggaaattcttttcactttttggttcattaagtgactgtagtgtaatattctccacctccctctcctggcctccgcctatattaacactcttctctccccactgccatcatcccagttgagaggcatcacgtgtttatttcttaaaacaaaaggctcaaaacactccccctacccacccactatcccatctgcagtctacacaatggagcctgatttggttgagaatacttggttaaactaaacaaagaaacatcaaagaaatgattcctaaaaactgtttgggtgattctgagcaggtctgctttttcaccctaagttaaatagttggcagaaaagataaatatagtttacaggtatgtaattgacacttcagtttcattggcatagttgtatttattatgcatcctttgacatacctctgaagcaaaggaaaataaaatgggaaagagaagagggtgcaagagtcattcttctgtaccttgctgaaaaaaaatagttttaaacagttaaaatgtggtgacagcatcaaatgctgtctgtgtgtggtctatgattgtttattgttttaaaagaaattcagttatttatttttttaaaaaagacggaattacctgatttgtgcctggatttactgatagtaataagagtgatgatggttttgttgatttaactgagcttgactgttcctggctagagatattgctcatttctgaatatcatatgaaaaaggaagtatttaatagttttttttttaatgcattggggtaatatgtgtctcgaggggaaaagtttttaaattaacctttctgagtatggttcaaagtgctggataatgaaagtggatcaactcatcaccattactgttgatgatgctaatgccggccctgttaccaccaccctacaggccaagtgactctagcgaaggaactcagaaatttttcccccaaaagaaggagcagttttctttagttaaatgtttttaaagaaataattgagagaggtctttttgtgtttggtgaaattcaaagtctgagagaaaaacagggccagatcagtgcacatttgggagaatagtcttgtcaaagcgtcggaaaggatttagtgtttatgtgaacggagcacctcggggccaagttgttgctgtcgggaatacagaccacagaggtagagagctgaaaggagaaaagcagcaggcagcacaccggagccacttgcaggctctccactcacccaacccccaccctgttcctcccctgctttatctcatttcgtcacctgccgggaggcccacgggaccttcttgggacgacccctatagtgcaagggacacaccctgctcctgtccctagagggaaacagcaaagacagggacggtctctgcctccgcggtgatgacagacctcccaaggccagggtgaagttgactgatgcagggcaggtgacaaagaccaggggttatgtttccaggaccacagcctcgaatccgaaggcttccaatcatctgctcaacacagaaggatccacttccgagttaggaagctggggtgcgggggctaaagttacacaagcaggttgggatttcaacgctctccctacagctatcgaatgggtggcctgcactggtccagtctttaaaagggcctgcactggtccagtctttaaaaggaccagagagtgcctaggcctggaccttaaagtcacttgttccgatctcaaggacctcgtgtgtgttccagatccccttgagccagggagctggcagacactgagggtgctgccctgcctatgggtcgagggttttgttgtgtgacccagatgcaccacactcagggccacagcccccaccatgagagaagagaaagaggagagctaattcaccaaatgcttctaatatttttttaaatgaaactataaaaccctgtcaatttctatttcaatttactcacaggggctattaaactagcaaatcgctgtttgggttctgggtatgctacatttcacccattgtgcatgagcgcgcgcgcgcgcgcgcgcgtgtgtgtgtgtgtctagttggggagggggctacaagtgttaaaaactcaggaaaacacctacagagagagagacagagggagtgaaaggacacctagtttgggatttgtttagttgtcatgtacacctcttttcttcttcccacctttgctctcttacctcccatcacctctaccacccatgaatataaacatataaggatgttaagccaactccccccaaacacatacacacactcaaacacacccgagtgtcttaaagcaacccctggtatcacttttaactaaagaagtctagtaattacgagtctgagttgtttttctgcgcttccgcatgcagtcctaattaaatctttacgatcctccctgtgacgattaagcgccagcatgctgcgtgaatatcctgtacaaaaacccagcaggcggccgtaattagatagaaaatcagacaagagccttctcattaactaccacaactaccccacgtcgctgatgaggcgtttatacatatttacgtacaagagtgagggtaaggtgtgagggctcccgggtccaggccagtgtaagtcagggtctggctgcccaaggcacaggagaatatttctgtcctgcctggacacattgtcactgtatacacatgatcatagaaaggtgtgaatcgtgtgtgtttgtgtgtggcagggtcccctgaggagttatgaacaagttacatgaaatatttttaaaacacctttttactatttcctaagatgtgcatggcatgttgcagcaaggataacaattcctatggagaataacaattttgctcacttttctgagaacaaaagagtgactattaaaaatgaaaagaaacaaattaacatgccccctgtacgattagatcatctcatttctaaagttttgcttgtttggggtagacagtctttttcttgtgatgaactcacactgtgaggatgcagcatgagtcggtgtgagtgctgtgaaaacagctcctcactctcaagccctttgctttttacttctctataaagtgggtaacaatttggtcccaacttaggttttgaagggtcaagaaagtagttgtagattttagaaagacctagcatttattttcttggtagggagagaaagggaatctactgcttttggacgccctgggatgcacagccagaactgttcatgtgtattctgacagtaagaaacttgctccaacagctatttcctctcagaagtgctaccagtgctcagagttgaaactttccttctctggaatgaaactgtggcacagaagatgaacattccttgcgattacctaggtgctgactgggaggatctagacctttgtgtgtgtctgcttgtctgtagttactgccttcctaacaggtgtgctccttgctgggaagcagcatcagcaggactgggagggagggtaaattgtgaaggttcctccaagagactgtcattgtgcagcaagaagctcatagtttacaggaacgtgtatgggctgtaatgggtgtgcagtcctagaggcttgcaaacatgttcctatgtgttgctgtttgcattccattccaaattgctcagactttaattaaaatcccataatgtaaactattatgtatttgtaaaatggctctggggttaagatgcactgggatagaatggaaaacacaaattgctcttactaatattggtgaaaatctgtcagctgttgccaaatttttacaattcataagagcaaataatataaaggtttatctgtctaatatctatgttttatataataactaaaccaatgttgcatcccagatgtctctcaaagttttctttctccacttcttccattggaaaaatttataatttgagtaaatttcatttctatgtctatttggaggtaataataataataaaacagccctttgtgaattaatataaatggaaataacagaaactccagtttggaataacatgatttatgtgtgcaattctttaatatcctgtcaatttgaatagtgatgtttttatattcacagtcagttgaagatgccaataacagcggcatgaatctattggaccagtctgtcattaaaaaaggtatggataattccccccaaaaagtaagcaaagttctctcatgcattaacgtctttatgatgaattttcactttgggggaattcattatttgacaagacataaatgtttgttcacaattataggacaatggctgtcagattaggggaaagggcatgttgggaagatggaagttgggcaagggagaatgaaaacatcagacacaaattcagatgagtgagacagactgttgcaatttttctcatggcatatttggtagccattcttgatacatcttaaataattgagctatcatcatgtgtggaattggctggtaaacactggtttcaagaaggtgctacaattatttcaatgataactggagtttgctgagttaaagcttatgttattgagatagctctttcttcgttttgtatttgatttttttggtgataattttgttcccagttctctatgttttatgagttgtttttatttatttattttttcattgtgccaaatttgttgctaaatatgcgcatcctgagaagctgagacagcctatgcacatttctaaatcttcctacatatgcattcatgatttagtgtgactgtggaatcaccccatactgttaaagggcatgtgatattaacaaatgtttgcagtctcttgtacagctgtaagcaaaataattaactaattaaactaattaaatgtaattacaataactcattttgggtgtattgcagctgcttaattttttctgcttttctctgacagtcactgagagaatgcctggcgattagtgtagctgctaaaaggcctgaatgtcactcaaatgccacaaatttaggagtttaaatgtgtaaacagtgcaatctttaattatcacaggaactggcatttgacgatacaattttaatactgtaaccctttctcatggatgtcgaagaaattctgtctctatatttagtgtcaacaatcctcagctttcaatcatttatgattcacttgagccacttgacattcaacaaaaacaattaaaagaaaaaattctttgggaagtaattcatccagactcaaatgggatagtaggagggttgtggaataaggattccaaacagggtgaggtattctaaattgtcttcttttacaaagtcaggaagagtagctttgaaaggtgggtgggggaagctgtacttgcaatgatgccatttggccttggaatgaatatcctaaagtatagtaaggtttggggcataactatttattttagtggttgcttcaaacatctctctctctctctctctcatcttcaaataatattgttttggcttttaatgccagcttttgggtttgctaggatacccaggctcggtgcttaaatttgcaactgtgctgactgacagctcacttttcctgttttctcttgggtctcctctttcggttaattgctggttgattagggtggggtcggggaggagcttctccattggcttttttcagtttgttttagttcctcctcccttttcatggaaagctagaaccacttagctcagggttctgtatcctagcaacatcatttgggctggcaggggaacatgcccaacagatgaccaatcagaaatgttattaatagccagtccaataaaaatatttgtaacttagcttgcctagcaaaacagagctgaagattttcttagatgtgggatgctttggtttcagagcttgtatatgtttgtcagtgaaatgtgaatatttatgtgcaaggttgtctccaggaataagaaaaagagaataatgactaaagttgatggttctgtttttggaaacagaagagtacattttatgtccccccaaatgtacagctttttaaaaaatgtgcagcttaaaatatttaagtagcatcccagttactttaattgattcagagggtgtggtatgaatatgatgaaatggtaggtcagttgcattatttaatatttgacatatttgctttattacatgaagaaaagatcctatgtcttttttctttagagagccataggcaaaataagaatacgaggttgatttacttttctaactcagtataagccacttaaagttgtggtgagttcattagccccttcccctgcaccctagtctctttgctcaccatctccccaattatgagagatgtttccaagagatgaattttgtaaaagaggtgagaaagtcttgtgaactaaatattctaaatttcaacacctagaagaaggcttagtttcttaatatattttctaatgggcttttaggcagataaaaaaaaattctacctcattagtaacagattggcaagtggtctaggtttgggggtctctgagtctgtgtttatgaagctagaagacttaggcataaatgatgcatgtctctatctctatgtctctttctccagttatggtaaggccccttctaaaatttaaccaatctaatttttcacctgtgtttatgtcaccccatagattatgggctccctctcttgttatgtttgctatctgggcttagctgacatttctgaagtaatttagttaagaggaaatgagttgttcccagtagagagagcaaacgagtggagtgaaggtagccagcgtgataaatggctctttcatttgaagatctccagagctcgtttacggctaattttctgtattggccccctttgagctattaatgcaatctgcagggaccgtggcccctctcctcttagctgccccattagagctcccattaagctgcctagtctcaactccatggcgggagtgggcggggggagtaatgaaaggtgctttttaaactctcctaatctaaaccggcagagggtggttaatacgatttgaagggggctggtcaatgagcaatcaataaagtaataatgagaaggattcggtacattaacagtctaaaaatccaacgagacattaaaaaatcattcttaactctcagttccattaagattagaaatctggggggaggaagagggtgtacccagctaataaaaatgatcactgccaccatcatgttgcttaactcaaaaaaaggctcacctaaactttaagaaaaagtttttggtgcaataagaagccaatatgcaatctgtttaacaccttagacagcagaaaatattctgggatttcttggaaaggctagcgtggctggaatccaaggttcaaatgttgtgactgtggggcattttcattggtcttagggatatcctgtttggttagtttcagttcatcctccattctctcccactttctttcccgttagttctggccccttccccacataaacactttgactggtgtggattttctttcatgggaaataaagaaattgccaaatttctattacaattgattctgttgggattcttctgacctagaaggtaaaatgctctgagagtctgtcagagtctctgaacggtatgagtttcctctcaaaaggaagaagttcccatttccaggttggacttggatcccaatagctatttatcaactagagaccctgagaaacactgcagccactctttcaaagtcaggtaggttagacattcttcttcaacactccaagtgctgaaactgagagagacaataaatgactttctcaaggtcctatacaccatgtaagtgatgagactcaactcagtttccagccttttagccttctagactctgtccctataagatgccaatactggatgtttgagttttttaatatccctgctttatttgtggaaattatttttttccccacaatttcagtccccacacttatacatgcactatagttgtggaataaaattttacactcaggtacatgaggaagtgtttagatctgaggaaagggtgctttgctggtgagaaaaagagtgctaacttttaggggccactttgagtcagtgctaagcctcctggttgtttcccaatgtcatttacatctttaggtcaagagtgcctttcgaaggtacttaccttatgaatctataagataggttcatttcttcccttctcctcaccagcagatagaatcaaatacaaagttctcaaaactataatttcacacttaagtttaaagagtagagattaaaaactagcctattaacactttagctcttctatagtcaactaatgaatagtattttctctaatcatttttctttcctctcttttaaataaaactccagccatgttaatgaaatattgatctgtttttagcctttttttacttctccccagcataatgcagcaaaaaagggaggggaatgagttttgtgggtgttacatccagaacttggccttgacacccaactgggaactgaagaggaaaaaaatacttctaatgtatgcacagaaaattgtaaacatgtaaagaactgaaagcttcatgctgagttttgccatgccccatttccttactatttcctgctgtcgctttaaacctatctcagtcatctctgggttccatgagcaggaacagtgtgctcataattactaacaaatcaaccaggccctgttgagctctgggtttattgataaactggaagaaagcagaagggaaaagacaaagaaagtaaaatatggggttaatcaggtgaactaagcaggtgtgaaagtggaagggaaagtagattatgatggagttatggatctaaaggaaagttgggacaagaaatgtgtcagatctggtctaggggaccaatactaaggagagaggtttagaacatgaggataggaggctgggaacacaattgtgatacttaaattagaaaatggaaatatagtccaaagcacatcttctgacattgtccttgctttgactggaaggggaaaaaacaaaaacaaaaacaaaaacaaaaaccttcccagagagggcagtgtactgacagaagctgattggattgggggtatgcaggtgataatgtatatgcagaaaggtactcaacccatggcagggagcaatatacattccccaaaggaaatagctcttgtcgggtgaatcaggcaattaacaatagtgaaattacagggtggtttataacatttctttaaaggcccggcttttccagaggtttagcttctgggacagggagaagcaggtaagattccaatactcagtgggtatttggttatccactgtgggaagcaggaagtgaatttagtactttcagcttagtggagttggttgttatttaaaaaaatattctaaatagtatttagagataaatatgttgctaagtatagaggtgagatttttatctaatttatttctataattcatatcatgttaaaattacaaagggccatctatattttggaaaataagtttttccaagttttcataatgccaactcccatgattgtcaattatttgtttttaatgccttcactatgagtctgaattatggaaatcagcactgttgtgaagagtaagatagactgaaatagatgcccccaccaatcacctgtctattaagtgactttaacttcacatctcactcaaatctgattaacattcacacttcaacttttcattgattcattcttaaatgggaagcagattcactgatgagaaaatgagggaaatcaaaaagaaggaacacctctctatatcccctgtccccgccccatgacagggcagaatatttactctgttgccaacatcaattcatccatctgggacaaggtcttgggctctgtggacagatccatagatcctaaaatgcctactgggtagtagcagaagggaatgttttagtctcctcatccactcttgtaataaagctcttttccacaaggtgtttgtaaaggatctaatgaaattcatagtaaataaaagatttgggagcaacctggcttctaggagtctctaaacaactatggaggtttgtatactggaatctgtggtagagagaataaactgttagagaaatacacagtattggttagtctgttccatagaagggatgttatgcatcttgtttgatatatagggttctaggctccagacgacagaaacagcctatcttttccccacacaattacaaagtgagatagactttatcaaataggtagggttggaaacctcttttttcacaccagatgcatgtttccaaagattttttggactggtgatcgacaaataccatgaagatttggaggcctcatatcccagtggaagaagcaaagttacagggaaagtcaggaggtatagccacctgtttaggggcctgtaaaacctacataaagaaaatgggcttaagcagtgaagtccaagggaaaatactgccagggaactgggagatggactgttcctcattcccagccttctggttccactgagcctagcctctttctgacatgcagatgacactgaaacacaattaagcagaaatacaggctggagaggctgaatgcaccagggtagcagtggcaaccagctgtcaactcttattaacttctgcataaaacataccttgagtgcggtttgttatcaattacttgccgaaaagaaacaactggggcaaggcaagaccgccgctcatatgaattagagtgattggttgattgatcagggcacctgttgtaaatcataactgttccaaacaatcactagccggtgctttaatttgtaaacaaaattcatgtcactgcagaattgctttcactgaagatgagcatttgggttcctttctaaatgaatctgttgttattatgtagggaagaatggggcccactttaaagagatgagcagctgttttgggcccagctccccagctcaatggtattatttgtctgttcttgggcatagtatctgatggggtccaccctccttatcctttctagtgatgaccatagatctgggtccaataggaaaggaggaaggggtttccattggaattaccattttatatcaccgcatggtgataatcaccgtcaggcttcagcaccaaatgagataggcattattatcctcaggagacagataaggaaactgaggaggttcagacagagtcagtcaggtgtctaaggtcacagagttagcacacgatggaataagatttgcctggttcccagcacagtccaaactctgggttgtttgatttcttgatttgggtagtgagcaggactgtagcaaatgacactcatatgtctacacacgaagtaagtttccagaggaggtatggctttgccatctgtttgtttacagctctctgaacgcactgcagccccactggaataaacacttcctccctcagctttccacttggtgtctgtcctgtggcctcacacagagacacattctatcagccggtcatcaggatcgaaacttggtcacctttatggcaattttttctctctttctagttccagttcctcccaaatcggtgacttctctaatgatgaataaagacggcttcctgggaggcatgtctgtcaacaccggcgaggtgttttgctccgtcccaggccgtttgtctctgctcagttcaacttcgaagtacaaagtaactgtgggagaagttcagagacggctgtcgccccctgaatgcctcaatgcatctctcctcggcggagtcctcagaaggtaaccccaccacgaaaaacaaaaacaaaaacaaaaaaacaaacaaaaacccaccagtttttatttattggacagtgaggagaaggttccagcaaaacccaatctgcagtctgacgcagttgcctagcaaccgggtggccggagcattgctttcgcgcagcgcttgggaggatccgcggccgccacctgctcgcccacaaactctagtgtccttgcatccaggcctgcccgcgccgcgcaagtcctaccgcagattttgccgccctgggaacctttcactttcctggccctgcgcctggcgcctctcttcctgtcacccctaggacatctcagggggcattctccagcctgagtacaacgcggaactaacagccccccagcccccccacaaaaaaccccataagtttcatgaagcaactctcttcataccttcagtgtactctttctcttttattgcatgttttaaatgcagttggcacccagtgaaattggtctttcaacctgctgatgcactgtaacccagtttgataaactctttttctaaatttgtgacatccctctttcaataacaccaccaccaataatagcaataatatcactttagaagtatttataggtattcctgggagccattcaggtgcttcacagtattccacagcccagagactgactcctcctcgtggaaatgtgagagaatgtggattttatcttaagatgtaatgcctcccttgaagtccctgccaatgcctgaacactttggcagtgtccctgatatgaaagtgactttgtctgagacaaaactttccaagatgaccccttctgggggttgacagtccttttctttcctaaaagtgactgtatgaatagtacagcaaaagagattacagtaactgaggatttttacttgtacttttgtccatactttagcacatacaaggagaatcttgggagaaattaagggtgtgacccaggaactttctcattttgaatcctcttcctctgccctcctttgattcagttttcaagtgagtgctttgagcctcagagtgtggaagttttcaatcaccccctgaacattaagcctgtatatataaatttgcagagatgaagtaaaataatcaatataaagtgcttatcacataactacacttccaaaagtgttagttttactgttattatgatcatcaccatttcgatttcagtctgccctctccttttaacataacaccatatacagcaactcttgaccccttcctcacaaagcccacctgttgcagcaagtgcgctctcctctctaagccacctggctcttatcctcttttcagcaaggttgtgcttgcccagtttctgctcacctcactaactccatgacaaggaaggaacatgcacgtgcatgtgcagcttctaccttctctagacccataacctacacctaattattcccatctggtatcctttttttttcttttctcacaagataaaaaaagaacactcagttaaaaaaaattctctgtattgcagaaattaagcaaacctcagcaaactatcagcaaataaccaaaaggaagggggaaaaatgtgctaacctcaagttaaaacctcttcaagctccactgggctttagattgctaagtctaaactttgtttcaggaacactctaaggttaatcagaatgttaattcttgcaatttcagagccaaatcgaaaaatggggggagatctttgcgagaaaggctagaaaaaatcggtttgaatttacccgcgggcaggcgcaaagcagcaaatgtcacgttactcacctccctggtggaaggtaagcaagacgtgtggccatttcacgaagtggctgagcttaactgtcggctggaggctgacattttacacatttcatgattaactggaaatcgttgtgattgttgtgctcttatgagctggatgtcaagcggcttcttgagagaggttcaaaggtccttttacttagaggaagccagcagttgtagacagggcaagggaagtatttgagagttcctgtgctctgaaaagtgctcaggtccagcctccaagacaaagcaggggtcactcctgctgtcacgtgcaggacatcctctatgtgaactcttgcaagagtaactctttaagcaataattcattctataccccttcaccttgccagatttgaattgtcagtagtagaaaacacattgcattcatgacccctaatggttattttaaaacttttgtcactcctagggccaaatctgcagattacctgggacatgttgttattgaaatattgatagcttagtaaggccaatgatagctaggggaagattggggaggaggggtgaagaaatatgtaggggagtcaggtattatcttcaatgtagattcatcaattgtgaattatagggtgataattgcaataagcaccttataatttgctcatcagtttgggtttggggatgatatttatggtatgtaataaacaaaatcatctacacagtccagaacaagaggatctgcagttgaatttgtgggaaataatatgaaatacagtcagatggtcctaatggaggaagatgcagaattttctctagcatctagcttgtaggtcttgtgttttaattccatttgtatgggtgtaatattatgatgctcctgtagagagttggttttagaagatggaatattaaaatatttaggcagcaaccattaatcatcacagttacaggccttatacttggccatttttaaggcaaagttgcttggcctgaacaccctccagaggcaggaatcactgaaatttccagaccacacttactagtggttgactcttagcctggaagtttcacattttacccttcagggaattgctaatatcatagtcctcattttggaaagcaatcaaggtaaccttagctcaagacagggatttcaggggagaagggaggaaactggaaaccccactaaaattccaatatttgtttggcagtttttggttttgtgactccttgtaagcaccatgcctgaagtcttttgttgttatgataataatgattaaaagtaagtcatcctccttaaaaataatgtagctatggggtatttcaacatatctgtttttcatgtatgggatctgtccttgaaccccaaaaggctgtgtttaaagggtaataatgctttacttgaaaggggctttcacataagctgagtaataccttagatactccagttttctgtagctgctgtgtcatctttgtgcagtgaaaagtcctgaagtaggaggatgatgacaggaacctctgaaggggagaaacctgaaacttgactagcaggaaaagtgacaaggagaattattatttcattgcagatagaaatactctttccatatacattttacatatagtgtttaatatatgtggacatatatacacatgggcttgtttttatatatttgttggaatacagttgtagcaagatgatggtcacttttaaattttatttaaagcaagtgtgacagatgctttaaaaagaaagaggaatctggcttaaatgtccagccaaatgtccaaattcaattataaggtggctcttgacaaaaagattagggtgtaggagaccccgtagctattcaggggatgtctagctaggagttggctcagggagaggcaggaaaaagagacaggagcaaagttggtcccaccaattttaattatagcttgagaatcatttttcctttaggcatctctcacctttgcttttggctccaacagctggccttctctggaaatactaacaaagctgacaagggaatgtctccgccctgggatatttagggcctgggtgctgattattacctttactgctgtctttttcaggagaagctgttcacttagctagggattttgggtacatttgcgaaacggagtttcccgccaaagccgtctctgagtatttgaaccggcagcacacagacccgagtgacctgcactcccgaaagaatatgctgttggccaccaagtgagtttattagactctgggccctcatctcactcccagctggctaggccacccgactttggagtaggtggtggggaggggcagagaaagaagccagagggttgtctagaagtagcatttgcagcctctggcaagcaaggtaggcagagttgatgggctacaggtttgtctcaggtgtcctctctggggaaaatggctttgttaatccgaatccagccttcttacaattctcttctatcactctggggatgtcaggcagatcttttctgagggagttcttgttccagctcttccctggatccgaaggtgcatatttctgcttgggtttcacatctatctctctgtcgtagccacatagccatgtgtgctcgctcagggagtctataaaacccacgtgtacccatctctacccacagctctaattactccgtttccaacgttgctgtttgtcatcttccacagacttgtaaaatttactacaactccagaggggaaaatagtaaatctctggctaaatttaggtctagagctcatttgaacttttacagtgggttttctatttatttgatttactcctgtctttggcttcggtgtcatattgttggtgttttatggccggctcaggcctgcagtgggcggcgctgcgtgcgcccgcacgtttctcttgcaggcgcggcccaaacagccgcgctcatttatttagtgttggaggacgcggtttgtcccgttgacagcgtaatttaaagaaatatatggaaggctgaaaaatcatttgctcaaatttgtccagatgtttttgagacgtgattggaatttgattgcccctttccgcagggtcaaaaaatattaatgtcccagaactttaattgcttacagaccctggtttgggctttgaagatttaaaatgtttgactctaagcatttgttctccccagttcagaatgtcttttttggcactttggtaatgagtacaaacttaaggaaagactttacccatctctcccaatgatcaaaacctggcatccaccctctttcttgaaggttttcatctgctgtatcaaccagcagtaaaataggtatttgtcagtagattgccctcctgccccttgcgctggtgtctggtgaggcacggggtgtgtgtgtgggggggatcagttgtgctttataaaagaggaagggtactttagggaaaaaaataaaaccaaactgtataaatcagataggacccacaaatgactctcatttctctaaggtatgcatctaactacccactgtccaagcactgtggcttctcttaggccagcacttctgaacctagggtatcagaatcagctggtgagctttttcaagatatttctgtatggggctatcctcaaatcttctaaattggaattactggaggtgggggcctgggagtgtgtgtttgaaccccacaggtgtttctaaggtgtacctcttaagagcttaaaaactgccccactttggtcagaacccttatctatttcttcctggttgtgaggatgtatgtgtgtacttcaaagggagaatcgagggtgcctgttagtgttctctatccacccatcttaaaaccagcaacagtttagcttctgtgactgggtggtattcctcatcagatttagccactatcccaaagtggcagcaccctaggaaaggatgccccaggattctttgagtccaatcacctgccctgtttacctgttggctaggccaggtgtggccaggtatctgtgagtcgggccaacccattgtgggtctaggactggagtgctgtaggtttatttttttcctaaaccccacagacccataggctgggtacaggcaggtggacatgagaaatctgcccatctgtgaaaagctgtggcctttgggatgctgtgtgtctgcctgccagccatttgaccttcagggctagaaccatcccatccagctcctatattaaaatttctcaaataagctcaatccataggtaggcacgcaggatttctaaggctgggagattcctctaaattgtaggtggcttgaggaaataaaaaccttcaacaaataaaaatctatcctccctagtgtcttaacagcctacctttaggttttatttaaactatatgggaatccttttatattgacaacagtctggttatacaaagattttcagtgccctacacttggaagaaagaaaggagggaaaggcagaaactagctccctcccccaatactgcaggtaaacaggtttttgctttgaatggaatcagcattctctagaataaacagtttcttgccctgggccatggaaggctccagcaatctgcttcagtgccagggacaggcttgtggccgaggggcctaaatctttcagggctttttgcgcctgatcaccaagaggttggagaggtgggaggggcgcgggggaaacagctcaaaagaaatgccaggtaagagctcaatattatgaagtattaaaaatcaactgctaaagcctagcgaatgtcccaaagcgagtccaggcggtcctggaatggaggggagaaaggctgaagtcgggggaaggcaaggctttggggtggaaggggtgcattacctccccacccccgctttcctttcagtcccagctgctcgagaagggagggcgctgggaaaggaaacagagcggaatcgcccacattagcctcgctcttcggtgacccggcgcctctgggcttgtgtgagcgtctcctttctaatgccaatgacaacgacactgagggtgattttctgtgcctcgcccacccctttgcaggcaactttgtaaagaatttacggatctactggcgcaggaccggacaccgatagggaacagccgacccagccccatcctggagccggggatccagagctgcctcacgcacttcagcctcatcacgcacggcttcggcgccccggccatttgcgccgcgctcacggccctgcagaactatctcaccgaggcgctcaaaggcatggacaagatgttcttgaacaacaccaccactaacaggcacacgtctggggaaggcccaggtagtaaaactggcgacaaggaggagaaacacaggaaatgaaaaatttttaaaaaaagaaggaaaaatgttttaaatacaaaaggaaaaacagacaaaaatttaattttagctttaaaatattggattggctttggaagaattatattaggtagaatacacatacaatcaaaattttaaaaaaaaaagctaaataacttaaaaaaaaactgaggcgtacaacggagcaacaatatcggttctcagtgtctatttcaagatacatttggagacaaccgtccggattttccacttcggttctttcgagtttagtaatactgataataaaagaaaaccatgatttccccttccctttggaaaataaacataagactaaacatgagaaaaacgctaacttattggaagaaaatcggagaaacgttggtgtcaatgctttgagagctggttgactgagacgcacgaactttttaattttaaatatatttttaggaaactctcgcagtccccgccctccatctcacctcacccgtctcccaaccacccttttccatgttaccctcccttcctcacattgttacgggaatcttctgggatgaaaatgagtgtggttggcccttttgcgttgtttcagtcctctcggtacctccccgcccagccctgcgatcttaactcaccgggcccggctccccggccgcttgcataattagggagggcgagggcggggcgggaggcctgtggagaccaggcggaggctgcaatttttggtgccggccggcagagcaggttctggcggctgaggaaaatccggaccaataagttgattcaaacatcatcagttcctttcagaaatgttactagctcccagccttgccagcatctgcatagagagaatctcacatttattatatttgtgtcatctactaattttatgaactatagtaaaaaaaaaaaaacacacacacacacaatatgaatacgttgattagtatgtaattccttcggaggggtatgtaccatttcattctcttctgttttccaaagctttgcccgcatggtttatgagcttcttcaaagaggacttgggcttcctacacaatctataaggtacagagaaaaaaaaatccgatccctttttaatcaaagcctgtgtgtcagaattctgcaggtgcacttctttaaagaagctcaaagggaataatttagaaagtggccaatatgatggaagcagctttgaatctacatgctaacattcctcaacactccaattccggtggaggtggcaggggagggggtctgcaaaatgaattttaagggaaaagagtaaggattcttagagccctatattctaatagtattgccctgcatttaaaattgatttgatttccctgggttctttggtgattgctgtttaagcaaggaaagaagcagctttacgagtggacgtggggaggagggcggcacaagcacccacatttctgtaacaattgctttcttacaagatgctttatgaatgaggcatttttccctcccagacgtgcacttgttttggcatataatggcaaaataatgcaaagtgaagggagatgtatttcagctttgatttttaccgtctggatacatcgggactattcccagtggataaagtttcatgcatttaatatttctcacttctggcagcccagctcctttcttgggctccatcttagcattatcatgaaataagatctggaatccattgtctgcacctccgcaaaagcagtgagaaattatcccgggataagggtgaatgagagaggtctctaaatatagtgttgatacactcacctatttaacaaagtagacgagatctttgcaataccccttaaagataacgacatagatgttgttctgcaggatttatagttaggacccactcaattctccaggactcccggttttgcccccctcccgctttgccttggtgggggtggggattgggggagtggggattgcgttggggttttaggaatctgctgagagctttgcccatttttattaaaagaggaaagggaagttaggaagctcgtctcaggtcaccaaaagggcccaagcaactgttagggccacactgcagcccatctccaacccctagcttcgtttagcacttctgatcttcatggcccagccctagaactgttgagaggaatgcaatggccaagagctagacgttacggagagtgtagtcactctcttttcccagctcagaggcctgcgccttcgtccgagagctcggccgatcgcattagatgtgttctgattgcacaaggccaggagagaccacactgaaaacgatcgtctcctttccttgcagggcaacgcgccccacgcgtgtgacgtgcgagagacgcgatggacgcgccttgctcttactgtgcaggtcctgagagcgtgtgggccacaggcgcccagtcgtgttgaggacatagaatcagccgctggaggggctgccgactgcgcgggcccttcccgctctcggtctcaccctaagggctaaggcgaccgagaaagccccattctccagtaggtaatggggcggcgcccggtgggctgcaggtggggagggctcccagcgccgccagcggccacccggggcgccggctcctggagggagagtggcctagaaatatccaaggaatccgaagcttcccctcctccacctctgccagtacggaaacaccccaccgtcacaatcctaaagcggggagatgggatgggaattgtcttacttggcaaggcagggtaccttcattgccagacgccctcatttgtgtgttcctccttgctccagcgagatagaaccttttgcgcccccaaccccgtttcgtggagtgagcccactaccccttctccctccctcacttctcctttcatgtaggacccccgcccccttgctttccttagccaggcccgctacatttatctgataattgagttattaaaagatttggtttccttgggcctataaatcaataaacagtaggattaacgcaatagtttgccttttaagtcaagggagacgtttaaggcaagcccctttgagctttgttttcaaaccaaacaggtgagttgcagctctccccccggcccctgcactcttcagacatttggtccctgcccactcctaaacgctcagtcccaaaacaaaatagcgaaagacaggaggagtcaggatgtggcagtgctgccttcacactttccacttcgcaagttcttttaaaggttccaaagatctccagaccattctctgccaaaccctgccgcctcctgcacgtattgcaggtctctggggagcaagaaatgtcctgtttgggtgaggattccgtcacctaaaaagatctttaacttctcccccaaagtgggaaggtaactttctcccccttttccccaccaccttcactcctacacccccaattaccttgcattttctttccttccttctggcctccacacccatagctttcctccatccccacttaaagaaccgaagaggcttttaaagacctggctgctttgttttccttggccaaggaagccactttctctcaagcaattatttcatatcctacgaaaactttggtcgaatggaaaactcgaaacctcgagcttatctacacactgttcctctgctacaatgctttcctagttaagagtgtttatagagaatttgtcatcacatctgatatcctgtacttgtaatacattatgtggaaaggaaataaccttaaaccgtctgatgttgcctcaagagcccaaacggcgtttccccacctttgacgatgtatgtgaaattactggcttaaaaaaaaaagtatcaatttttttttaacggaatgaacactatccttctttaaatgccaaaatcgactccacctttgagttggtctctaattctctaacattgtttttgccacacaatcaagaaatatcaatctattgactcttcacgagaagagctctggagggtattcatgttaagtttgtatatatttatttatgcttaatttaatgggaatgtgtaaatatggcgagcaagtagtttgggattatttatctgtgaatctatacctctgtgaatgggtggttaaaaaacctcttgaccctagatagaatcctatctgaatttttctgttctttataaacaagctgttatggtaatgggtagaaattggtttattgtccagtgttaatctgatttacataaataaaaagattgttgtgttttcatcttcagtttcttaaatgtggacaatgtttttaattctaccgacagaggaaaagtgtaagaagctttttactttttgtcctcccccatcgaagcacccacagcgttttcattacaacagaaatataataaattttgcttctcagaaaaatgaactttttttcactaggagaagtgtttttgatttttttaaattccaaatttacattcttctctcctatttctaaccagatttgcaataaaagctaatgttaactgaatcttttggtttcttctgccctttacaaatcgaggagtcaaatttacttcccaggtaactagaggactctgggttgctgtcagagatgatgctcccttcccactgctcgtgggttggcattctggcatagtgttctaagaaggagatggtgcacggtgcaggagaagtcttcagggctgggtgtgggctcctgcacccctcaacttgggatatgaaggagttaacccccatttcagaattgaacccgaccctgacctcattagcagtgcaaggccctccataaacaatggaggaaaaagctccctcaactgagaagaggaaaaaagtgtacatgtcttaggaagttggggggctcctaccctaggctcagaggctgcctagagaagccagagcttttcacacctgggttaataggcttcagctgggccctaatgggctgcagtgatcaaacatcgtctcaatctgtattttattccaaggcttaggtgtcttccttgaggccaggaaagcaaaatcacccacgatgttaaacagtttggatgagtcactgctcctttttgcgcctcaaggtctttatctgtaaaaataaatatggacctcctaaggtcctttacttcatcaatattgcctatagtttaattataaaaagcagaaacagcaacctgtatatgagtttaaggagaattggaaactttaaatcatgatgatcccagatttatatatcagtgcttagcatatagtttgttttcagttaataatatgcctcccataccaattttctgtttttaaacgtgaatctttttcaattggacttccttatagggaaaggcagaaggaacaatggaatctgctttatgtgagatttcccccttcctgtcctattaattaaaagcgggaagatcatggctagaactataaatagtggaatcaaagaaaagcaaaacaaacaaacaaacaaaaaaaaacaaaaaacaaaaaatgggggggggaataaaaggaaacaaggaagcagagaaaaccaagggatgtgtgcttatgaggacatacatttatctagaaaaaaatagatatgtcttattctctggttcaattgttacactgagtgttcctttcatttgctttacagaggatgggagttggttaccactgggattatacaaagcaggtggtgggtaatttccatatcgtatggcaatttttcctgctcaaggttagcacgagcccttgataaaccgacctgcaa

SEQ ID NO: 615 - DNA, 270938 bp, Homo sapiens
  source 1..270938: mol_type = genomic DNA
gaggagtctccaaagaaaccaacagtgctgacactttgatcttggatttccagccttcagaactatgagaaaataaatttctgttacttaagccacccagtctgtgatagtttgtgatgacacccatagcagactagtacagtagctaacactggatacttattatgtgtcaaatactgttttaagcactttgcatattttaacacatttaatattcatagcaaccctatttgtggaaggtagtacagtctacggcacggcagctatatcggcccctttattttccccagggtttggagtctcttccactttccagcttgtcctcctgcccttcactctacccgggaccatatcctccagattctcacaggtccctccatctctcctcaggtgccaggctcagcaacctgccctcattacctgccagttcctgaccctatctgtcactagctccttacctggctggattggtcttctgaatacttgccattccctggcatgatgcttttgcaaaataagaaaatcaataataataataataactgctagtgtctaataagcatgtgctcttcaatgtctattctcttacaactaccttaacaaatagggacatattattattctccttttaactttgctttccagagaaggaggctggggctcagggagatgaggtgagtttttccaggtctcacaggaacaggactgaaggaaggaagccatgtttgccaggagaaaccaaatggacatacaggctttctgtggaatacacagttcctgctatcttttggttgacaaagtctgaggtcctaggaaagagaggaaagtaatagaaatatgaatatgagtgtgtgtgtattttgcttccctcaccaaagttttcacagtctatattaatgagggcacgattttgcctgttttgttctctgccatatcctcattgtctagattaggtgcctgctactgtggagctctaagaggttgttagagaaagaatagaagaaagaaaagaaggaaggaaggaaagaaggaagaaagaaaagaaagagggaaggaaggaaagaaagaaggaagaatgaaaggaaagaaggatagaagggagaaaggaaggaaagaagaaagaaaggaagaaaggaaagaaggaaggaggaaggagaaggagaaagggtagggtggggaaggaaagaacaaaggattgcttttccctcactgtgggcttgagcctgttccctccaaagatacagagctttggtctttacccataaaaaaggattttgaagtcaccccaccccgttctgttcccccacagtttagacaagatcctcatgctccactggccacacgagtgccctcaggaggagtagacacaggtggagggagctccttttgaccagcagagaaaacaggatggggcactgcctcactgaggacctgggggtgggaaggaaagtgccaacggcagctctataaaagctccctggccaggggacctagggcaagcagtggtttctcctccttcctcccaggaagggccaggaaaatggccctggtcctggagatcttcaccctgctggcctccatctgctgggtgtcggccaatatcttcggtaagttctgaggccatggagccaggcggtggggagggagctccagtgtcagccaggctctgccctgggccttcgaacaggtgcgatctaatttaatcttcacaaattcccacatgtcagtgatttgctttttttttttcagatgaagaggcagatttagagagccgaactgaattacttgaggtcacagagctagtgattgatggagcagaaatgggaaatgtggttgatcttcctaattcaattctaggtcctcctcaccccaccattttggcaaacttttggcattgaccttgggtttttatccccttagctattccaaagtctgtgtcatccataacaggtattttagaagcagtagaaaaagaaatctacctatgaagtgaaatagccctaagttctgtctttggctcagccacttacccatatgacttcgggcaaagtgccaagcttctgttttttttttttttttttcatttaaaaagtaaacaaataacacacacctcatgatgcggttgtgatttctgggtaggaccctatgtgttacaagagttctcaatggaaaaataagtcatgtacattattaattaattggtatttcaatgtttatctggaacatgttacatctgcagggcatggcttgatagattcaagaagaacttccttacggttctctaacttactccaaatagcctcatgggaattgcggcagggtgggggcgggcggggaacgtgtagtcccagcgttgattttgggatccttcacttgccagttacgtgactttgggcagacgactttcgctgcctgagacttggtgcctcatgagtgacaaggatatattgcctgtcacctcttaggagaatgttgcacattaaatgagctaatgtcatacttgtaagaaagtgtgcttagctgccaaattttaaaataggctgtcataggtaatgatgatgaccctggaaaagcatctgtgcttatgagagcccgtctctgtcctggcagcccagtccacactcttctttgatgaaccacttttcttttcctagagtaccaggtggatgcccagccccttcgtccctgtgagctgcagagggaaacggcctttctgaagcaagcagactacgtgccccagtgtgcagaggatggcagcttccagtaaggcttatgtcagcagcgaactctcaaggtccaagatgccataaaaagcatcttgtgccttcccccctcttcctgagctctgccctgcaactcctttgtgcatgtgaggcttggccactgtcatttggaggtgcctgcctttcagttccactgtcatttggaggtgcctgcctttcagttccccaagctgttcaacactggacaatctgaccaagtgaaccccaatccatgcttcatcctcccactgccctcccttctcttcttgccatcactttttctgtgatggcttgaataaacggcacgtgtggggagtggggcaggttgaggagagtgtcaaatgatctgtgctttgggacctctccctcctccaagtatcctcttgagaagctggggtggtggaagcagaggctgccttgacttcctagtccttagctgccaccgaccctgcccggactagctctctaggctgcctctgggcttctgggtcgctgtctccacattgagctgctctctgaaaggggtttctccagctgccctaatgcagacttggggcctgagaccctctctgtggagagtgtggtaataatctagacaattcttccctgcagaatagacaggaatcctttgcaatgtgcatgcattgaaatttccttgtgctattccagtcatgttgaatcaggggaactccatttatataactgcgttctgggaaatgtctgtgaaacctccctccctgctgctatcttatgtacactcttaatgtgcctaacctcccacgagtgtgcagagatgctgctagagcagtccctgcttagatcactgggaattctggaacagcaaggaaggagttaaggaggaagtctcactttcaccagccttatttatattcccattcccaactctcttgttctggcctcttgcagtttcaaacctggcctctcttcaggaggctttgcatatgctgttccctttacctggaatatcttttaccttcttatacctctgaccatcctgcaggtctcagttcagtcatcatttctggggagtcaactctatggcctggcctgaccccacccatgtgcttcccaatataccctgctggcccctgatcccactaacatcccacccccaagcccccactccctatccatacaatgtgggcactgcctttaccctctgcagcctcataatgcctgaggacacttggtggatgtggctgaagccctgcactccagggtgggtcacttgttttggggctggcaggctggacaggtggtgaatgaatggctggggcaggaggcagagcaggtgctagccaggcaggaaaagtggggcctttcctttcccaggtcagccacccttctccactccactctctccctaatttaaacgaaccaaaacttgcaagaatggaaatgaagaagaaaagtagcctgagtgggagccggcatgtggctttgggggcccatcccagggtcacctggtctgtgtctcctcctcaggactgtccagtgccagaacgacggccgctcctgctggtgtgtgggtgccaacggcagtgaagtgctgggcagcaggcagccaggacggcctgtggcttgtaagtgggagtgggggacgtcccttggagggaccctgctaggacaactcacttccaggaatgagcactgggtttgggtgggtgactgagcaggtcctccctctgggctgctggcttctcctctgtgaataagaatcatccctgcaagccatggaaggccctatttcctgcagggccactgtgaaagtccagtcatttgttcaataaatatctacccagttcctcccatgagccacatgctgagaagacaatggtgaacagacatcaacatctcctgaaatcagaaagtgaccagaaaaatatgagtgccttctcacccgtggtgtgaggagtttctaaaatttaagacttgggtcaaagctatccagttaagataattattatagtgagtaatcaaagaaacacagtccctatttaaagcatgtcataactctaaaacaatggttaacttaagccaaccacctcaaaatgaggaaattgagcctaaaaccaaaactatcctttgacggattaaaagctctgtttggggtactggttttatgcatctagtatggttgtcatgggggcacgctggccccatactctcctgctgtgtgagcttggctgagtcaggcatcctcactgagctatgggtcctcatctgtaacatgaatatagcatctgccttgtatgatgtgaggatttagaacacgtgtaaacactaggcacatagtaggtattcaataggggtgatcattgctaatgtctcagtccatttgtgttgttataaagaaatgcctgcggctagataatttataaagaaaagagatgtgtttggctcacagctctgcaggctgtgccgaagcatgccactagcttctgctgctgctgaggacctcaggctgcttccactcatggtacaaggggaagaggaaccatctgtgcagagatcatgtgagagagaaagctagagagatagaaggtggaggtgccaggctctttttaacattcagctcttatggacactaatagagctggaactcactcactccgagggaaggcattcatctcttcataagggatccacttccaggactcaaacacctcccacattggggatcagatttcaacatgagatttggaggggacaaatgctgaaactgtagcagttaatgtcactagcctacaagcagagtggtgaagcagcttccccaggatcacacagagagcccgtggagaaaactggactcagaaaagctctgttaatgccaggcctgcactctgatcccatctcccctccacaggaccgtgctctggggtacctgactgatgtggcaccagcgagatcagcccttctctgactcagtccacaggatactagctaggcctgttctgtggctgccaccccatcactgcgtgtccttgggcgggtcattcccctctcagctgtgtccccttgggaagggagcatgagttttcctgggctctgccccctggaaatttccctgcagttctatctaacattgctccttgtacccacaggtctgtcattttgtcagctacagaaacagcagatcttactgagtggctacattaacagcacagacacctcctacctccctcagtgtcaggattcaggggactacgcgcctgttcagtgtgatgtgcagcaggtccagtgctggtgtgtggacgcagaggggatggaggtgtatgggacccgccagctggggaggccaaagcgatgtgagtttcactgagcgcctgcacccctagagctggggaggggctgaagctttcctcactgcgatccaacacatttagggtttcctgccgaagtgggcagagaaccaggccctcattagggaaaatgaaagcttcaaagggaaggttttattattctcatatttccatatggtagacaagccatattcactggctgatcattagaaacataaacaggatttcattgaacgttgtgagtctcctgttgcagacctgagtcactgcatgggtctctaactgtcacgtgtatagtataagcacagccatgtgctgcatacggatgttttggtcaccagtggaccacatacatgatgatggtcccataagattataataaagctgaaaaattcctatttcctagtgatgtaatgatgatcttgaccccgagcaggcctaggctaatgtgtgtgtgtatctcttagtttttaacaaaaaagtttaaaagtaaaacaaaaattaaaaataaggaaaagtttatagaagaaggatataaagaaataaaatatttttgtacagctgtaccatgtgttcctgttttaagctaagtgttatcataaaagagtcaaaagttttaaaaaattaaaaaatgtataaagtaaaaatattggccgggcgcggtggctcacgcctgtaatcccagcactttgggaggccgaggcgggcggatcacgaggtcaggagatcgagaccatcccggctaacacggtgaaaccccgtctctactaaaaatacaaaaaattagccgggcgtggtggcgggcacctgtagtcccagctactcgggaggctgaggcaggagaatggcgtgaacccgggaggtggagcttgcagtgagccaagatcgcgccactgcactccagcctgggcggcagagcaagactccgtctcaaaaaaaaaaaaaaaaaaaaaaaatgttgcagtaagctaaggttaacttattactgaagagagagaaaaaaattataaacttagtgtagcctcagtgcatagtgttgataaagtctacaacagtgcacatgaatgtccttggctttcacactcactcactgactcacccggagcaactgccagtcctgcaagctccgttcatggtaagtaccccatacaggtgtactattctttatcttttatactgtatttttactgtaccgtttctatgcttaggtatgtctagatacacaaatactcaccattgtcttacaattgcctacagtactcattacaataacatgctgtataggtttgtagcctgggagcactaggctagaccatatagcccaggtgtgctgtaggcaaaccatctaggtctgcataagtacactctatgatgttcacacgacaatgaaaccgccgaacgatgcatttctcagagctcatccccattgctaagggacacgagtgcatatgctgctcgactgcagaaatatgtgtctactcatatataaggatttttttttcgtgaaaatgtttaggtccaaggagctgtgaaataagaaatcgtcgtcttctccacggggtgggagataagtcaccaccccagtgttctgcggagggagagtttatgcctgtccagtgcaaatttgtcaacaccacagacatgatgatttttgatctggtccacagctacaacaggtaaggggagcaggggtgtgccagtcactgggccatcacctgacgcagcccacactcaccttgagctgggggcctccatgtgtcatatgtgcagcatgataaggaattaagagctgcctcattctcatgagctgtcctgggcatctaaagtgccacggcgttttttaacaaggcaaactggcaattgatatttaatgaaaaatagatgtgccctctggccaatgaaatgtaaaacatcagaatgtgaagacatatcggctagggtgcctactacatcatttttcattgtagcaggaaaccgggagcaaagtgatcatcaaaacgtggcttgctgaataaatgtgaatctgccataaatatttatgtagccattaaaaagactgcgttagagctgctagaacatttgatctggagaggaggccacagtatattatgataatacaatacaagatacaaagcacagataatataatataatatgcttaaatttttaaagaacaaatgagcaaaaagattctttatttgtgcttatgtgactatattattatgcaggtctctatataagactatgtgagcacagagggtaagaggaaggagcataaagtgcatggttatcctgggctgctttagggccagggctgctctgcagaagaaagagtaggcagaaggccgggcgcagtggctcatgtctgcaatcccagaaatttgggaggctgaggtgggcagatcatgaggtcaggggttggagaccagcctggccaatatggcgaaaccccatctctactaaaaaaaatacaaaaattagccgggcgtggtggtgcacacctgtagtcccagctacttgggaggctgaggcaggagaatcacttgaacccaggaggcagagattgcagtgagccgagattgtgccactgcactctagcctaggtgacagagtgagactccatctcaaaagaaaaataaaataaaaaataaatcaagaggaggcagaaaggggatctgcaggagaggaaaaaaggcagcactcccaaaagcatggatatcattatatttgtgaatttttgtaaactgtgtgtatacgtgcacttacaaataactttaaaaatgtaaataatgaatataaacagagagaggcattatagatcttgacccaaatagccagagtagcttctggtcatccacactggccactggtttcttgtaaagggttcacgcagactttagatgtaattgaaccatttggagtagaaagaaatatgaatactagtctgcaaagactgatatgaattctcttggagaacttgagcctctctttggctggtttccaaaacaaccagtttctttccatgtgtgagggaggaaattctcatgggctgtgccaggaggaatctcagactagcagcctgtgtgcagaactgtcccacaggcagactttatttgaactgcatcatattttaaaaactggaaacttttattaggttgaaccccatgaaatttctatttttgtaggttaaaaaatagttgaacatgagaagtttcacatgttcaacctaaaacacacaattctgaatttctgattttaaagaacaagggtgagaggctgcacgcacgcactcactggtggcatcaagacactggctttactgctctttttagaccaaggacacgcccttctgtgctccgggtccctctgtgctctgttgccacaccactgcctacctcatccatttatatgacctgcctggtcctgtagcatttgcctttgggacctgccttctgcctttgcccctgcttagcacagcgacctggccacttactctctcagagcctcagtgttcccatccgtcaaatggaagacaagcccctgctcattacaccatagtgaagatttgatgaggcctcatctatgaaaccatgggtgcaaatttacaaagttgtaaattactatacttctgtaggtaattctcatgcatcagccagcttcagcaaatgtaggttagaatttccccctccaggcctggcctgcctgagagcaagtataaatctcaaacagccagttttattgagtacttattgctgcaaaccaatgtgttctcagttcaagatcacctgagtgcttactatataatgggaattttatatcctttaacttaccttaatacttataattagataattatagtcattactatacaaatgattactgaaacacagaggttaaggaactcaccctagtaagcttaggtgctagaactgtctggctccttttagtatcccacataaatgtaactcatctctgttcccctacagtgcatggcacagagccttgcacacagcaggtctggaatcagtgcttaaggaattggtgaatgcatccaagaccctggtgtgtgccacactgaggttgaggcacaattcacagctatttccacaagagggcagtcgagttaaatgcaaaagttcagaataagcattctttgtttaaaagaaacacaaaaatttactcctgaaatgggagccttttcattttgtaagaaagcatgtctctgagtaaattatggtattgaaaggtcatgggaagggttgggtggttggttactggaagcccagctgtaatcagggattttccgatacttaagtagacctgggtagtcgcaggcccagtgacttctctgggcacagtggaaggagccttggaggccatatagagggcctaagcttagcgactcaggtttctaggtaaaatacgagacagcaagttacgtttgaatttcagatagcaaagagtaattttttttttcagtgtaagtatgtttcaatattgcagcaagcatgtgaagcttggggttggggaagggtatatcataatcaccactggacttggatttctgaaaaaatggaatgggtgaggggagagcagagtgagtgcaaggaggcagccctccgagtttggaggctactgcactagtccaggcaagagacgacgttgacatggagcaagtgtcggagaggacagccaagagatggggtgagactggaggaatatttaccaggtggaatccacagaacttggtgaaggaattgatatggaggtgagggtcggggggagtcaagaatgactcctaggtctggtttctggatggattcttgaggataaatttgaaaaggaaaagccacaagctttgttttgggatgttgaatctaaggggattttttttgaaaattaaaatggagaagtggcagaaggcagttacttccctggggccaccagaaggctggaatcctgtgggcagctcattcgctgacctgctgctgtgagttatttatgtgctgggtgatggtttgcacttgaatttggcaatgatgtttgcccatctgaagtaggtccttttgcccttcaagaaggctactgcttacaatatctgtttggctggaaaattttaaagaaccatgttgtaatggggagcaagcttcactggtccttctgactcatgccccatcttttatattgccctagcccaaccagtaactgtggacacacattctgaccaagcagatcataagtaaaggtcttaagagccttcaagcagggctaatgccattgtcaaagccttaatgatctgagttaattggcttctttattaacccttgtccttaatgactaaacacactcaaacttcttagcaaccagtctaacttcaaatgccttagccacccatgctacccagattgcccagtgggaagaaggatcagatgtgtcttaatatatggtaaaggggcattgtaaccagaatgtggaaggtactgtatggagaaatcctcactggggaagcaccagatcaccctcattacagacacctgtggtggttggctatgcatcaggcgctctgctaggctacggccccctcttattttattttattttattttatttttgagacagagtcttactttgtcacccaggctggattgtagtgatgggatctcagctcactgcaacctctgcctcccaagctgaaacaattctcctgcctcagcctcccaagtagctgggattacaggcatgcgccaccccacatggctaatttttgtgtttttactggagacggggttcactatgttggtcaggctggtctgaaactcctgacctcaagtgatccacccacctcagcctcccaaagtgctgggattacaggtgtgagccatgcccggtacggcccgctcttttaaggagcaccctccctagtgcaggacagaatgaaatacatggctcatttgtgagtcagtgtttagatttccaaagaactgcctgtgggagatgttagagaatctgactgagcccggaggcaggaatcgtactctgcgaatgaacaagaccagatgcccagtggagaccagaatttcgcattcctctgagccttggttgtaatttctctgtctaggttggctgtaatctgagcataaactcagaaatgccaccccttgcccctctgctagcatttgctttcttgaggattcttctatggccaccctgagattttgctttttattcaacaaaaggcaaacatccttttccactagattgtgggcatacagaaaattaggaagattctgagcttgaactcactggtgattgctctgttggagtggtagtccaaaatatggtatttttcaatttttaaatattgtgtagattttgtcttcctcctttcttctgatatgcccaaaacaggataaaaatggaaattagagggaatcatgaggaaggcaaaataaaagtagaaaatcagaataaggcaaggcaaagattggcccacatcactcattctacacagtcctaacaaatgtgaggggctgcatatttggctctgggatccctgtaaccaaagaaaagaaaaaaatagtctaagttacttggtttctacaagataaaaataagagtttctcaggggtcacaatgttttcttctattgatgatggagggaacttggttcctcgggtcctcatgaaggggggaacactgtatgccacaggggaccatctgacttgacaatgtcctgctgctgaaggaccagtggtttccaaaggccaatgcctataaaaagcatcttcaggtccagcgcgctggctcacacctgtaatcccagcactttgggaggccaaggcgggcagatcacgaggtcaggagattgacgctatcctggctaagatggtgaaacctcgtctctactaaaaatacaaaaaattagctgggtgtggtggtgggtgcctgtggtcccatctacttaggaggctgaggcaggagaatcacttgaacctgggagaatcacttgagccaagatcgcaccactgcactccagcctggtgacagagcgagactctgtctcaaaaaaaaaaaacaaaaaaaaaacaaaaagtgtctccaggtgctgtatttcagaggctgcgaatgttgggtcctggcattctctaccagacttgtacctccctcggtgactaccaatatctcagttttccttgctgcccacaccttggttctgtctcccaccttgaagttggaggcatgcaaacgacccttctagatatgttcttcactcctctgttatctcctggtcaaatcaccattcgtggctttagaatcccactcaaactcacctcctttggggacattctttggtccagctggcccaaggctagggatggagcctgactctccagctttcatcagggctttgggttcggtctcagtagtttgacttcttttggttgatgtggggcaggagatctaataaggaggaggctgaaagcatgacagaacccctgttccctgatgacagtgaatcactactgacagtagcagaataacagctaaacaatcttcatggtgctaattattattttggagaaggagtccaaaatgcatagatggtgatatcatttcagaaattagccacagaaatcaaattgtatcaaatggaattgtgggcacacaggaaattgggaagattcagagcttgaaatcactggtgattgcagggcagggcccccaaaggactgtgctctattggagtggtagtctcaccctttggccacctgctgttgttgaacgagcactggaaatggacttgggattcttggcccctggtcttggctggatgatcttgacccagtcacatcaccatgcagaatcccagttttctcatttgggaagtggagatttttaaagagttgtgagaattaaatgagacaaatatggagagtgtttggtctgattgttcatacatatcacttgtgattattttatgaatagtaattaatagcaacaatcatattagctcttctcactatatacagaattagcaagaagggattaaagatggcagcacagggtgtctgtcctagaggtcagcaaagaacagccctagagagcccagaaggcagtaactggccttagggtgatcttactgggagggtgggaggaccctctccagagctgaagacagggtgatctccaatgtgcgggaagcaggaatatcaagagtgaggtccatgcaaaaaacactggtaggtccaggtactgggcagtttataagaccagaaacccccagagaggggctctgaccataaagtggtaggatgaagatggctcaaagactgtggaggtcatgtctgccatgagccaggatgttgaggtgggtctctgggttgaattagcgaagcatggaactagagtgatttaaacgatttaaacttgtgcctcacgctggaatgtgtttcagaacccacctcgggccagcacttgtgtcatcaacatctatgagatgccaggaagagcgaggtgctgggcatatggagcagtgtcagacagagtcacatgccttgcagggcaggatgtaggacagaagccaggtgcagccaaaaacacactgaataacaccactggcagagataggcagcatgtagtggatgagaccagggtttgaaccctagttctcaccactagttcaagacagtggcccatatacctcaccttcttaatctctaaaagggggattaaaatgtaccaccttccttttaggagtgttaggtggattaaatgaatcaatgtgtattaaaacattttgcagatagtcttttacaaagtagtgctcagtaaataaaagttattattatactattatgagtatttttaaaattgaattatcctaggctctgatgaatgaacttttattatataccccctacctccctattagtggcaactaagcaaagtgagtttttaatatttgttatgcaacacgcttactgtaacattctgtttaacacacatacacagaacaatagattaatagcatggaaaaaaacctcatccataatcctatagtgcatttctagcttttgttttgcatatccatttccattcaaattaaataatagttattaacttgaatggaaattcaaagccaggctctcagcaattactacaccacacattgacttccaatactgattcagttgtacagttgtaattgcaatacatgtatatggcattttataatctaacctttttacataatgttatacacactcccttttggctagaatttttaagcattgtcctcaatcatagcattttattatatttagggcatttactataatttacttcttaattttctactattggacattaaggttcttttcaatattttgctagaatagattgcacagcaattggcctatcattgtacacagctgctgcttccgttaacttattgctgggagatatatttcagacataggtagaaacacattatgcttggacctcatatattagttatatagttatatagggcatgaaaacaaatctctaaatgttataaaagatgaacagttcctctctggttgctaaatcattgcacaggggtagaactcctcaatatggctttttataccttacctttctattacttctaagaaagggaacccagttgatgagctcgttataacaattgccaggccagatgtgattagagaatctctttcttcagtttacggaaagagatggatagcccttgttagtgatgctgtattgatttgtgttttttttcaactatgggactggatacatttccttcttaaggatttcctgtggtggcagctggcttcttttcaagcttttgaaaagtcgtaaaggggcctgaagtcatttgatctcccaaaatgagataatctccaatgtaccatatgtttgtaaagcagacttggcctttagtctcgagagctgtattccaggaaaggaaccagttaatgcgattttccttgactgctttctgccttgccctatgagacaaacgcatgggcataaattggtcaaatgccataagtgaggaaaacggctaattgttagacgacagctatgcacagctttattttacaaggtccagcctggttccagccaggttaaactaatttgtaaaggaaatgcatttactgcaggaagcatgaagcaactgtcatgtgataagaaagtagacattccttttcactaggcgtggacttggccacatttatttctacaggaaaagcttgtgatgacttgcctttatgaatggtgaccgtaaatctcattctctccaaggtttccagatgcatttgtgaccttcagttccttccagaggaggttccctgaggtatctgggtattgccactgtgctgacagccaagggcgggaactggctgagacaggtgagtgatacccctcaggtgatctgaagggagggagtgtgattcctcaggtctgaaaacctggataacattgcttgtaaagcacagctagagtgactgcctgccccctgccaggctgctgtgggcattgaggaggacacaaccttagcaaactgtcatcttgcagtatggtgaatgcagctgctgctggcccacatagtgcctttgtgcacattggaaagaagtgccccgctctgggcagatgcagccccgaaattggcgagtggagcacaggatggatttaatctcttattctataagcactgctcctttgtttctatgaacagcctgcacaaccatccacagcagctctgactttggaaactgttaaagtgttgttcagacttattgcctaatgatgctggtgaaggctgtctctctcagtatctgtttgcacaacaaggtcagggcttcctttctgaatgagaccatctctgaaagtcttgctgtctttgctcaggtttggagttgttactggatgaaatttatgacaccatttttgctggcctggaccttccttccaccttcactgaaaccaccctgtaccggatactgcagagacggttcctcgcagttcaatcagtcatctctggcagattccgatgtaagtaataaactgccaacaatgtgcgtgtttccattagggggacgcctcttgggtttcaaagttgctatggtgtgtgtggctgctccaccaaagtgagggcagagatgaaaagaatcgttaagagcaaacagcagtgcatgctgtgaagacaccaagcattgttgacactgtcttctttactgtgtggatttcctctaggccccacaaaatgtgaagtggagcggtttacagcaaccagctttggtcacccctatgttccaagctgccgccgaaatggcgactatcaggcggtgcagtgccagacggaagggccctgctggtgtgtggacgcccaggggaaggaaatgcatggaacccggcagcaaggggagccgccatcttgtggtgggtttcctctgggggcttcctctttcggcctcggatcatattactttggcggtcctccagaccaacctctctggaccccattaattcaactgccttctagtgtgcccctctggcccttcaagctcaacctgtctgagaaccagtttatcatcattaacttccaacatgtttctcatcttgtgtcagacctcgttgcattttcagggagctcagggaatattaggaggctcatagatgaagaaaaataaaagagaattgagttcccatgtgcggtgagacaggagcatgcacataactaaaggagcatggtgaggtgggcattcgatcttgcagcaggtatgggaaggaggcatttaggaagaatgcatggaagaggccatacttgatcagaatcttctaagaagatgtttcctgaaggagaggagtaaggaaaggtgttctctatatagagagcaggagaagcaaaattagaaggacagaataataggcattgatatgctaatgatcatctaatctgcaagaaggatagagaaaaaattgctggagtatgaatagggtggtgctccggactctgaagaaaggcaggggtaagacaatgaggtctttgttatcctaacaaaggcttgggggcttcatcctggaggtcaggtgaagacagtgaaaggttttaagttggacagtatcatcgtgggttttgcacgtaaggcaaagaaattctggaggagagactcaaagaagcagtagtccggaggcaacggggctaattagaaggtcattgccatgttccagagctgatggagtctgtattaattttctagggctatggtaataaatcaccacaaagtgggcatctgagagcaactgaaatgtattgtctctgttctggaggttggaagtccaaaatcagggtgtcagcggggccgtgctccctctgaaagctctaggggaggatcctttctttcctcttcctagcttgtagtggctgccagcaatctgtgcattctttggtttagggcagcattactgtagtctttgcctccattgccacgtggccatcttccctctgtgtctgtctatgagtcttctcctcttcttacaaggagaccagtcatgttgggttaaggctccacttgatccagtcagacatcatcttaactaatcccatctacaatgaccttcctgccaaataaggtcacattctgtggttctgggaagagcatgaattttgagggacactattcaacccagtatggggccaacattaaagcagaaacagtgggagacagtgagaactcttattaggcattcgagccagaccccattttctcctcctggtgaaattttgaaggatgttatgatgaggaagggaagaaccaggagcattcctaggcttccaacttggggaagctgggtagattttaaaagatttggaatagtgatacaccaatgcagggttttttatagcttcaatatatatattaacattcattcaataattcctgctaaatcattccatttgtcccacttaaccttttgaatattcttcatggtatgtggttatattctatctgctaagtgtgagaatgtcgaaaaagaaaatttggagacactttcttgaaggtatttacaatcacatttcatttctactaaaacctagagaatgttatgccatccaacttccaggtggaaatgaagaactatggctttccaaattaaaggccataaatggctctatcaagtgcatagatagatcatatattttcaatttttctgtctggtatatcaggtcctatttctgtggaaacaaatgccacatggaaacagtaattgaatttccttgctttggtaacactacataacaaatggatggaaagagaaagggtaagctcttaatttggaagaagactaagcaaagcagtaaactttatttctgccataccttcctgtaatatccattaaaagaggccatggcctcgttgagggatgttacgtgctctgatgctgccaatctttcccctcccaccacattttccagttctttctctgttgcctggttacagaaggaaattggctgactttctttttggcatttatgtgaatcaagaggaaaaaaatattttaaaagttggggggggggcgtggtggttaaaaggtaagagttatgattttatggagaaaaatggagcttactttacatccacctatgtaactgagacagccccttggtgtttgaattttacattttttctctcttaatgtggctacagtcagcctaggatgttcagatagaatgacttgaccatgcaaagagttggctgagctgatcactgttaaattagtaatttctaggaaaggtcaagaagctcagaagaatgttctaagtgtgtacactgggtaggcattattgttttatattataggaagtattatatttcctatattataatatatattacaatataggaaaatatttcttataataggaaccactaacagcatttcagatatggttcttgccctcaaggagaccatagctagcctagaaaagactactcccaaggaggaattagccacactaaaatcacatagtgaagcattgaagtctattgagaattccaacgagagaatgctggaagacaacatttcattaaatacgcataggaatgtgttggtctactagtctcctagagctgccacaacaagtcaccacaaaccaggtggtttaaaacaacagaaatttattccctcctagttctggaggccagaagtctgaaatcaaggtgtgggcagggccatgctctccctgaaggttctatggcagaattcttccttgccccttcctggtttctggtggttgctggcaatccctggtgtctttggcttgtggctgcctccctccaatctgtgcctgtgtcttcacacagccttcttccctgtgtgcatctttgtttatttacatgaccttcttataaggacatcagtcattggatttagagcccaccctaatccagtatgacatcatcttaacttggtgacatctgcaaagaccctatttctagaccacattctgaggttccctgtagacatgaacatcatgtctgtgtgtggtgggggacactattcacctgagtaccattggcaagtgaggtcaggttttcagaaagtgagccagtattttcaagacttgccttagaagggatgaacctctagtgagagctggtggagtggtcatgccaactggaaaagtcacacttccaaaatggccccacaaaggcagctcaggggaaaggaaaaaataaaatgacacagagaagaaagtggtttcaaacgtaggtgtccttgattgaatgttctggcttcttactacctaaaggatctgaggagctgtctcaggattgcttgtgacattaaaaccttttctcccatttcactttgtctcatgcagctgaaggccaatcttgtgcctccgaaaggcagcaggccttgtccagactctactttgggacctcaggctacttcagccagcacgacctgttctcttccccagagaaaagatgggcctctccaagagtagccagatttgccacatcctgcccacccacgatcaaggagctctttgtggactctgggcttctccgcccaatggtggagggacagagccaacagttttctgtctcagaaaatcttctcaaagaagccatccgagcaatttttccctcccgagggctggctcgtcttgcccttcagtttaccaccaacccaaagagactccagcaaaacctttttggagggaaatttttggtgaatgttggccagtttaacttgtctggagcccttggcacaagaggcacatttaacttcagtcaatttttccagcaacttggtcttgcaagcttcttgaatggagggagacaagaagatttggccaagccactctctgtgggattagattcaaattcttccacaggaacccctgaagctgctaagaaggatggtactatgaataagccaactgtgggcagctttggctttgaaattaacctacaagagaaccaaaatgccctcaaattccttgcttctctcctggagcttccagaattccttctcttcttgcaacatgctatctctgtgccagaagatgtggcaagagatttaggtgatgtgatggaaacggtactcagctcccagacctgtgagcagacacctgaaaggctatttgtcccatcatgcacgacagaaggaagctatgaggatgtccaatgcttttccggagagtgctggtgtgtgaattcctggggcaaagagcttccaggctcaagagtcagaggtggacagccaaggtgccccacagactgtgaaaagcaaagggctcgcatgcaaagcctcatgggcagccagcctgctggctccaccttgtttgtccctgcttgtactagtgagggacatttcctgcctgtccagtgcttcaactcagagtgctactgtgttgatgctgagggtcaggccattcctggaactcgaagtgcaatagggaagcccaagaaatgtaagtctgttgggtattcaatctgtaggttccctgagtctctctttaggccctgacccaatgcagtacagtaatagaaatccactcctggccaatgcttacacttcagttaaggacaaaattgactgcttatattaaaaattatccaggaatgcctagataatgttaatcagacctaggagtaaatggggagatttgtctggccttaaagaactgccacatttctgcagtgctgatcaccaactgatgtcaatggtgctgatttagtcatggggcaatgcctatctagatattatttacaaatttaagcttcatggtatttctatggctatataaggttttagacggagtttggacagttaagtggttttatcttggtctttccagtttgttaaatttcttaaactgaaacacctgctcattgttcctccccaggccccacgccctgtcaattacagtctgagcaagctttcctcaggacggtgcaggccctgctctctaactccagcatgctacccaccctttccgacacctacatcccacagtgcagcaccgatgggcagtggagacaagtgcaatgcaatgggcctcctgagcaggtcttcgagttgtaccaacgatgggaggctcagaacaagggccaggatctgacgcctgccaagctgctagtgaagatcatgagctacagagaagcagcttccggaaacttcagtctctttattcaaagtctgtatgaggctggccagcaagatgtcttcccggtgctgtcacaatacccttctctgcaagatgtcccactagcagcactggaagggaaacggccccagcccagggagaatatcctcctggagccctacctcttctggcagatcttaaatggccaactcagccaatacccggggtcctactcagacttcagcactcctttggcacattttgatcttcggaactgctggtgtgtggatgaggctggccaagaactggaaggaatgcggtctgagccaagcaagctcccaacatgtgagctaacgcatatgaagagttaaatgtgtgtgtgtgtgtgtgtgtgtgtgtatgtgtgtttaacatataaaaaaggatgtctagtgggagggtattgagtgtcaaagctggaatggagtttagagatggctgagaaaacgaaggctcacagaggggaagggacttccctgtatcaacacagtcaggtgttggcaagattgatagagtatattttaaaactttcatataattgattacttcaatcagtgtcttagatttttactggatgtcttctgtgtgcaagcatcttcatcttagagctgatgaaggctataaaagtggagatgacctggccctcgtcctcctatggttaatgtttagtaatcgctcctatgttaggtgtaccttttaattgaccaatgaatattacagtgaacctgctacttgcacagaatgctgctaaatatgcaggcctcaggagagtgccacctgaagtggctttaattgatttggaaggatttaactaagggactgattggagagccggtaattgaggtctatacattcagctttgtggcagacttatgggaaagctatgatatacaagccataaatagaatgaagctgacacgagtttcagttaaaatgccttatccccctcagctgtgccagcagtttgaaagaacaaccagacatgttcaacactgttatcaccaaatccaaatctctctaaccagccattgctaatattataggtgatatgacagctgttcagtaaaatctctcaattcattctttgcaagtttaacattgtctggaccttcctgagtaatgttaaaatccattagactattttgatattagccaaattttaggctttagcagcaactgggtttttaaaatgtcgggtgaaagtaccatgtgatgagaacggtaatacccttggcattttgaacagcccagagatgacaatgcaaggattctccaatcaaatgtcaagttccagcaatagaaccctcaaggttaacacattgatcttggcctgactgttagataagaagtcttatttatttttgtggtatttgtagaatcattctccataccagtggtcaggtctcttacatggggacattcctataattttaaattatctaagactaaatttggtcctatttgtatgcaattttaggagcatgagttgttgataccaaaagtacctagtaactttattttattttattttgagactgagtttcgctcttgttgcccaggctggagtgcaatggagcgatctcagctcactgtaacctccgcctcccaagttcaagtaattctcctgcctcagtctcttaagtaactgggattacaggtgcctgccaccacacccagctaattttttttttgtacttttagtagagacggggtttcaccatgttggccaggctggtcttgaactcctgacctcaggtgatccacccgccacagcctcccaaagtgctgggattactttagtgactagtcttaccttagtctgaatgctggatagagtgttagaactagacttagagtaattggcttttttttaattgagtaacaagagactggatacaagatcatccattagggagaaaatgttagaacttccatctctattcagtatttcctatcttcccttcacatttctattaatattttcatttttgcaattaaatgtttaacagctgaaacagctaaaaatcttcatgtagtgtattattttagtagtatgtgtatatgccttataaagaaatacccatttttggggggggtgcatattcaaactcttttgttgataagggtatgcaattgaaagggtttgatactcaaagtgtggtccagcagcattggcattcaccttgggaactcattaaagattcagtatctcagaccccacctattgaatcaaaacctgcatttctacaatattcccaggggaattcaatgcagccaaaagcttaaggaggactggcctggaggacagaacagtagctgtcttgtaccatggttctaccatctactgctctgtgacctaagagaggctcttttgagtcttagagtcatctgtaaaatctgagttacaatacataactgcctcaaaggcttgtcggaagaattactaaaagtaatagatgtaaagtgctagacttggcacacaggaagtacttaataagtgatggctggattaatacaattgatagtgagtaacgaagggaccaataacttcctacatgcatcacccacacgggtgatggctcaggcctctaggagtttgagtctgcattgctatctctggcctgtttgaaattttgcttgctttatttaatatgtgtttatgaactgcctactgtgtgcactgtactgtatgatgggaagacagtcaggtgaaggatggtgtctgctctgagaagctcagagaccagtggggaaaccaaggatgttatcaggaaagtaataaatggcaatggtggaacagaggtatgtacgtggaaaatgcggtggagggcgctcagagaaaggggctactaactcattgaagattggggtaaagattagcttgaccccaactactgggatgattcttgagaggagtttgtccagttgcagatgtggcaggccctttgggacagaggaaatagcatgcactgagtcaatgaagctgtgagtgaggtggaggaaaggttatagacgtaggaggggaggggatgcaggagggaatgaaagaagaagaggcggatagtaaattgggaacagattataatttttttgagacagtcttgctctgttgcctatgttggagtgcagtggcatgatctcagttcactgcagcctcaacctcgcaggctcaagcgatcctcccacctcagcttctcaagtagctgggactacaagcatgcaccatcacgcccagctaatttttgcatttcttgtagagacggggttttaccacattgtccaggctggtcttgaactcctgggctcaagtgatctgtctgccttggcctcccaaagtgctaggattacaggcatgaaccactgcatccagctggggacagatttgaaaagatcttatgtgcccagttgtagattttcactttatcctggaagaaatgtagagcaagctgaggtttttaaatgtgagtttttgcttcggacattcaaaatccctgggattaatagaataaattatttgataatatccttttgaacaaaaaaacaataacttcaaattctggaagtcaaagttttctgttgatcccatgctctcaaaagaatccaatgacacccccactgttgaattcacaatgtgatgtttgaagtaaatttggcgagggtggattttgctaagtgacactgccaaggacagcatgtgccagatgctgtgccaagcacttcaactgcaacacttaaaaggcttattacaaaaccccatggactagatgccccaatttttcccattgcacagatcaggaggctgaagctcggagaagttaagtgcattatccctggtcgcacaactaataaatgacccaaaaattgaacacaaaggtctttgagtgccacagtctttcctcttcacaggaataactctctgctaacttacagtgcctcccttcaacttttgatatccatccatccatccaaccatctatccatgcatccatccatccatcatctgcctatccttcattagagacagctagtcaagatcactattcccagagtgagactgtctagattgaaattctgaatcagctgcttgctagctgggaactcgtttaaattatatgacttctccatgcctcagtttctcatctgtagcatgagaataagaatattttattgggctgttgcatcaattagattgtctgcgtagatgtgctcaggatgatgcccagcatggagcgagtatgagctattactcatcttatgcagtggttcctccacaaatggtgactgaatgggagtgtggaggcaaaacaaggaacattccaggttgtggaaagagctgctgcgaagaaaacagctgaggcaaaaatgtgctcacgtgtgggtgtgtattgtgtagtgtgtgtatgtgtgtgctgtggtgggtgtttatgtatgtgtgtgtggtgtgtgtttatggggtttgtgtatttctatatgggtgtatggtgtgtgcacttatgtgtgtggtatgtgcataggtgtgtgtgtatgtgtatgagtgtggtgtgtgtgtttatgtgtgtggtgtgtgtgtatgtgtgtggtgtggtgtatgtgtgtgtggtatgcgtgtgtgcatgtgtgtgtggtatgcctgtgtgcatgtgtgtgtggtgtggtgtgtgtgtactgtgtgtgatgtgtgtatgcatgtgtgtgtactgtgtggtgtgtatgtgtgtggttgtgtgtatggtgtgtatgtgggtggtgtgtgtgtgtgtggtatgtgtgtatggtatgtgatgtgtcttgagtggtgtgtgtatgtgtgtgggtggtgtatgtgtgtggtgttcatgtatgtgtgtggtatatgtgtggagggtgtgtgtgtggtgtgtatttgtgtgtatgtgtggtgagtgtggtgtgtgtgtggtgtgtatgtgagtgtgtgtggtgtgtatgtgtgtgtggtgtgtatatgtggtgtgtgtgtatgtgtgtggtgtgtatgtgtgtggtgtctgcgggggtggtgtgtgtgtatgtgtacgtgtggtgtatgtgatctgtatgtgcatactgtgtgtatggtgtgtataggtgtgtgtggtgtgtctgtggtgtatatgtgtgtagtgtgggggggtggtgtgtatgtgtgtggtgtggtgtgtgtatgtgtgtggtgtgtggtgtgtatgtgtgtagtatggggggtggtgtgtatgtgtgtggtgtggtgtgtgtgtggtgtgtatcagtgtgtgtgagggggtggtgtgtatgtgtgtggtgtaggggggtggtgtgtatgtgtgtggtgtgtgtgtgtggtgtgtgtgtggtgtgtatgtgtgtgcgtgagggcacacatgcttcatgggagtcagagggaagtccacgtggtgagtgagtccatctgtgttatttttattcccctaggtcctggctcctgtgaggaagcaaagctccgtgtactgcagttcattagggaaacggaagagattgtttcagcttccaacagttctcggttccctctgggggagagtttcctggtggccaagggaatccggctgaggaatgaggacctcggccttcctccgctcttcccgccccgggaggctttcgcggagcagtttctgcgtgggagtgattacgccattcgcctggcggctcagtctagtgagtgtggtgcccttcagctttcttactgcatcgctttggaaaagcaggagcttaaattcgtctctcctcagtcatccttaggactttgtggtttggcttccccagactgatgggttcttgggaaggaaaaggcaaagtggtttgggggcaccagtcaaagctggaatgctgcacgcatctctaaaatgctccttaattctccagcgaatctaccctagggcaggtttcagatggcacctgccgctcccacaaagccaatattcttgttaaaatgcgagggacccaagcccgtgaatgctcaaacaccccttacggcctgctccaaagcttccctccatttccagggattcaggaacaccacacagcaggaggggagaggaagcctcgatattaagtaactatgacacattgatctcatctgatcctgagagtaactccaaaaagcaggaattactacctgcatgcgacagaggcataagctcagggagcctgcagtcctctggtctataataacagctgaacagtatgctttttttttttttttgagacggagtcttgctctgtcacccaggctggggtgcagtggcacaatcatagctcaccacagcctcgaactcctgggctcaagcaatcctcccacctcagccacctgagtagctgggactacaggtgtgtgccaccacatgcagctaatatttgcacatttttagtagaaacaggatttcaccatgttggccaggctggtctcgaacccgtgacttcaagtgatctgtctgcctcggcctcccaaagtgccaggattacaggcatgagtcacagcccttaaccagctaaacaatattctaacttcacctttgagcaggcacttactgtgctaagtagattatcagatcttcacatttaatcctctgacagctccaggagaatgatggtataatcaccatccacaattctttgcaaatggggaaatggagtctgaggttaagtcacttgcccgaattcacacaagtgataaccagtgggcctggatgggaagcccagagacctggtcctccagttcatctctcctgttccctgccaggcagattccaggtattgctgaggtcagtgcctagctctgcctcatcctagagcccttgttcttcctccataacctcacagctgctctggcaggagaacaggtcccttccaagatttctcactgaccccacatcaacttgacaaggacaaatgattaatctgtctttgaatcttactcaggatccccatccctgtcaaatggtctcagctgattccctgtctagctttctaggcttgagtcaccaaacagcaagacagtcctcccctgacaacatctgctccaagtcaaagagaatccctccagcaggagggcagctccctgccttcccatccacgccagcaggcactccagggtgtctatggccagcgtgggattgggtctcagtgatctttgttctcctaataccacgtgacaatctcatgtgtgccatctttgtttcctgcttctctctcacaccagacatctcttttggagaacaaggcactgtgtcttattctttctatatccctggtgcgtggcacagtgcctgacacctacaaggagctgagtagctggtggttaaccatccttattgctttcttcctcccttctttctctctcttccgtccactaccctcaccctatgcctaggcactgcttttctctgttcctcagagactgggagacttctgcttttgggaagaaccatgttgttttacatttttgtacaaagacaggatttgaggtaatcaaagagagaagtgggattggtgctccttcagttgtgaccactttggtcagggagggaaatgtcgagaaaggggaggcaatgttgctggtgctgttgagattagtcattgaatggcatgttggcattttcttcagaagtcgagctgagaagttcctctccaagtagccacatgctccgctttgcatgtctgagcttgtagaggaaagaggaagggaccatagaggaccaggcctggtcttttccctgagagtctggggattgagggcccagagcgaagtgcctttggccactagaacatggtagccatgtctgagggcctaatgagcgtggcgaaggccatgggaggaaatgcacaccgctgtgtctggcaagcacttggtgtttaacacctatcagctcctttgatgtaaatatcacagttgtcttgttaggtgagtgttagacccattccatagatgaggaaactgaagctcagagaggttgggcaacttgctcatgatcacagttaggaggcgcagtgccgggattcagaaggaggcctggcagactccagaacgctgtccactgtatggggctgcttcagaggtcggtcctggtgtccccagatgggctctgactgtgagttggtggcatccttgtatctgcaagctctctcgtctggagccatgaagcctgtttctgaaaggtggggagtggggagaactgtcccaatgaactgcaggtgactgccaatggtgctgccacagatattcccgttctccctccaggatcctggtgaggagccccaacctgccccaagtgccagcaggagtggagaaagagctcaggcgacagttcatggccacttaggaggagggtggtggttgtggcaaatcagactgggcctggtaagacccacaccaaactgatgtgtgtcccacccgctgcccacccttgcttcttcctctccccctcatgcattcattcacgcttttttcccaatcggtgatttcttgagtgcctactatgagccagacactcctctacatgcaaaataaacacaaatctctgcaccaaagagcttaaatgctagtgcggaggagacaaatctaacacaataaatgggaacactatgtactatgttggtggtggggaaagccatgtgcaaagcccagtgggtcggggactgcaagagctgaggacagatgcagtttcattagtggggtggccagtggttcatcatataacctccctcgctgagcctctgtgtcctcacctggggtaaaagttctggcttcatggagctgctgtgaagatctgatatgatttttgtggatatccaagtttcaaaggggttaaaaactaaactgtaggagtttggtagggaaacctacgagggcagctgatgtcaatcgccctcctgtgttccaaggccaacctctcttctttctgtctgtgaacccttggttaagttgcttaatccatctgtgtctcagttttctcatccattaaatgggataacatgacatttcttcagattgctgtgaggattaaattaattaaggtatgtatttagctagtgcctcacacataacatatgagtatagagcctacctattattactattatctcatgtgcctgaagacacttcactgacctactgatttctgtatggaagttattgtagaggtctactataatattctttcaagcttcagcctaagtgttattcttaaaggacaatctgttgagtgcctgcctactgtgcaaggagcctttgtaatactgtgggttgaaatgtttgtcaaataaataaataagaaggcctccttatgttggaaccaggacatacgtggttgttctcagctacagagcccacacagagcaggtggtcatattctgcttttctccttccctgactccagccttaagcttctatcagagacgccgcttttccccggacgactcggctggagcatccgcccttctgcggtcgggcccctacatgccacagtgtgatgcgtttggaagttgggagcctgtgcagtgccacgctgggactggtaaggagggataggcaccttcaggtggccaagtgacaccccttttttattttagaggacagagccccacactgggaggcaagtgagctggactcttaggctcctctttagcagctggtgaaaaattccttagcttctcgggcctccagttatctcacttgtgtaacaggagcaggaaacttctaccagcctgaaagacaagtgggtggttgctgggggcatcagagtgattgtggacaatgtccggctgggggtctagactggggacagaaggcgaccaggcttgcactgctatgagtgaagaaggaaagttgtttatgggacactccagggtaagtccctagtgcaattcctgaatgttctccccttggctcttttccagggcactgctggtgtgtagatgagaaaggagggttcatccctggctcactgactgcccgctctctgcagattccacagtgtaagtgaagactgcagagttctcctcctgaccccccttggtgggcatcactggtctagtcagctgtggttgcctaaccgctggagactccatggcccagcccttcagccaggtcccgggtgcagccagacgcatttcccaagtccccaggcctgcaagcttgcgctgaccttggcacttcctagttggaaggctcccagctttgcaggtggaaggaaacagctgagactgttgaaggagccctggttctccccctctgtacatctgctgggcaatttcagccactcctgtagtttcagcaaccgcctcgcctctgaacctgcagccccaacccctcttctgaggctcagccatgtgtaatccacagtccacttgacatctcaaagctggcatgtcccacatgagtctttgtcctcagagattctacctctctatgaagagcacctgcattcacccaggctcatgacccttaaaggtggggtcagcctgggatcccctctttctcttggctcccacgaccagtcctttacaagcacctctctctcccacaggcccgacaacctgcgagaaatctcgaaccagtgggctgctttccagttggaaacaggctagatcccaagaaaacccatctccaaaagacctgttcgtcccagcctgcctagaagtaagggtctggaagcacaggattggagccgggacttgtccccgctggtcagagatgatttttctttttgttcaatacgttcagcttagttaaaagctcacatgatgttctcagcctgggtgtttgtctgggcctgctagaacctggttctgtgaccttgggctatttacttaccttttctgtgtcccagtttgttttgtttaatcataagatcaggccacattttgtcctagctaatgctaggtttgttttgagactccaagaaaatatctttcataagaactctttgaaaaataaacaaaacatgctatcatgtttttcctaaaggcatcttggccaaggccctatgcttacagtgtcccaggttctcaacacacacagaggacaccagcttctttccctccctagctcccggggtgattgtaacaattcataattcagcgaagtactgatgtagagctcctagagaacgaatttatgcccagaacttaaccacttacttgccaagtgagggaaatctctgggcttagtgtcctttttctaaaataggatggtaggaacaccaccacccactctgctcagcttccaaagacttgatgagaagcagatgaaacagcagtgttgaaactcatgaaactgtacagtactaagcaaaagtttccttattattgtttggtactgtaaacatggacccacttaagcatagtttcatagagaaattagtcactattgtttagttttttaatcttggctggaaagcacctactgttggaatgcaattctgcttctccttcctgggcactgatgcttacacagagagaaggagaggtagaagccacaatgtccgatggtgggagaagggattacagagtggagcttagaggcgctctgaggtgtggtttgcaaggccagttcctgtggaggactctagtacttgtcaaaatcatttctggaattagtgaggctggtccaggagcatggctaggctttgggtctagatgggtttgggcctggacctgacctgcctctcactcaccagctgtgagttgttgccccactttccctctctgagagatcttcagtttcacccacccaaaagcgggagaactgtggtccatgcctcatgaggctgttgtagccgtcaatcaaatgatgcacgtaaagggctgggaacaggagagcacctctccccacctccacatctctccgtctggagaagccatcacctgttgttttggaagggacacttttgacatctgccagcagcaggttggccactagagcatcttgcccacagtgactgacatgaccccggctttgtctcagacaggagagtatgccaggctgcaggcatcgggggctggcacctggtgtgtggaccctgcatcaggagaagagttgcggcctggctcgagcagcagtgcccagtgtgagtagcagcccctcctggcatggcttctcacctcttctgtggggcactgagcgtggagtccaaagagctggcttcgtgtcccagctctactgcttccatagctgtgggggcacagctgctgacctcactatgcctcagttttctcatctatgaaatcggggcaatattcccccatctctgcagtttcttgggagaagcaaacgtgggagggagtaggctgtgctttgtgtctgagaagtgcaaaccagcattgatccccatcaaagggggccctagggctttggagggctggccggatgtgtggccctgccgtctggtttccgcagtgaagcccaggtgatgtccccaaagggcaatgtgcagatgtccctcttctgcctaaacaccataaatgctcccatcatcttcggggccgtgcttgagctccctggaatggctcgagggccctttgcatctggtgctggtgtgtcttcttcgacttctctttcttctccatcagttgtgcttcagggtgcagttgtgataaattctggtcagactttggaaaaaggaagacgctttcttccacctgtgccttcacgcgttctggctgtgccacctgcaatatgtccgtctatcccctccccacctgacaaattcttgctcagaccacacatctgtccctccaggaagcctctgctggcctctctcttcctctgtaggctcctacactgcactattgttgcctttatttcacagaactgtacctgctcacgtacttgttaactctcctttaagactctaagctgcttgagggcaggcagtggaggggagagagtacagagctgagccaggtccagtgtttgccttgttgtcattcaacctcctggtggggaggcagccccagacccctggaaggccctgcaggcaggtgggctgagggtggccgtgggtggtgaggagggtgattgggcatctgagcagggagtgggcactgattccccagcccatctggcttgtctctgtgtcaggcccaagcctctgcaatgtgctcaagagtggagtcctctccaggagagtcagcccaggctatgtcccagcctgcagggcagaggatgggggcttttccccagtgcaatgtgaccaggcccagggcagctgctggtgtgtcatggacagcggagaagaggtgcctgggacgcgcgtgaccgggggccagcccgcctgtgagagtaagtcatgaccccctggggggacgacgaggcctgcatatctgttctttgatccagactgggtgaagtactagagaagctgggaaggcaggggtgggaggggaggcaggaagtgcaggagggatgtagttgtggttgagtcccttcgtgtgaaaacttacatctacttcctgaagacgctcctgctgggaactgaagtcagaaagagcctgggcagggaacccccagaactgacaccttaagaagcttgggggctgtcctgcccgggagttttgggtcttattctctgtgtcttcagatggggagaaggaccgtggttgcaggatctcagtgtgatggttccatcctcactgaggcacttcaggaatttgtggaggtgttgacttgtttatttttatttcaagttttaaaaatttagtgaatgtcaaatattgaaatgtacatcacatcaatatatagaatattgaactatattgttaaatattaaaatatattattattgatttttaaccttttatttctccaatctctcaagtcacaggacatcacagtcattttaaaagttatgtgagtaggtgggttagattatctgtgaatttcctttcagggcaggaaatggagacattacaaaatacttattaccaattggggtggtgggtctggcagagttgcaaaatactgtgctaaatgattctgagttagccacagttgcctttcttttgatgttcttattctttccttattcttattttctaatctctaagcaacattttggaactgcagggaaatttaattgggtctagtgatacttctggttgatatttgtaaagagatgggaggagcctcagaagcaggggtgggagggaagagtccccccactctcattgcgggggttgctttccagttttgtctgtactccctcctgccctgaacctgtgctgtgtccaaggcttttaccacacaccgtttcccccaagtcctgttttgctgccctctgcatggggccctgcttcatccgcatcttgactctctatcatctgctatcactatgcaggatacacagtaggtgctccgtggatatgtatgcatgcaactgcctgccctgtgcttctgaaatagggagagaagtgaagggtccaccttaagtcagatacaatcaacatccaacttccaggtcatctaggagtggtctgcactgagacccaggacacagaccggtgtggcctcctccaggaacaggtctggagcacagctcctttagcgcttaggaagactgtatgtggcttggccatgtaggactccatgatacagttcccgtgtacagattacctgttcaaaggtgcttttcacatcccttatcccatttttgccttccaacaatgcaggtaaatagatagagctctcctatctccccatttttcagatgacaaaactgaggctcagagaggctcatgaacatgtccaaagtcacacggttagcaggtggagcagccaggatttaacccggagtcctgctgatgaaaccctctgctgtacagctgtgagggctttaggagaagacaggaggaaggctccagaaggtcatttattggccttattgaatgaagaaagaaaaaagataaatatgtccaaaggaagaactttggcctcctctccttataagggagcagttcattggctgagttgtttttaagactggggagctaacatttgtaaaggcttcatcatgggtttgacggttgggtagatgctcacttgctcttctgacgccaccggcctttgggattgggctggaagtctaggaagattcctaattcttgccgggcctggcaggccactcctgccccatgcaggtgcagatggaatgggcagtggtgggaacagccagcattggcctcttccgattccacagcagggcaagggagtttgggaaaagctgagagatttaatatagacagtaatttggaacattgcccaggtttcctgagagtcttaaagtgaccaggttcctggtcatgtgatcaggaaccaagaaacaccattcatttaaacacaggagagtggaatagtcctggggtcctggagttgaggccagaggctggccatgctcagtgcaccaggaggatggcgttaacatgagacacccaaacctctttctgctgactcactgcagactgtgatggagaggcaggcggcagacagacaggcttgaatggcagctccaccactcacttgccaggtgaccttgggctggtcccctaacctctctggatgtcagtgtctcaatctgtgaaatgagaaaggagaatagtagctatttgagtcattattagcactaattaagacaatctctgtaaactgttgagcactggaattactaatacacttaatacatattattactatttttgccagtattacttaggggatggacttgctcagataccaagttgcctctctctgcatccaatgtcatgttcatgcaaaatcctgcctccagtgggcattagcctggtagctcagagcacaacacttcctggtgttgggctttgggtggcaaagttaagctctctaggcttcaggggcctcatctgcaggacgtggctgataacagtccagccccacagagttgttgtgaagatggagtcaacgcctgggaggcctttgggcagtcctggcatgcagaagacaggcagtgctcacaaactcttgtaagatggcaggtgtgagcgagcaggtctggcttctagtccaatcaccaacacatgtccccaggcgagccacttagctcccttgagcctctgttttcttcatctctaaagtagcagtaagaatccccgtggtataattttggaaggatttcatgaaattaaagatgtaaagtgtactctctggggctgggcccactgtggatattcagttaattttagtttctgcacttcttccttctctccttagccactcctccctggccgtgggggccagcagggttgttccatagccagggagtaacttcatttcagtgacatggggaataaggctgtgggaaaacaggtctgctagggaaggtaggtgccctggcaagagaagcgtcagtgtcctaggtgatgtttgtggccccaggaggaaaacccctttctagccgaatcagatcactcactggcccacttccaaaaggcaagggagggtaaaaaaaacaaaaacaaaaacagaaaaaccacaggtgcagatcattcctgtgggataagaggggaaacctgtattcactgaaatgggaaggatgcttacacactcattgacaccccacttcttacctatgtacacacatgcatctagcacactggtggaggatgtggattctggggcaaagataatggggttcaaatcctgatttttctgtttactagctatctgaccacagaagaggcattcaccctctgtgtgcctcagtattggcgtctgtatagggataatgggacctatcccatagggttgtggggaacattatatgaactgatattagcaaagctcttaatggtgtacctggcacatactacacatcccatagtagtttttaaataaatactcctactaggaggtaggcattattgccatcttcaccattttatgggtgaggaaactgtcacagagacactaattaatttgctctaggaccctgaactagtgaatattagggccaggattcatagcctgcaggctggtccagagctcataggtgaactcttgccatcccacttacacttgggacttggtgaaagacaactcaaggagcctactgcaaatcgcagtgcaaaatcttcgccagggaccattgcccttatcacaaaaaagaccaggtttggttctggagatcaaaataggtcattcttcctctttgaagcccctgaataccctcatattccttacagattgcagatgttaagtcatatactggtcaaaagactgtgcctgagtctgataatgaacaaaatctctaatggtgtgaaattgtcacgatgagtgtgtttgctctttaatttactcattttcccatttacttaactcatattcattgagctgtgtctggggcagctgtgtgccttggcctgggtgaacagaggagaggtgccctctttttccctgtggactcaacccagtggggtgaccagcatgccactgattagaggttctaacaattgacaaaaggaaggtctgtacctggtggcctgggaattcaaaaaaaagaagacctaagtctgcctgggagaaccatgacagtggtagaaaacagaacgtgttgagttgatatttgagggtcaaaaaggaatcttccagacaggagcaggcagaaggaaggcttggaggtgtgttcagggagtaacagatattcctggaggcattggggagctggaggagatgagagtgaagaggaaggcaggctcagcctgcacaggagggagttgagagctgatattcggctctggcataatttctctgccagcagtggggactgagtgggatgtgggagcagaaaggcaggaggaggtgaggcctaaatgcagaaacctggcaaagagcatttgctggcagttcaggcagaaaatgaaggatgtctaaatgagggaggtggcagtagggacgaagagacatggagcaggtgtgaatggtgaccaagacagaggagatgaaccctgcaggaaggccaccaggtggctggcttgggatggctgggtggctggtggtactgatccttgtgcctgggggactgaggcaggggtggcagatactaagttcaggcctggatggtgggctttgaggtgaagagaccaggtggtaactaattggctttagagatgagaagaagctcgagtgcctgagctggacatcaagctacacgagacattcatgcttaggtgtctgttaaaactgagagcagatgggctcatccaagtagagggcagggcagagagaaaggggagcaggcccaggccaggccctgagagcttgacaggtccagggaaggggagaggaggagggcccagtgtgagtgagaaggagacacccacaagcaggcatgctcagtcgtcccgaggctgggcaggtgcccaccacggctccactttccttctcccaggcccgcggtgtccgctgccattcaacgcgtcggaggtggttggtggaacaatcctgtgtgagacaatctcgggccccacaggctctgccatgcagcagtgccaattgctgtgccgccagggctcctggagcgtgtttccaccagggccattgatatgtagcctggagagcggacgctgggagtcacagctgcctcagccccgggcctgccaacgtgagtggcatcagagcatctatcctgcaccccgctccctctcagggctagggctgggaccgagatatggaggcgtggctgctccatttccccacccaaatgtagcacgctggtggtatgccagatggcaccaagagatgggagagagtcccatggagcattttctagaaggagcagatgtccttcacagactcctggagttaggctttctttgtcccttctctggaaccatctgctccttgagagaattgccattcttccaactttcttgggatgtcttggattcaggaaaaatactgggcaggtcagtgcttcaacagctggataggtggctcacatgctcagcagctctgacatgctcagagctgctctcccagcctctgagtgaccctgccccatcagcctctccccaagaccacctggacttccagggctaatgcctggcttagcaggaggccctggactctgctccaggtagggcatcagtcctgattgctggaacttgtgtaagtttcggccccctttcctagtgctctgaccagagctccttttgccttgtcacacactgaacccactctgggacctggcacttggtccacccggtgcagtgggaagggcatctgggagagagaccaagattctgggactgtcacaaggctctgggtggatgccagagtgtcaaggagagcatttgttgcaaagcactctgggttatagagggtccccatccagaaaattcaaaatgtgatttgaataaataatggcctgtcactttgactatgttgaaatcaagaccaggatggtcacaactgaccctagagcaaaggactttggggaaaagaggcacaaatcttgagctcctgaagttgaatacaggctgctgtgcatgattgttcaggttgtgcactgaacaaccttagagaataccattcattcccatcatctatgatgtctattcttaacctgaaaaaccatacagagtggccctgtctgtatgcaagatggcatggaagattttccaaggagaatgtccaggacctcaaaatataaagcaccctggtttggaggatgaggcaggactgagctttctgtgagggtgctcagtaatttcagagacaagctgttatgctggaaagtacttagactcagaatgacaatgcaaaatggcagtgcttatgtgttttgagctcaatgaggaagggttatttttgcagaggaaatcccaaacaaagaaaataactctacaggcccattgcctctgctgatctctggtgcttgcctgcagggccccagctgtggcagaccatccagacccaagggcactttcagctccagctcccgccgggcaagatgtgcagtgctgactacgcggatttgctgcagactttccaggttttcatattggatgagctgacagcccgcggcttctgccagatccaggtacatgcctggccttccccacagtgagggcttggactcaactcagggttacggtgtcagaaaacctgagggctcacattaacacagaggctggagacaggggccccatcttcaagtgtttgctggaactaatagtgaattctcttggcagccttgagttttctagacagccactttaagaggggctagggtcttcccaggggtctggccttaagctgttagaaacaatgttagtgcttgttcaagtcttttgatgtcaaggctgaggtctagtagagggctcagaggagcctggctagagtttggttcatgacagagtcttcaggatgcagcagttaacgagatcacctctttgctctttggggagatgacactaaacaagtacctgtcaggtaaaggtaagagctaagaggggaaataaagcaggtcgggccttgcttgagagggacgctggtgagatgagaggggttttttacagagaaaggtcaggaagaggcctccaagaggtgctactgaaagggacgggagtgaggtaaggctgagggcctgtgagttctgggggagaggaacccctgcagaggaaatagaaggtcagagtttctgtgatgggcacatacttagtgtgagccataaaattgagggaaccggtatgagtgagcagagcaaaagagggaactgcaaattggggtgtgcatgttggaaatggctcaaggccttgttggctgtggctaggatggtgagttttattctgcatgtgatgggacatcactgaagttgagaaagtgacaggatgatgggagttttacagtcttctccagctgctgtgtagagggtaggctttgaggggttcaaggtaggagcaggggtcctcactgcagcctggggccaggtggcagtgcagaacatgagaagcagcaggaatcttgacatattgggacaaaagagcctacaagactgggtagtagttgatgtgtcatgggaagatggaggtgttgaggatgactaaggttttggatgcagggaatggctgaagacatgtgtttcaaacatggggaaattaaatcccatgcagaaaggagtaaaatgttctggaatccaggggactagagagctgaggaccatgctgaagacagagatagggtcaggaggaagctgggcagggacctagtcctaatgacttcctaaacaaggtgtcagggtatgaccatgagacagagagcttctaaggtcagagcttctaagaagggagtcttattcttcagaaggaggagatgatacatagactttcaagtcagatggatctggcttcaaaccttggctccagcactcctaccagtgtgacctgggcctttcccaggcttggtaagcctcagtcaatcatctgtgaaatgggtttaggagaacccaccttggagagtcagtttaagtgagataacgtacaaatccaaagctttttctctttatcctctgctgagagctaaggaggttctggggttagtggagttttgaatcccggctctactacctactggctgtgggatcctaggccatttctcagtctctcagaggcaaattctccatttgtaatgtggggtaatgagagtcccaactccatagacttgttttggagattaaactagctaatatgtttaaagcacttcacacagggcctgatgaataacacatgttcaaaaatcgtgccacagtgccttctgagaatactaagcccttggcacacagtaggatctcattaaatgacaactatatgaacactcacatccacgttctcaccttcaccaggggtgtggcactgggtatggcacacagtaaggtctgggtgccagggccattgggatggatggcatgctacattcaggcttcatatgcattggacccctggggctggctttcagggccctgtctgcattctgaagaaggtagttgaggccttttgtggtgaaggctgagggccagggccacgtcaactctgaattactcattggtgacagagttcactttccttctaaaaccctccagtcactctctaggcacccaagcttttgataaactgacttccccttgggctttatgtaaactctcttggaatgttaccttttgccatcatctgaatgcttgtgtccccccgaaattcatatccaaaccataatccccaacatgatagtattagggaactttgtgttaggtcatgagggtgcagccctcatgaatggggttagtgtccttataaaagagacccagagagatccttgccccttccaccatggacacagtgagaagacagacatttatgaagagaaccttcaccacacatggctgacatcttgatcttggacttctcagcctccagaacttatgagaaaaaaagttctgttgtttataagacacacagtctgtggtatttcgtaatgttcatccaaatgcactaagacaccctttgaaaggggctgatatgaagagggagaggtgaagcttgtgttcaaccctggaccaaagcctggcaccatccttgggctaacaggcctcacaaccgtctgtctttctccccaaccctgaggagcctgcagtacatcactcacagaaattcagtgggcacaactcagccacacttaggctgggaggagagaccaggctgcatagccaacattgaggagctggtggatgctataggggttcggagatgtcctgctgaatatatgtatggtgaagacatttgcagagttggctaaagttgtttcaccagtgaagtatggtgactgggcttttgatgcatggagcctagctcttcctccacttatacttctgtacaccatgtgaccagggcaggttatttaacttctctgaaacttgttttcctcagatgtggaaaagggggtcactattccttgaccccctgaagtagggttggtggaggattgaaggaagtaacataagccaagttctggttcctggtgtggacccaacaaaactagctttctactctgtgttcttgagctgaaagtgtctgtcttcttgtaggtgaagacttttggcaccctggtttccattcctgtctgcaacaactcctctgtgcaggtgggttgtctgaccagggagcgtttaggagtgaatgttacatggaaatcacggcttgaggacatcccagtggcttctcttcctgacttacatgacattggtatgtttttctgtggtagtacctagaataagctatgcagcctctctgagtctcagttttctcatctgccaaatggagctggtgaagaagcccatgatgtcttcttgtgaagactatggggagagctaattatttaaaaacatataataatcaatagacttcttgccaatcgtttactagagttaaataatgtcaacaaagagcctggttctgtgtcgtgaacatctgctaatacttctcttgattttctgcgtgcagagaggtgaaacagaatgtgtgaaggggatagcagggtgggctggggaagtctttattggtttttaacttatgtctcgtctgtttctaattgtaaaacatttcagaccacttacaccatttaaaacagggcagtcacgatatggatgagtcaacagaggagagagagaagaatggattttatgatacctactgtgggcatgtgccatgttcagctctgagctttctggtaggataggaaagagcccgtacatttctgaccagagaatgggaggcaagtccattttctcttccaccatccagtggccaaacatccaggggcaggactggctggagtttgccctctgttctatgaggaagaacttctggaaaacattgccaggaaggagactgcatctctgtcattcactagttctcaggatagtaatcctctaaataataattcagaagaattgtgaattctccaggagccccagcattgtgaattaggggtccccttccatctttctccaaagagagcctggataatgtgggtatgtttggagccgcaaaaacatgagatgtttgcttgtttcaatggtgaggcagcgagactgtgattggagaccatgggctggctctacagtagcctgttacagccaaaatgtttgctatgtgcacggatctgccccagctcctggcatggtgctcgcctgctttcttcctaggaactacttatcatttgacacctggagacctctcggtgtttagctaaacactgaggcagaaggccctgttgcctcttcaagtctttgctttctttttgagtggccacttcacacacattctctcctaggacccttaccaactgcaaagagagccattcccaagccatttttcaggtgggaaaactaaggctcagaggtgttcagtgcctcaatgaaggttgaggtggatgagtatctgaatcttgaaccttagactagtgactgaagacccgatatcctatgttaacatgggttgcattggtgccacagaaatggcaagagccaggaaatctgggttggagtccctacttgtgcttctgattcctgggtgaccctgaaccagttcatccccttctctgggcctcagttcctccctctgtaaaatgagacaccacatgatgcctatgtctcattccagtctggatattctaggcatctctgccctgcttaatcctccctggccctagcagagtacagtgggggtgacctctaccttatcctgtgtcttacagagagagccttggtgggcaaggatctccttgggcgcttcacagatctgatccagagtggctcattccagcttcatctggactccaagacgttcccagcggaaaccatccgcttcctccaaggggaccactttggcacctctcccaggacatggtttgggtgctcggaaggattctaccaagtcttgacaagtgaggccagtcaggacggactgggatgcggtaggtccactctctccctggatatctcctgtggagccatgtgaggctttaggaaaggccacctcagcactggagagaggctactctggacatccagggctgagaaccatccatttagttaacgagcaaaagttttcaatcatctactatgcatgggtgtatagtctccatctgctaggtggcatggcagaaggagccccatatttgcagtgattctttctgttggttattgataagcttggaccctgggcctggcctgccctgtcattgtgatgaaggctaacatacatttgtatcctgggcgcacatttctcagtctggctgtggcaatgttactcaccacaatttccaaatggtcattcatcagcccagggctttaaaactcagggaaaatggttcctgattgaggttcacttgggttgctcttgcctcgcctgtgagtagtttgggggccatttttaatgggaaagtgatgcagattcctttaatggaagttgcattagtttcctgttgctaccatagtaaatgaccaaaaattttgtggcagaaaacaatacagatgtattatcttacatttctataggtttggattacaatgcgggcatcactgggctaaaactgagctgttggcagggcctgcagtcctcccggaggcccctggggaaatctgtttcctcaccttttccactttcttgaggttgtctatatttcttggctggtggcttcctttcttgctcaccaaaccagcaacatttcagctctctgacccctcttccctggtcacatctcctctgactctcttttacctccaaggaccttagaactacacacagctgcatgattcaggatactcctttattttgaggtcagccaattagcgaccttaattccatctacacaggtaatttccctttgccatgtaacctaacatattcacagattctgaggactgggatatggatatctttggggggacctttgtcatgtctaccactgaagattcaaaggtctcctgatgagaagccttcctcctgtgtggggtgagatagaaagacatttttatggcgctaaagaaagagaagatgtttctcagttatttttttcaattatttatgttggtcgcaacataaaagccaaatggcctttccttttctgaaatctatgccaaattgtaaactccacgttggatttaagatgcagctaaatcctaacacagaaaacagaaagacaaccacttcccactagcatttatggagaattctgcagttcaagtgcacctgcacaaacatttaactctcacaatagcccctggtggcagatcctttcctcatttgacaaagaagctggggttcagattaaatgagatggggcatctgtcatgcctggggtggggctgacacacaggagggactgtagctcacctaactgattaatagagggcgagtaagcccaggtcctctgggaccagagcctgtgatctttctttctattccatcagagctgcccaaaccaaggggacaagaaacagaagcaggagtggatggtgccaccccagggtgggtgagatagggttgcagagagggagagtcacagagagagcacctgccccatgttcacagactttactgtgaagagcccttggcttcaacgccagatgctgaactagcaggggtgtactggtgtatgtggcgtgtgtgtatgagtgtgtgtgtgtatgtgtattagtgtatgtgtgtggtgtgtatacatgtgtctgatgtacatatgcatatgtgtgagtgtgtttgtgtttttgtccgtacgcatgtgtgtgatgtgtctatgtgtgtatgcacatgtgtatgttgtgtgtgtgcatgttgggagcaggggctgcaggagcctgcttttcatagctgccccaggtgatgtaccacatgggtctggaagcagccccaggaggctccttggcctcaggggtgccctctgcagccagagaaggaggtaaagggaaggcagagaacctgtgttgactctgtgccttcaaggaagttctatctcctctgactgtcttcctttccatcccccacaacacacaggtaaaataaaggggctggcctagaaacctggtttcaagattccttctaggaagctcaattattagttcctgtcaacaagaagatgggaggggccactcagctcaactttgcctgaaggggaaagagtagggcctgggaatcagcagctggtgtcagggcacggggcttccgaggggctgtgggagccacaggatggggcgtagggaagagactgcatgggagaccttgcccaggacacacctgggctggaacaggactcagcaaacctttcctgtaaagggccagatggcgatgttttagacattgggggccatatggtctctgtctcagtgactcaactcagccattgtggggagaaacatatggctgtgttctaataaaactttatttaccacaacagaaggtgagctgaatttggctcatggactgtggtttgccagtcttgctctagataaacctacactctatcttccagctgctgtagcctttaactgactcacaaagacttgtcaatcacaccacatggccccatcctcttactccaaagggttggaaagatccagaatggaagtctcaaaagcagtaccaaaagccctgaattttcttcagcatcagttctagtacctgtcgctcactgagtttttgatattcgtgtggccttactaacattttactgtccagagactcaggtgttattaattccatcttatgcatgaggaaccgaggggcctatagtgccacacagcttcaggaaagtgctctgtgaagtcaggtggacccgggttcgagtcctagctccaacactttctcattgtggatcctggagaaagtccattattctcactagacatcttctgaaaaatagggataataatacttattgcatggggtaatacctattgttgtttagacagcatgaaataatgcagagcacagcacttagtaaactcttggcgaatggtttgttgtgaaaattggcagtgctgagatctaaatccaactctgtctgcctccaagttctttgttctgtcctctgcatcacacgtctcccttctcaacaaggaggttcttggtgaaatcacaccctctcatttttgtatctattcttattggcacttttcccttgaaaacatatctgggacatggccttgatgttacaaggcagagcactgtcctgtggcaataaagcaggattctctgtgtcatcctggaggagggctaatcaggatggcccccttggagggcaatgactcagaggtccaataggaaagtccattgctcatgactcgtgtaggcacagcagccttgatccagggaattggtgacggccagggagcagagaccttatttgcagccctgatggagtcagttttgttcccccttttgcctcaaggccagccatatggcttctccttgaaattacctgctggcagccttcatagcagattagtttatgaaggagaataactgagaaattgtctatatttttcatattccattctggatgatattaactttcactcattcactataatttcttctaatagagctggttccctatggattttttttttgctgaaggaattatgcctgcctgcttacctactttccttccttccttacttctttccttccttccttccttctttccctccaaccctccctcccttcctccctccatgcctccctccctccctccctccttccttccttccttccttccttccttccttccttccttcccttacttcctttttttcttctttcctgtcatccatccgaactttcaaaatattatatgccatgttacacactcagggaggcaaaaaacaaagctccaatctcaaggcactcacagcctggctggggagagatcagtgagtattcagctagaccatcctgtgaagaagcctgttacatcacagccagggtggtcagggcaggtgtgctggggtaggaaatgctggcagaagtcttgaaaggtgaggaggaatcgttgctcagacaagagcagacagaaggtagtgcatgtttgtgcatgtatatgtgtgtgtgtgtgtgtgtgtatacctgtgctgagggtgctaaagtgaagaagaacattccagaaagattggtataaatgcagggagtcaagaagttgctgactctttggaaacagtgctcataatttgtacagctggggaatggggtgtgtgggaaacgtgacaagaagtggggccagagagacagggacaggccaggagaggccttggagcacagcaaggggagtgggctggagatgggaccatggaaggattttaagctggagagagagaggaccaggtgcgggcttgagccaccttccgaaggggtgaaggacatttacggttcctcacagatgtctttcttcagcagaaatgcggctgtcaatgttggggggtttgtggacaagggttggcaggaggggtggcctgaccctaaagctctgtgagactctcaaactcaaataggtataactgtcttattttattaggctggtgcaaaagtaattacggtttttgcaattttttttttttttttaattgcaaaaaccacaattacttttgcgccagcttaatattaaggaagggtctgaggctaaaggattttccagtgattttgagggatttaactgagggtcagcacctattggtggcagtggacccaatggtcttgagagagccccttctcccgagggaaggttgacagtaaggcagccgtggtctcattctgacttagaaacgtgctcttttgggtggaaaagacttgacgtcagagacggagagaaccggtgggaggaaacagcgtgtgcattccctgagcacagacaagagtctgggacctgtgggatttgcagcggaagttaagttctagctctctcatttctgctagttgcccgcacctaggcttttggaggctgggcaaggcaggttggccgaaaggcttttgttttccttcagcggtgaatttggaggccacttgaaaaaaggccacagttctggggttgaaatgctagagataatcatcaccaacttgactcatagaagtaatgaaactccactctcggagggaggatattaattgctctgggcagaccaaaaaacacactgttcagtttccaagatgtggctcgagtttctaatttactcagaaatgccaactacacacgtagaccagagacagtagttgctaaatcaacattggctccatctcagcacgtcccactcattggtactgacttctctgccagagggaggtggctggattggtggaaggaacaaagactttggtttggagatgaatgaatggagctcaaatctcacctctgacacctcactgcttggccgtccttaaccttgaacctcagttctctctagtcttatatggagatgataacttccccatagggttgtaagaaaaacggattaaaatatctgcacagtgcatggcatattctataatttaatttcccactgacctttgctgaaaagcatacaaagaagtcatgcatggacgtctgaggctcagctttctcaactgtgaaatggggataaaatacagactttccatgggtgtgatgtattaatgtatgtaacagggcgatagactaagtgctgccagtagtgagcaggattttagctttcaccttttacttggtaaaagctcacttcttctggaagttatttggcaaattctcaagaacacaactctgaaccatgaaacaaagtaaaacaacccccctctttattttacccctatttgaaatccctgtctgaccctctcatctcctacaagcatgtcacttcccggacagcaggaagctcgcctgacttcttcacagctgcttccctgcttcttagagtctgacacacagtaggttctcagtggacatttgttaaatgaatgagctcttgaactggtttgaggattttctttaccctgtgtgttctgggattgtaactgtgaagcatgtgtcttgatttttaacatcatttctctgtttttttctagttaagtgtcctgaaggaagctattcccaagatgaggaatgcattccttgtcctgttggattctaccaagaacaggcagggagcttggcctgtgtcccatgtcctgtgggcagaacgaccatttctgctggagctttcagccagactcactgtaagttctgtggagtgcttctttgaaagaaaagccctgcaatgaaatggaactcaacagggtttcccaatctctgcactattgacattttgggacagataattctttgtgcagggttggcctgtgcttggtaggatatttagtagcattggtagctctcagatgccagtagcactcctccctaagttgtgacagccaaacatgtctccagacattgccaaatgtctcttgggtggaaatggcagggagagcaaaattgcctacctgtgagaactattgggtacacaacataataatcaaaggggccgccatctttgaatacttacctactgctaggccctgggccaggcattttacctgtgttgcctcattcagtgctcccaatacctcttccaatattagtagcccagcttttacagataagaaagctaagactccaagaaaagaaagttagtcaaagtcactcagctaatggatgatgtaactggtctttgatcttggttttatctgattctgaaacttctgatttttgtaagtcaaccttatcagattgaaaaatggaagatattttccacctatagtcattactgctatgtagctcatcttccttctctgctgcatgaatttgccaggactgtatgtatgggtggccttcccatatgtcacgtgatttcactcgacctacttacttaatagtcccctgggtattgttgggtttttttcctagcaaggacccataacttgccttgttgtgcatctcttcttgttagtctgaaactgtgtcaatgtgaaggaaactgttgtgcttacaatccaaataatttctagaatttttaaaacaagtcatcagaaaagatcaagatactttctttgctcagggcagtttcctggtcaggaaagcagtaataatagaacagtaattccaataaaataaaagtaaaaggaattttataggctgagagtctggcattcttcctggagaataaactcttcactgggaaaatagagtgtccttgacatctgggcatcaccctcagtttgtacacaatgacttgagtacttgtagtttgagatgacttgaagtgctatcaaaataccagagaagcactttcttaaaagaagattaatgtagtgtgctgagccttgtttatggaggggatatgacagaaatggcaggaatagaggacacaggttgaggcttgcaccagccagaccaggtttgatcaccactctcccttcttactggcactgtgacctagacaaagctaccttcctcttctgaatgtcagctccctcctgtattgggtggagccaatgataactcactcacagggtggtaataaagggtgtcttaggtcaggctgctattgcaaattaccatacactgggttgcctaagcaacacatttgtttcacacagttctacaggctggaagtctgaggtcagtgtgcccacatgattgggttcttgttgaaggctctctttctgtttatgtcctcacatggtctttgcttagtacctacacagagaaaaagagagaaaaatctcctgtccttctctttctaataagggcattaacaacatcgtgggggctgcaccctcatggcctcagttaaacctagttactttctaaaggcctcacctccaaataccatcacactggggattagagcttccatatataagtttggtaagggagggacacaaacaatcagtctgtagcaaagtggaatcaaaatgtttagcataaacaataagcatttattccccacccattttgggggtgagcattgattgcattttcatgcagtagtagagagctgtattgaatcattgccattctcccaaacatcttccctgagcagtgaaagagattttagtgaatggttctctaggatcaaggttggagtctgtgctaaggatctgttcatacctaagaaacttctctatgactcattaacccgcattgaattaccaggcctgtgttcttagatggaattgtactgaagagaagcacagggcagaagagtctgccaagttttaaataatgccagattacaatatttctttgatttccttttggtgttaggttagcttttagaatcccaactcctctatatagttcaggtctctattattgatcttgcttatacttttctcctacattttataacttagctggttcactggaccatgtttgaggttctgctgataactcttcagcagaagtagctcttcatttacttgtttgtttattgatgtattaactcatgtatagcatgcaggacatgcaaagtattctatttaaaaatagcctttgtaacctcccacaaaaaagttcttattaatcaatggtgaatcacataaccaatagtctggaaatatagaaactcagatgttatgaaatctctgggctgccataaaatattatctttcacctacttcccagacctggagaaccaaatgaaggcattcccttttaatatcattcatccaaaatttattgagtacctgctttctgccaactgtatagtgggtatatattaaataaaacaagtaatgataaagtccctgtcctcaaggagtttagagtctgacagagaaaagaaacgtgtgagcatatccatgtgatgtaatgaatagtataatggaggtacatattagatactgttatagcagcttgtgagaggtcttgaaggacaaggggacattagctagggggcccggtggagaaaggccttctaggaagaagaaacagcttgaacatggatatagaggtattcatccatggatttgactagcatttattgattttggacagaagcttgttttgtgggtcagacactgagcaaggcatttggatacaataatgagcaaaaccatacctggtctgtgcctttctggaacgtctatcgagtgggaggcaggcagtcatcaatcgttcattcacacaggaaaatgggaattgtaacagtgtgccctgctgtgaaggagaggtgtgggtccctgggatagtgtgtaacatttgggcctgactgggctgggacgtccagagatgtcttagtccatttgggctgctataagaaaataccataaactgggtggcttataaacagcagaaatttatttctcacagttctggagactgggaagtccaagatcaagttgtcagcagatttggtgtctgataaaggtatcacagatggcgccttctcactgtgccctcacatgctgggaggaacaaatgagcccccttgggcctcttttaaagggtacaaatctcattcatgagtgttccactctcatgatctagtcacctcccaaaggcaccacctgctaataccgtcacactgggcactgggtttccacatgtgaattttggcaggtggcacccatagatttagaccatagtaggaaggctttcctgagacaatgagaattgggatgaaaacaggtgagtggtggagagttcgcgcagcaaagactgggggagctgtgggccagaagagggcccagatgagtaaagcttgtgttggagcaaatggtatcagagagattggtgtattcagggcatggaatgaagcaggtggtgtgtgaagcatggggtatgtgtgcagaacttagggtgggtggcggccaaatcacaggggccttattgatcagaacagtgggaacactgaagagttttaagctggaatgtctgagttagatgtgtgacttggacaccttgtcaatgaccgagagcctgggagtaggagtcaggggattccagaggcccattattgacggctatgtcaatctattggttctaggtgtcactgactgtcagaggaacgaagcaggcctgcaatgtgaccagaatggccagtatcgagccagccagaaggacaggggcagtgggaaggccttctgtgtggacggcgaggggcggaggctgccatggtgggaaacagaggcccctcttgaggactcacagtgtttgagtaggtgctgggggtgaaatcagtcatggttcctggggactggggagtagtctcaagggctttttagaaagggagagaagctggaggtgcatttgtctccaactttttgttttgaaaaattttaatctgtgtagaagttggaagaaccgcaaaatgaacaaatacccatcacctagatccaaaaattgttaacatttcactctctcttttttggaatcatttggtatgtaaattccagatatcaggaacccttacttctaagtacttcagcatgcacaagagatgaatttttatattaaaagatctgtggaggcctccattcttctaggcagcttgacttcactaatctagtcagcatttcttcctcagtaggacgttgtagagcagcagtccccaacctttttggcatcaaggatcagtttcatgggagacaatttttccacagaccagaggtggcagggtggggatggtttcaggatgattcaaacacattgcatctattgtgcattttatttctattattattgcattgtaatatataatgaaataattatacaactcaccataacgtagaatcagtgggagccctgagcttttttccctgcaactagatggtcccatttgggggtgatgggagacagtggcagatcatcaggcattagattctcaaaggagcatgcaacctagatccctcacatgcacagttcactatagggtttgctctcctgtgagaatctaatgctgccactgatctgacaggaggcggagctcaggcagtaatgctcactctcccaatgctcacctcctgctgcgtggcccagttcctaacaggccatggactggtaccagtctatggcccaggggttggggacttctgttgtagaagacttgtgtgccaggccttgttccatatcttaattgctgggtgatctagagcaagttgctcaatccctctgatcctcagtctccccagtggctttcagtctatttcctgagaatcaacatgaacctataaagtcaacaaatacgtattgagctctaccctgtaccacgtacagttcctcagtgagatactggatgggaaagtcccaggtaaaccatcagatatgctacaatatatagtgtgatgggaaccagaggaacagaagagaagagtatgtcctgtgggatcagaagtagtttaatcccagtggtgcctttactggctgtgtagtcttaagcaagtcactcaccctcagcagtttcttcgtctgtaaaatggagacatcagtttcccccgttgtaagagtgttgagtgccttagcaatggcattacctaccagcggtagtaaatgtctcagaataagaaggctcagaaacagtatttgccctgtttccccatctgttaaacttggagggaggctgaaacagtctgcaaggtcccttaatcctgatatcttctcaatctttatgactctgttccacctttccctggagccacctgcctctgcttgaggtcttgtggctaacctttgcacatttgacaagcccaagcaagccagtctcttagtatttctgtggaaggagagggcctaacatacatgggcttactgtgtgccaggtgttttatgtgtttatcaaatttgaatccatggtagtcctaaaaggtagatattattgccaatattttagctgaggaaactgaggcaaagaatgtccaagcacttctcttggttccatagttaggatagaatatacctagaatttgaattggtgtatgtcaaaccaccaaacctttgtattcttcattctaccaatctgtttccacctagatttacctgcttcctcaataaacatatcctcacatacacacacatatgcatgcatagcctacctgtcctccagggaagctggtacagctcatgggataaaacattagtgaaaatccaagtgagaaattttcattttctaattctcagagcaatcatttcccttctctagtgaagtgctaacaagtcctaaggagtgcgtgtgtgtgtgtgtgtgtgtgtgtgtgtgtgtgtgttcttgaataaattgcaaatccaatgaaagtcttatttttttcccaacatccctcttcttgggcagaaaaaaacaggggaagtacagcaggaaagtgctttgagagatcagttagccagatgcttcacaaatgaaggagactgtgtctttacagaatacaacttgccctgcggccctggtgatcaccatcagtcctgggattattgtcttacgtgctctgagctctctttgcatctctgtcaatgggttggccttgaggattgtcttatgcagtttgtagggcatttcatggtgtattctgcccagtgttcagggcagaaagaacagtttaaacagtggcaccagaagtgctcacgagtcacagctgagctttgacaactttgatgatgcctccctgaggcgctggcttctgaatagcctccagatagagcttcagcatctttggcttcttatgcaaagctctgagcttaagtttccctttctggatatgcctggggatttctatgccactaagctgggccctcactgggatgtcaacacatctcttctcagaattgcctttgagaggaactttctcttcgggagtaaaatgtttaaggcttttgtccttcaggctaggtccttaagcaagggacttatacctccccagacaggtacctacctgagaggaatttgctccttcctcagccctcttgccacttcctttgttcaggcttctgctgttacctacatggtactgccatacctgcctaactcatcttcttgcttcagtccaacagtttttctatgatgcttctagagctgttatttaaaaggagattctgcctatgcaatgccccttaaatctcttcagtggttcttcattgctcttgggataaagcaccatttgcagtatcccagcctcccctctgggctctaacctcattagaccatatgttcctttggggctagaattgtatcttatttcttattctattccagggccataggtactctttgacagaatgaataaatttctctagttgtctgggattctttgaaactatttcctaaaggtcttcagggaaggagattcttccaccacctcaattcctgtggtcaattttacaagccctgagacttaggaaaggtgttctgcaggggacagagggacttagcacttactgagtggttaccatataccatataccattccatgctatattatttagtcctcacaaccagaaaactgaaactctcagaggttgcaaggtgtccaaggacacagagctggtggtggcatcaggactcgagctgagggctcactcctgagttggtgcctctccctgactgcctgctgcctctctctctgaaatctctcctgctgcagcttcctggcactccctttgatcttctgtttcctttgtttacttgcagagttagtaaaaaatatttccaccttgctcactggaaatatttccagttcatcttccctttaactttaggttcattttcctaattctgatctttgtcaacctatgctgaagatttcatataccacatcaagtgcctgaacagaggtatttacatacctctgttccaatatgtgtgtgcacgttgtgtgtgcatatgtgtgtacacgttggaattgtgccatcataatgttatctcctggtttcctggtgttgtgatgatgttgttagtcattcatttgcctatccctcctttcctcatattctccctccctccctccctccatccattcaatatacaggaaagtagtctctctgttactatcctggctagtgagggttcaaatatgatcagaatattgcctttgccctggaaggagatgggaacctaagtagccacaataaactatgcaaaaatgatgaaatattaatatatactgtgctttaatgttaaccttttatgctttccttaagacatttgtaaatagccgttaagtataaattggataaatgggaaattataccaacagaatgtataaatatgcaaactgactccattgtcataattcattggcaaattggttcatggattgtttctgttctgcttggccatgagcttcttcacagaatgctgaaatgtgaagatctctatcaccaaggtgtctcttttctgaaaaccagcagattctctaactgaagtgctaaatttactgtatttttggcagaatttaattagaaactgaaagacctttcaaattgtatttagtctcctagaatattttgagcatctggtctgtaccaatcaagacttagggacactgtgatgattataacatggcatttgctggactggagcttgcagtctctacaaatgagctactaaagggtataaaaatataaaaagagatgagagaagaagggctttgtgtgggcagagcacgtgaaattggcaacttcagcaattaacatggatgggccagtttgtaaaatcagaattcttttctctatcaacacttttgaaggcttagagcatgctgggatcacaggcctgagccaccgcgcctggccgagcatgtcattaatgctcacttctctcaacccaatcccaaaaggaataaacattttttttctgcacttattatgaaagctgagaaaaaatcactttggatggccttgaatttattgacttgatgaaaacccatctagatataagtcttttttaataaagcaatggatgtacataattagtgcttgtatatatgtttataattatgtttgcaaaaaaccaatactcatgtgcctttgaggttgtacataagtttttctttttgacagttacccgtaagactgcaagatattgacactcttgggaatttgtggcttggaaggtgaatctcattccttgagagttagcctccatgctttcttttttgcttggtgaagaaaaagttccaactctcatagccctgagaaattatatttcttcctcctcacttgtctagttttatgagcttgtgactgttattcctatcaaatggaactcaagtgtgttgatggtagctaggaaaacagatgctaataaatcacttaaccaatcttaaaaatgcctgagccacatgacatgtcttcagatttacctaaatacatatgcacatgtcttttaaaaaataacttacctcatttcggaaagaattcaagttgttttacagaaagaaaatgccagtaaaatagttatatgatgtaattagcactgaaggatagggacagagaaatataagtttatattatcaatgttaatgagaagaaaatagttgtaaggactaacattaaatttccgcctcacttcgtgacaatgaggtagaagcagggagagctggtaagttgtaactctcagttttagatatggagcagtatgttggagctaccttacaaaggaattgcttttcctgggacatttgtgttaccaagagctacgaatgggtattgactgcttgacctaacagtctttatggcttctctgcagatgccctacacccttctgagtcagatttactaaatctgctttatttttagtgatgcagaagtttgagaaggttccagaatcaaaggtgatcttcgacgccaatgctcctgtggctgtcagatccaaagttcctgattctgagttccccgtgatgcagtgcttgacaggtgaggagtggtggggagatatgcactcagaagaaggtgtggaaataagctctgctgagagttgtcgagacaaaccaaatcaaaccattaaaactataatttaaaaacatactttatcaaaaacactataaatgaattgatttccagaatgcatattcaattcataacttaattgcagagttgacagtttatctactgtatgctatccacatggcacatgttaaggagtagaaatgaacaaaattagtttggcatagatctatgtgtccaggtcaggatctatatctccctattttaacagtggggccagagaggtggtaataaaggctgccatttattgagcaatgtatgtttacaaggattatctcacaatcccaaagccacccataaactggccattgctatcctgagttacagaagacaaaaatagttttaagagtgtaagtgacttgctcactgacatagaaccagcaaggggtcagggcttaaattcaaacccaaagtaacaacatcaaagcctgcagtctttttttgttttaaatgattttatctttggggtgcacgaaaatctcagactttaccactatacaattcatccatgtaactcaaaaccacttgcatcctaaaagctattgaaataaaaaatattaaaaaataatctcatctttgattttagatttagggggtgtgcatgcaggcttgttatatgggtatgtggtatactgccgaggcttggggtacgattgagtccctcacccaggtagtgagcgtagtcgcaatagttagttttacaaccctgtgctcctctctgtattccccccaagtagtccccagtgtctatttttgccattttaacactgcattatgcctgcctcagtacccacatgtgatgtagttattaagtaattaacactctgagtgtgaatctgttttggatatcagctttggttatggtgagcacactatagtttgtttcacaaacacagtgcaaggcatgaagtagaagctggaggaaatatttgtagaatgagagatattgacaggaatggagggacagaaccaagtggtcaaatgagtagatgtgaggaatcagcatgaggatggcagacttgagggacagctttggcagttatttgtctcaacagggattgtcatatacctgctcatgtgtgcgtgcactgtgacacagcttaagttagaagggcaggcagggcgtggtagctcacgcctctaatcccagcactttggagactgagcgggggtggatcacctgaggtcaggagttcgtgaccagcctggccaacatggtgaaaccccgtctctactaaaaatacaaaaaattagccaggcatgttggtgggtgcctgtaatcccagctactcaggaggctgaggcaggagaattgcttgaacctggtgggaggtggaggttgcagtgagccgagatcgctccattgcactccagcctgggcatcaagagtgaaactccgtcaaaaaaaaaaaaaaaggaagggcaaactggtgggatgggaagcaaaagaggatgcagaatcttagggagtgaggcaagcagggaaaacacgtccatctgttcatgtccagagatggtttagccaactgggccactgagttcagtgtctaaaatatgctgagagaaaacagacaacagttagaaaaaagagagccacatcaaggaggtccagcaagatgccatcctatcagacaaacgagagcagagcaatccaagacaagcagtatttgcaggttgagtacaggtccaggcaggcatccagcactgtgttagtctgtttgggctgctgggacaaaataccgtagactgggggacttaaacaacaaaatggattttcttgtaattctggaggccagaagtccaggatcaaggtgttggcagggttggttgcttctgaggcccctctcctgggcttgtaggtgactcacttctccctgtgacttcacttggtcttccctatgtatgtgtctgtatcctaatctttatttctcataaggacaccagtcctattgccttagggcccaccctaatgatctcattatgcacttaatttacctctttcaagaccctaactccaaatgcagtcacattctgtggtgcttggggaaggactacatgatacaaattgtgagtttaaaacataattcagcccataatgaaaaatcaaggtggttttacggtagatcgaagggccatttaaggggtaggaaaataaagccactgagtcaatgaagggttggatatcattgttggtggggaaaggggagactggtaagaaaaccaaggcatctagagaactaagtagcatgatcaggaataggagagaaatgtggattgttgggggtgtgaggggaagctatggttggggtcatggtaggaaccctggttctagttcagcacttaaccagccagggtctagggtgctcatccttctaacactgactcagaactttaattgttttcttgactgaatttgtccctgagcccgaagcagggatctgcttgccgtgaagattaggttagttcagttaaggggacaggagaactttagagccatgagccagtggaccagtaagaattattttctttggagctgggcacagtagctcatgcttgtaatgccaggactttgggaggccgaggcaggtggatggagaccagcctgggcaatgtggtgaaactgcatctctacaaaaaaataaaaataataataatacaaaaattagccaggcgtgatggtgcgtacctgtaatcccagctacttgagaggctaaggtgggaagatggcttgagtccaggaggcagaggttgcagtgagccaagatcgtgctaatgcactccagcctgggcaacagagccagaccctgtctcaaaaaatattttaaaacagaattatttttttggggggggtgttctgaataagccacacagtttctgggtaaaatgacatcatcgacctctcagtgcctagttcataaaagacattacagccatacaatgctgagatgaaaatcaggagatgatgaaaacccccagaagaccacctctgcacccaagaatgtcatctcaatagagctgcagtttgtgagatgtcctgttagagaaaaggaagacatctctatcccagataccagtggctttccctcgcctttcagctgggcaaatacagggggaagggctcaggaattggattgcaaaggtattcaagttactgctttgctcccatcagccacagactgtgctgatttttagtcttggtgttcccatctctaaatttacctcttacctaatgcaaaaatcagtattaataatatatgtgaaagtgctttgtaatgataaatgtgtaagtgtatgctttttctccttaatttacattttctaccaaaacctcctatccctgttaaatcattaattgccatcgttactcatgaatattacacagttgaatgcttcatgcctatcacacagtgtccacagaaagcagctgtggtccctgccctcattaagcgcatggcctcctgtcatcttgagagggcactcactgtaggaagtggggattctattctatcattcaatcccttgcagggctgctgtctgctcctgatggaaatgggacatagccttgaacaaagttgtgatctcaatggatacctagatttggctcctcatagaatagaagcaattaaaatgtataaaaggtttaatttaggcagatacagcttagtaactgtacaagttctgaagtctgactacttagatttcaatcctagctctgccacttggtagctttgtgacctccgtgagtaagtgcctgaacggagctgtgcttcagttccttaactgtaagatgggggatcgatgattcaatacacagaaaacacttaacactgcatgaggttcatggtacgtacttaataaatgtgtgcttatatgtgtgcttgtgggggtatatttggggggtgtatttgggtgtatatttgtgtgtgtgtgtatttggaggtgtgtgtatttgaatgtgtatttctatgtatttgtgtgtgtgtttgggtgtttatttggaggtatgtgtttattttggtgtatatttgtgtgtgtctgtgtgtctttaggtgtatatttgtgtgtctttgtgtgtttggaggtgtgtgtgcctgtgtgtgtgtatatttgtgtatttggaggggggtgtgtgtatttgtgtatctgcatatttgtgtgtgtgtgtgtgtgtgtgtgtgtgtgtttgggcatgtggggcaggggcagggggatgtgtctgctctgccctcagcatcccccgggaaagccaggtgagtgaccgtcccatggtgcttgcagattgcacagaggacgaggcctgcagcttcttcaccgtgtccacgacggagccagagatttcctgtgatttctatgcttggacaagtgacaatgttgcctgcatgacttctgaccaggtgaggtggggcagccacgtgtggttctgctcctcatccgctgtggatcagatgtgctctgaggagcgggcagcaggctggccaggcgatggaatgaggttgtcgagagctgatcctctgttacctccatttcttcaaagcaatgggactttggcaaattgaagctgtgatagtccagagacagacccaagatgaagctggagtaaggggcgtctgcttgagccttgtggcttcctgacgagtcagtcaggagagaaccacctgccccatcaggcagtgtgggcaagatgtgagggggccctaaacaccactgccccttggggtcccagacccgaatatgcctttccattgtagaaataaaacataatcgtggttggagggcacggtggctcgcatctgtaatcctagcactttgggaggcctaggcgggtggatcacttaaggtcaggagttcgacaccagcctggccaacatggagaaaccctgtctctactaaaaatacaaaataattagctgggtgtggtggtggacacctgtaatcccagctactggggaggctgaggcaggagaatcgcttgaacccgggaggtggaggttgcagtgagctgagatcacgccactgcactccagcttgggctgcagagtgaagactccatcaaaaaaacaaacaaaaaaacctataattgtggcttaaaaaggaaaacaagttaaatattagaaccacataacattgctgttctgtgagtcaaagcttatagagtattgtcagtttcatgtggtaccatcaaattaggataattagaccctgtcctcctccagtggaaagcaggagtctcctgtctcctaatttcccaattcataaacacgtgctcgtgcataaacacgagctcttctcaggtctgcgggaatgtcttctttctttttgctctccaaggctcttcctcctctccccaggccattgcctcttcagtgagttcaggctttctgcaaagcaagaagagctgttgccttcaaacagccttgctgtagcccctgtcctccaaaaattcccacaggaaactcaaaatttggcagccttgcgggggaaggcaaaatactgggaacaaaacacaccaatttatcctacctcatccacatagcaagactgctgaaagtaagtcagaaagagagatcagaaagggccaagaattgcaagatctctggaagtctgacctcaccatctccgagcttaagaaccttcttctagatactccctggatagaaactaagtgcctgtaaggtctttcatagccagctccagcctctctctcctctcccgtcactcccctctcataactgacagtccaaaaattactgaattactgaacctagttctgaaaacacccatgaaattctgggtccctgagtctgctgtttcctctgcttaaaatcagccctctcttgtttccatctggcaaactcttttttttttttttttcttttgagacagagtttcactctgtcgtccaggctggagtacagtggtgcaaactaggctcactgcaacctccgcctcccaggttcaggtgattctctcgcctcagcctcctgagtagctgggattacaggcagacgccaccacacccgattaattttttttttgtatttagcagagatggggtctcaacatgttggtcaggctggtcttgaactctagaccccaaatgatccacccgcctcggcctcccaaagtgctgggattacaggtgtgagccactgcacccagcccagcaaactcattaatatctcagaacctcactcagactcactttttctgggaaacttttctagcttctctttctgaatggaatcaattgctccttcctctctaattacctcttctttaattatatgtatctttgcagctaacactcctggctgcaagttactgcttacacatctgtctcctccaatagaccaggagcaactaacttacctttgtagccctggtgcctagccatggttagggttggatgaatgtttgttggattgaattataaagtattgcaggataataatgcagcatctttccatctccagaaacgagatgcactggggaactcaaaggccaccagctttggaagtcttcgctgccaggtgaaagtgaggagccatggtcaagattctccagctgtgtatttgaaaaagggtaggttggtcaggctggttggcttaggcccgcggtggcttcacacggtcatgtttggagctggtttccagcaggtgcatgtgaggaggagccagactgtcccgctccccactccacaccctcagtctggcttctctgagctccatcctttggcagactcagcacagcacgctcctcaggcaggcactgatctcccctgggactgcaaagatatttccacatcattctcctttgtgccttcaggtttgatcccattgcaatctagcaaggattgagagcctcattctgcaggcagagctaagttgcagagtggacacaaagctacgaagtgaaggatcttggcagaacccgctgagttcagcctgtgccgtctggaaggcccatgcggcccaagaggctgggcaaactgctcactggggcctgggtgccgggctcccagcagctgctcctcccgggctttctgattcatagagcttctccttctcctcacttaatctctaccctcccaggacgttttcctcccagtgaacccaggccctgtaaggtgcaaacctgagttagtaaatcattggtgtcaggccgagatctagcctttctaatcaccccttagagagtgccagtgctgctggtccggggaccacactttgagtagcaagctgtgtcgtactgtatagtttatgacttcctttctcattcatcttttcatttcacactcatggaaactcttggagaaaggcacaaaggggattccaatccccatgtacacataaggaagtcctctgggccgctgctggcacgtgggagaggcaggaactctttccctggaatcctgaggtctgcgctcgctcttctgccccaccctgctcaccccctgcctcctctccggtggggtggaaaggaaacatgccagcaaggcacgctctgagccatgcgctctgggccatggccaggctctgacctgtgacctgtggttccttcatagctgttaagggctgcagagcaagggaggacggtggggcccgcctgcctgtgtggaacccctcctctgccacatatgagctgcatggtcttgggcctgttccttgacattctcagcttcagtttcctccttagtaaaacaggagtcatggtggaccaaggtcatcggcagattggaatgaggtgacacatgtgaaactgttaggacagggctgggctcatggggaaagctcagcgagtgtagaacatttctgtaatcatctttgttcctgctaaaaagtttcctgagggcccgaggccatggctgtgcaccagatgacagccaaagggggctcgacctgggacttgggggttgggagaaggggagtacaggtgtcactctctgaggttcgtaactcagggcaagtggctcggggcttccagcagcttcagacttgtgccaggaaaatcagcaagtggagacgatgccacagcccaggcccaaagctgccctgaccttggtagcaattgcgagcccacagcagggacaagtgtttgtgtatttttccctgtggtccttctttcacctaatgccttcatccccacttcacaaagagtttgcctgggagattggaatctggcagagctcggctctctctaatctatgaccagggtcactcggatctctctaatctagtgactagggtcactcggatctctctaatctagtgaccagggtcactagaatttctgctgcaatctttattccaattattttcattgtcctgtttttctttttaaataacaaaacatagggattattttctaaaaataaaaatcaaaatagaacagtaacccctacccaaaatgtcctttaaaatcatgacttacccttttatgacattttaaaaaatgcaattgtatttctgtttaagtgtttattttttttttcaacatcacacagaaagtcctagtgtttgttatttttatttttcctttttgtctcctgaaagtttgtactttgggggaaagttacaaaggaaattgggaaaattccttgttgccaaactaaatcaagggcagaactatgttttgctttttttggtttgttttcctttttggtttaaagcagaagatgtgcccggcagccgttctagacccgggtggagtggaggaggaggggaggaggagtaagttgggtctggcttccaactcccgcctccctcttcctggctctgtctctgatcaggaacaacttctttatttcacttgaaactcagtttctcctctgtaaaatgggactgtgtcacaaccgaggaggacaggacacagtttctgaaagtcacccacacacatcttcagctcgcagtaggtagttaatcatgtccattcccatctctgaccttcagtaaccttcagtgggactaaagaaagggcctgagtcccagagcttgatctgtcacccaataccctctgctgcctactcccacttaatgtctgtggccttcaacttgggggatgagtcgtggggtctctcagaatcaaaggatgtcagtgcccaaaggttctttagagattatctagcccaacccctcatctcacagatgaggtctaggaaaaggaaccatcttactacatgtgacatcaaagtggaacctcctctgagtctgaaaggccttcctggcctgcttcattgtctaggcttctaccactgcggtgcaataagcacttttgtaggcactgtggatacatctgtgagcaaaacagaatcactgataggggaatagaaccagcaataagatcatctcagagggcagtaggtgcttggatgaaaatgaaacaggacgaggaggtaaagacgggtatgagctgcttcagggtggtcagggaaggaatcacagaggaggggacattggaactctgatctgaaggatgaaaagcagcccatcggccaggcgcagtggcttacgccagtaatcttagcactttgggaggccgaggcaggcagatcacgaggtcaggagattgagaccatcctggctaacacagtgaaaccctgtctctactaaaaatacaaaaaattagctgggtgtggtggcgggcgcctgtagtcccagctactcgggaggctgaggcaggagaatggcatgaacccaggaggtggagcttgcagtgagccgagattgcaccactgcactccagcctgggcaacagcaggagtctcaaaaaaaaaaaaaaaaaaaaaaagcagcccaccatgcaaagctctcaggataggtgccctatgtggaagataccaaggggagctgagatgtggccctggactccagagcagcaccgtccaatggaacctttggcagtgatggaaacggtctacaaatctgtgctgtccattagttactcatgactattgagcatttggaaggttgctattgcaatattaactttgattaactgacattgatttttaaatagtcacataaggctataattacggcatcaaacactggagaatcacatgctgtaggggaggccgactctctcaagtagcttaaatacagggagagggacggtagagggtttagtacaggcacaaaaagaatgtatgagggatcaagggagagagagatgaattctaactgtacaaatgcagagatggacccttcaaataaagctgggctttggtgaagagtggatttgcattcgaggcagaaggggctgagtgagccaatgcttggagggagaagacgctggctttttggagatacataaaacatctgctgagcataagctaagtggcaggctcattgttgttcagcccttttatatatagtctatggggttttttttttttgtttgtttgtttgttttttaagatggagtctcactctgttgcccacactggagtgcaatggcaggatctcggctcactgcaacctctgcctcccaggttgaagggattctcctgcctcagcctcctgagtagctgggactacagacgtgcaccatcacacctggctaatttttgtattgttagtagagacggggtttcaccatttggcccggctagtcttgaactcctgacctcaagtgatacacccaccttggcctcccaaagtggtgggattacaggcatgagccaccatgcccggccccagtatatgttttttttacctgctcaatgtccttgaggattacttattatcatcctcattgtacagatgggaagcttgggaggctgaggatccaaggaattagggacttccttggcagggtgacctcagatctgtttgatctgaagctcgtgctcttgggtctcacactgaaaacctctctatgacgtccagctgtgtgagtcaaataagatggggtgatctgccagactgacgggaggtcagagtggtgaagggcacaggccctggtgttctgtccaccactcactggctgtgtaaacccgagccagacagttcgcatgtcaagacttttcctcaaatggaaaatgggcataagaatggggcagacatttaggctatagtgctctatatatctatccctgaaaaatctcatgtttgcaaagtgacactctaaaattaacagggctgatttgaaaactagacttagggacgggaaacccaaaccgtgccacttttaggtagaccaatggaaaaaaacattaacaattctacttaaaaatgctagaacagtttttaaaaagatgttttgaattcataataaagaaatgcttctgaaaatgtaaaagagcaaggtagcttgatggggagggtgtaaggaagggttgaggctgctgagttatggagacaagggctgcttgcacaaagggaagggaaaactctgcaatggtcactttgaagacagcccctgggtggggccagtttcaggcaagaggaagaatgtgggatcatgggtattgtgtacagtcctgagttcttgcagtttgttgcattcagctgcatttgtctacagagcattcctttaatgatgtttggtggcacaaggcaatgacatgctcagaaaactgtagatagtgcaagcaatgtgacttcagcattacagtggccaagcttccctaccacatgtttaaactaatttgtgtgacagaaacacttgtgatagcagagcaaggcggtgaaaatcaaatgaaaccacgtaggtagagcatgtggcacagggtctgtgtatatacttacagtgcaatacatatttgctggtaataataaacataaaaatatatggccattttctacacataccctttggacccttgaagacgtgttgggcatttgtcccgatctcctgggtttggggccatggccttggctggccccaccctcttcatgcacaggcacatccagaagctttgtggcacagagagcatctcatcttggcccacacgctgcctggagcactgttgcagctaagtcaacaaactgtcctgtgagatcagtaagctctgtccaactctgccatgttttgaggtcttttaaaattttgttctgcctttcccccaggccaaggatccaccacaacacttcagaaacgctttgaacccactggtttccaaaacatgctttctggattgtacaaccccattgtgttctcagcctcaggagccaatctaaccgatgctcacctcttctgtcttcttgcatgcgaccgtgatctgtgttgcgatggcttcgtcctcacacaggttcaaggaggtaatgttggcagtgagggccagggcctaacaagggatggggagcacacagggatgcagaagccaggacacacaacatggagctgcatggggagtacagtgtgagtgcctacacccaaagagaaggtgacagtcaagtacacaatacacacatgatactcacattcacattccacatgttgcacactgtgctggccccttcaccttgtaatactggtttattcctttctgctgtctttacggggcatattgcaagctccgttttacacactgagaaactaaggctcagataatttaaatcatttgctcatgttcagacaccttgaaaagtgatagagccaggatttgacccaagttgtgtcttccacagcaccttactgtcacttgtgaagccaggactggacatatttggtccaaaaatgtcagctcattcccatttcccaccatcattcattcaacaatgatctattgagtgcccactgcataccaggtcctgtgatcaataggcctatcattttgaatagtatctcagcaatggaggtgcccttctgtttatggaaataaattcatgtactcagcagtgtagcctagtggttgagaagggactttggtgttatggacctgggttctagtcactgctgtcactttctggctgtgcgatcttggacaagttacttaatgaagttgcacttcccttgtttataaaatagagataatgatactttctactggactacttgttataaagataatgagtgcaaaatgctgcgtatagatttggctcctggtgtgccattgattgactaagagagtcttaactgttttatatgaaaaccaatcctgtttctccttagcagcatcaaactgtaagccactatgtgactggtcacattaaatttatgaaaaattctaaagattagaaaaaattgaaatagtctgatatatcttgttatggttctcacttaagtcaacaggagactccaattgatcaccatatatgtgcaatggaatgttctaggcattacaaacagataaaaaggactttgggtctggtgggagaggcagtgtgcaccgtgaaaggggaataaatggcctttactcatttattcatcgctgctggcgttcagcaaacatgtttggagcactactcggcatcaggcttgagaactaggcagtgtgcgatgcaaatgcctgatgaggtagagacgtagaagtcttggagtgtgaaggaagaggataacaagaggaaggtcagggaaggcttccaggaagaagaggaacttgggccaggctttgtgggatgagcagtacttagatgacagagtgggaggatttggttcagagtgggtgtccttgtgagctgagctagagacagagagaccccaggttttctgaaggctattaactgagacatggagctgatcaggaagcaggtgttttttggtatcacctcgaggactgttgctgcctccagcatctgcacaatatccccaccaggctcagggtagaggatgtctccttctgagaaggactaaccctgcctcctgggtataagagccccttgtcttacctttgcaggcccatgcctgatacaatttggatgtttgtccctcctcatctcatgttgaaatgtgatccccagtgttggaggtgaggcctagtgggaggtgttgggtaacaggggtgaatggcttggtgctatcctcgtgacagtgagtgagttcttcttgcaagatccttaaaagtatatgccacctccccctctctctaactcctgatctcctgtaacatgcctgctcccccttcaccttctgtcatgaatgtaagcttcctgaggcctcaccagcagtagatgccagcaccatgtttcttgtactatctgcagaatcatgagccaattaaatctctttactttataaattacccggcctcaggtatttctctatagcattgctagaacagccaagtacaatgcccctgccctcctccctgctctccacctgtcaccagcccagtgttttccagggctccccagcagaaggcagatacattgttcttagcccttctcccttcttaaaatccaacatgtgcatggcaccacagagtccatgacctccgaccttccctcgagtgcctttccggttgctctccttctctaccacagccagaccctgcaagctgagaccctgtctcacccccaaactgcttctaccagctctccagtcaccaggggcatcttctgatcctctgaaggcctgttgtctctggcagctgtcactatttcctgctgtccagttatttccaccttctcctctcctgacctccaagatgcccttctcttgctccttaaactgtgccttctcttctccttcagctttctgggttgaatccttagatattgataggtcccacctccacctcttgtgggtctgtgttctgggtgtgacctctctgcagaggtcgacatccatacacgcatctgctgtccagatatatcctcttggacatccgttaggaatctcaaagtcaaatgaatggatagtttttaccctaaaccagccgatctcagtgaagggcacctgagccacagacctgggatcatgctgaatgccccacagccctcttcccttctgtgaagctgtcactccaatttcctgttgctctcttattattttgtttgagatcgaggtgtattccatccctgtcacctcagtctgcatttaagcctgtattattattttcttggcacctgtaccagtctcttaattggcctctcaccaccaacccccactacttgactagattccccatcctccaagtcatcctattcaactttaggctctccttgtgatttcctcctcctggagtactattttgtcccttctttttgtatccaagtccacatatccatctccctggtggattcgaactccccaggctatgaaagagttatttatcctcagcctttaggacagccatgctcactgtaggtgcagaggaatgctgctgaattgggcagaccccaaagtggggaagtgacctgccagatgcccgtgttccagtggtcagcaaagggaacttggctttcctgacttatgacatagacacttgtgctctactccccctcccacccccactgtttccacctcctcctctcaggtccagagggagaaaaggataattgttaattgctagactctgaagacaagtgaatattgcattgaaaacatgtaataagtcttttgccccattcagagagataaattaagactttccgaaatcttgaatcatgtgtagtttaaatgagataaagagaagagggaaggtgatgttaaatggaaagaatagcatatgcaaagtccctgtgggaagagggtgcaggataaagaagagaagcctagaggaagccgtggtccctggagcagagagtacaaggccagaggtttaaggggcgggagggagaggccaggccacagtgaggagaaccttgtaggcggcatgaatagttgtttttattctaataacgactggaagccactgaatgttttaagcaaggaagtgtcatgatcagatttgaactttgacgtgagcgcttgtcatgtcatggcttgaatgtggagaaggttgtggctaggggtcagagtagatgcagagatgagttagaaactgtcgcagtagtccagggtagaaggtatggtatcctgggctagggctattgcagtggagagggggaatagaagacagatttaaagcatccccaggaggcaaattcaataagactttgaatttgggggttgaggaagaggtgtcaatgattattcttgggtatctagcttgttcacctgttgtgtggcaaagaatgaaagagattggatgtccaatttggcgatgggagagggagatttaggaaggccgtgggtccatgtggggtatactaagtttgaagtgacttttgagacatccaaaaaatgtcagctgagtttttagatgcaaagatcgagagctcagaagggaagtgtggatgggagatataaatgtgtaaattacagcttcgaggtggtatcaaatgtgtggatatgaatgcagttttctaggaggagggtgcagaatgaggagataaagggggatggagctgatcttgatgaacagctacataacaggtagagaatatgcaaagagatagagaaggagcagccagagggggagaaggagatggggatagtggatcctcgcgaaagctagggtgggagagcgttgcatggtgaggaagttgtcaacagtcttgagtgctgctgagagttcaaacaaggtgattcctgaaaaatgctgagtttagctcacagtggttgaggtggctaaaatgagaatgttttgttggagtggtggggcaggaacacagattggaatgagctgattcctaaaattccttctacatttaatgttctatgattatgtgatgtggattcctgttagtgtttagataggaaaaatatgttacacacacacacacacacacacacacacacacacaccctatatttgtcttgatgtatatctatatttagaaacaacataactcaaatccaggattcctctttgaactaaatgtattttctgaagataccacaatttccccagatgcacaatgactcaccagaccatatgatttttttcaagctggaaaggttgatttcgttttccttaggatcatatatggaagaatgtttttgttccatggagtggtaagcccacaaaatcctttttttccatgatatttctggctggcagcttgcttgcttttccctccaagtttaacctgtgatctgtgaattatgttgaactaaacactcacctcgcagtgctgaaagtcaagccttctttgagatacacataaagtatcgggcagatgttttccccagtcttgtccagtgggcaaatctggagttttaacttatgaagatttggctggatctgctgacgaccaggaacagaattccactacatcctttaccacagtctggaaagtcatttagctctggtggattcccctccttcccctcctttcctttctcccctcccaacaagtctctagcctcctccaatctccacccctctaaggctttgtttccactgagagttattaatgaaaattcatggggcttctgaactacattttagtggagactgcttggaagtggggctctgagggccttgaatggcctcagggtcacaggagtgcaactgaagctaagctggcaatgtatgaccagcaaagtgacttccagcctctccctggcccctacctctcaggcacagccttctcagggacatttggcactagttaaagaggaaagctgcatgggtttctctactgaggtctgagagcaaaaggaaaaacgcactctgcctcttgttaattccatcattctgtttcctggctttcaagtgagccagaccacagtgatcagccttcctcgaactctcctgggctctgagtgtgccccttgctggtgctgccctcacgttccacagccggccctcaagcctgcaccttgctgaggctcttgctgcctgctggccattccacaatttcttagctcctagacaaaccattcttcctttctgtgcctcggtttccccatctgtaaaacgaggtggtctaactaggtcagtgattctccatggtgctctttacaaacatgtatgtccaaatgcaccccgccccatacacgtgacctaccaagtcagaaactctgtggttgatacctagaaatgagcattttcaaaaccctccctgcatttctgatgtcatcagtctaagcatccttgttcagaaaccaccatatgagatgacctggaaggccacttaaaaaaattcagagattcactgctgctggttttttaactactgcagtttaacagtggccagcagaagagaaaaggacacaatgtgaaatttttaagccagacatccatgagtcacctactctggggaaattttggagatagaattgttttgaactagatccagattggacataaattaggaaattagaatgaggaatggagtaggagttgtgggataatatattgcccttttttttttttccaggagagtctgaacaactctactccctaaaaggtttatttatccaaatggcatagatataaatttataaatctgaatatcctcaagcagcttaattaacttacatgagactcagtttcctcatcagtaaaatggagataataatgtctataagaattaagggaattaatatacttaaagacttaccacagtggctggcacatagcagatataaaaaaacgtgtgagttacttgaatgtatccagctaaaatcactatcaaattcgattaccttgggagtaggtctttctgatgctaaacaaagtcataatttttgggtagctttttaaaattcagagtcaggagacatattcaagataaaagagtccaatgtcatctcccctagttacagatttctctccacacatcctaggcatatggacacacagtctctgcttggatatgtccaaagacgaggagctcacttcctaacagggaaatatgtgtcattggtgcataggtcttagtttttaatagtttcttactccgtccccccccaaaaaaagtttcttactttgaatctaagtactcctttatgagacccttcaaggttgatcttgtgtgtgtgtgtgcatgtgagagagcgagagcaagagcgagagtgagcgagagcgagagtgagagcgagagcgagagagagagaaagagagagagtgaatatgatgggaaatgaggcagaaggggaggagaaaaaggaagaggaaattgaagcagcagcagctcaggaaaatcaccccgttcagcaggtgtagaccatggtgactgaggattctggcagtgatgcccccaggaagttggaggtgctgtcagtgctatggatgccatgaaggaaagctctcatagggagggaaaggatcagtaggcttgaaggtggccctccccttggaaatttgccaataagacaactgcaggaatcacaggcaggattgtctcaatttaaaaccaggctcttgaattctagtgtctatgtcttctcctgagacgctgtcacctatctttatttgcaaatgctctcaggggacagagaagagtctctaaaggtccccctccatcacactgacctctcctacctcttgtgattctcaggtgccatcatctgtgggttgctgagctcacccagtgtcctgctttgtaatgtcaaagactggatggatccctctgaagcctgggctaatgctacatgtcctggtgtgacatatgaccaggagagccaccaggtgatattgcgtcttggagaccaggagttcatcaagagtaagtctttgccatttgtccatattctttcaaaattactcttcacacgagcaaggccctctgctactttcttatgagccctccttgtggcctgaggagcttatacttctgaaaaaaaaaaaaaaactttaccaatcatactggatggaaacaaccctagcttttcagcagaactctatgggaagcatccatttagctcctcagattgcaggtggactgtgggcaggatggcccagcagggcaagtctgctgctctcaagaatcttggggttagctggcaattgatggatctcatctagtcttggttggcacatctgggccctgctctatgagtttctcatcctcctctggaggaacgtactcttctgtagatggcagaagcaggaaaaaggagaaataagcaaggcctctgttggtggagctcagatctgtcacgttaccatttctgcctcatcctattggataaagcaaatcccatggctaaacaagagacaaagggtgggaaatagactctactcctttagttggggggactgccaagtcatgtgcaaatagtatgactacaaagaaggatggaaaactggagcctgaaatgcaatctgtcccccaaactaatgcccatccaggcatattttccccctctatgagttaagaaattccaagtttaccaattgtactgcccactctagtgatgggtgcaggggaccatgggctccattgcatggactcaactaacagaaataaccactgggctttctctttcctcttctttctcttggaagctcttttctacaaacatataaacactatagtgaggctgcatctctgcgatcatctgccccagcctctcagtttccagagatgggcagttagtgcctgaggccccccagccagtggcatcaccttcacagccctgcactgcctctcccagcagacccccatcaggaaaaagtgaatgcccactctgtgctgggctagggactggccaaccatgtaccactgatgtgatcaggaaagacaggaccagcaccaccagcaccaccatcactggaagctggttagaaatgcagagtctcaggccacaccccagccctcagggtgggtcccaggaatctgtgttctaacaagtggtccagataatgcttatgtagcactgatggcttgaaagtttccttccatcactgagagtctgacttatgatgaagatggggccagctgttccttttgttcttccagctccagagtgaggttgaggggaagccctgctcctcgttgtctatttatctgccagaacctgaactgggaaagcacctccatgcttccactccaccttctgagttgagagcagtgaaggcatgtgcaggtgctgaccagatagactgagcacctgatgtgagagggtcagtgggattctttctgtgggaacccttgggtgcttatgttgctgcaggaagtggtctcccaaaggctggcagagactctctcctgcctcccagggaagcttctgagactcacacctttatatcctgcatttctcagggttccaatggcagagcattccatgtcacctcctccaagagccctccctgactacccacagggcttagtgcttcctcgactacagagcttcatggatgctctgcccattcctttgttaggcagtgcagtcagcagcgtgccgcaattgcgcatttgcctgtctgtggaaagtttgtctgtgatgttaaatcctagctttggacaccacttgtgtgacctggagtaggtgaatgaatgttttcaggcctaattgcctgtctatataatgacagtaataccagtacccatctcacggggttgggaggataaaaggagaggatataacaataaaaaaataaggataatagaaatgacttatgtagcacaccctctgaggcagccctgctctgaggccttgacctatactcacaagtcctcaacacagtgcttcaagggaggcactcttattatcattgtcccggtttgccagctgaagacactcaggcacatagcagttaggggacttccctaggtcttagagcttgtaaataagagggctgggatctgaaacccagcattctggctctctcactgcctttcttaaccacttctctgtatgggcccttgcagatcaagaactagcagagttcctgatctgtggtattgatattagatgatgttatcattattttttcaatttgtcattgttttctgtcatattttaaaaactgaattgtgtttcattaatttctggattaccaccattgagctatgctttataatgatggcatagaaaaagatatatatatctgtgagtgaatggtcaccaaattctgaaaataaaatatcacagaatttggtggaattccatgaagcacaaatagtttcttttggcgtcaataaaatcaaatcgcttatttatatgatgagtagtaaacatatggtattcattactccaagaggtagcacagggtgaatacaggcatttcaagaaagacatatgatatattcatggcagtaaatccagagtgaattgctcaacccagagcatgtgcttgatatgtgcccaagaaatgaggactgtgcccttgtctggcctcccagagtagcggttaccaaaagacttttgaaatgtttgtttttttcagtgccctatatgtgtgtgtgtattgtgggtgagggcaaggctttaagaagtgtgcactatgatagggatttcaggcagccttgatactccaaattggaggttgccctatacaaaggctgagtaggaggctacctccaactgaaggcaacagggcacagatatttcctcttcaaaataagaggtcagtcttttagtacgattaacccctggaggtgagagggagggagtgtaataatttaaattctaactacagcgtgaagaactgatagatacccttttctaacaacagatattgatggaggaaaagaggaggattctgggtacaggaacagttgcaggggagggcatggaatgatttgaaagaacatagggggtgctagggacaataaagacaaactccatctccactaaacttgactggggactggcctcttcatcccagtttaacaacgggatagatggttgtgaagacagactctggaatcaggccctggaatttgaattccagtgtgaatgtctcctcaatgtgtggcccttctaggctttggtattcccaattacacagtgaggatgatggtggactctgactctccaggtagttgagaggattaaagaagaatgtgtgtggagcagcagagtggtgctgagcacagcaggctagcggtggacactggagatacggcacaagggctgggagtgaaaatgcctgggattgagcctggcttttcccctagctctgtgaccttattcaagacatttgaccaccttcagcctcagggcctccatctgtgcaatgggcgcattcgttcacagattactgagtgaagtgctggcaggcttcccaggctgtcgaagaatgccttgttctctggtccctggctccctaacagcacacccaacagaggcacctatgggacttcgggtgcagacacctgctttcgttgatcaattcacgggtactatcaggctatggttcaacacatgatctgggtaatggggaattggcatttgtttttaaagcacaaatgaattgattgccaggtgtaggaaatcacaacccaaaagaacacaaattcaagtagtaaatatattaatatctgcactgtattatgcaaagcactttcacgtacaactcaatcgatcctttgggcactctggtgaggcagttggttatatcacaatttcactcatgagagtgaagtttggagctgtgacttgacacactttaagaaacaatctttgcattagtgccatggctggggctcaagccttcagcttaggagaccagtgctatcttgtggaagctctctacccactcctggctgccgccttctgcttccaccatcctatgtgcaatttactggaagtggaaagtgctttggagttctccttgttattgtgccagaaaaattaaggggtctccggtaactgagagtgtcactcctcagacatcactttggggccagctatgctccagatattgggtattaatgcctgctaatgggatattctacttcaagggttttacagggctgttgggagaagggaacagaagattcaggaaagctgtagggtcaactgtgagttgcagaggggagctgggagatgtgcaaacacctttggaggaggtgagtttgtggggagcccttccccaggctggagcagcccctgtgtttcctcctccctccctcatatcctgagcagctgctgggtagatgtgagggtgaggtgacctggccaagtccagatgcaaagatggggacagtggcttctgttcttaaggagctcacaggctagatggggtgagagatacagagattattaaatacagcaggcctcctgtttgcccaccttagtggactgacagggattgtaggaacacagaatgtctccttagcatatccttttctgtttggtaaaagcttcattcaggtcacttgccacacagaagttaggactgacttctaataccagcccccaacaaacaaacaattataccccaaacaactaatcccacgaaacacctggaggctatttttatctaatttggagacacagcaccttttgctgtgaggtttctctttcctgccatcagcaatgagtgatggctgagaatatgagattttgcttcacttggtaactgggttgacatgtgttctccagagagaaatccactcaggatctggatctcccaaatttccaatgagcatttctgagtgcattcaactatttgctgctggctgggtcaaccctcttatttgtcagaaaaacatcttagaaagctctggggctgcatatggctagtttttgacaaatcttgaagtgcaaatgaatggaaaaaaggcagattaaatgtcccctaatgccacacagatgtaaaatttgatagaaaaaaaaaaaagccttggcagaaatactactgggttcatcctgaatccaaaaggcttgatgttgagtgattgtgaggctttgcctgatgcctggtgttcactttataggggtctgttttatgtcagtgattgtcattatcttggggtgccaggacctcagtggagaaagttacagtacacctgtggtactcattgcaatcagacgcatctagatgagatggctgatgaatgcctaggaataggatgagtcgtttaaaaagggccctacagttattagttactgctgtcacaggttgtgcattgccatgtgcttagtgctatgtttgtgtcttagtttatagtttggattcccccagaatcaaccatgagacaaagattcaggagtgtcatttaaataggaaggacaaggaatatgaacagagtctcagggcaagtaacacagagaagacacaacagccaataaagggtggactctgaggccagttgtacttaattccctggatcagtgcaaaacacacttcagaatgaccccgccagctaggccaaggaacagggtgtgtacccagtggtgctgcagaggacttggctgacaattgcagggaggacagcagctcccaacccttccatcctgccactgtgccaagggcagctgtggctttcggcagctccctcagagccctgggcatagaacagcagttcatgttgcatacgtcatttccactcatcatctaagacctggagagaaatggcattttctccatttactgagggggagagtaaggcatagggactcaagggaacttcctcaaggttattcagctcaccagtagcacagcttgggtttcctttattccacgatcatatgatcattattcagatctgcttcactctgggaagtgggatgtagagatcctgatatctgcctcctgttaaggaagctcactgtctagcagaggggcaagggaaacacatggcctcctgaggcaagtgccactgtattggtacagctgagcaggccttggttcccctgaggctaggcaccatctgctgggaaggaccctgggagactccatccttatatcaatgcctccaggacctacagcagccattctgaacctacctaaccaacactggaggcccaggattgtcagctgattcttcataatggtcatctttggtggctggaggtctttccccccacaagtcactagtggattgtaatgaaagcaagtctccaaattctgccacacatccaagcagttattagcaaacaggcccagaaactgtcgcaacctgtcacctgttcagtggccccagtgaaggcccatcttgctatccttggcaccttgttggaaaggtttatttaagacagaaccaatactattctcacagctgaactcaactcaccttcttgtcaaaatcagatgaacaagaatccttcagatccgtgactgatcacagacccgttttgaatcaagccacggctctagggctattgggctcaggaatctgtcacaatctcttcctgccagcataggagtgacactgtgatacatttagccaagccatatgttttgaatgctatgaatctgaccaataaatatgtacctatttccagcgttcagtaggctaattaacaaaggccggtggtggtggtgttaactgggataaagagttgatgtatctgtgactgcttcctggagggcggggctcctggacagcagcttttccatgccatgtgaccactcctagagtgtgcttttccgtttaggatcctgtccagtttaatctgagggtgtggattaaaattgactgccgcagatgcagcgcatgatctcctcagaagttttctgaataaagaccacgtcacacccagcaatgctggagaatgggctctgtgcccagaccctcaagttctcagtgtgtttgtgctccttcagccttgatcacaggggcagcgaccctgattcaggggctggaggcctgtatgtgtagaagggatattctaactcagttattggggaagaaatgaaagtattttctaggcagtcaaaactgtgatcatttatcagggaagaggtggaatgatgcttgcttgcattctgtgtaccttcttattctattctattagggaaattttggggaatggagtaaagggtcagaagtctgtttagaaaaactaatttggggctaaccttctgatgcgtgggaaggcaatgttctgtgtttatttggtgggctctgtgtatcattcattgttttgttctccctccttcatttatccttgcatttatttatatactgaacaccagctctgtgccaagaattgtgctgggggagtgggtgatataaagaggggacttacagtgtatccaggaatctggacagtaactaccaggcatgaggggagagaaagagaagatctctgaatactgcaaactcagaggacgggggtgtgtgaccagctggagagctcagggaagcctttcaggaggcagtgatgcagaacctgattctgaaagaatgagtagaggtcaatcaagtgaaagagaacagggttctaggcagagagaaaaaggcatgcaacgacgcagaggcctgacagcaagcattcagtgtgactcgggaggtgggcactttggagacagattagggcatgaggctgctcagctgtcatgagccagattgcaaggaactgaattctgacatccttgtagctcctgcaggaccaaaggtaggtttgtctttcaggatgagtacctgggggctatgtggctgagggatgggaaggggccaaggtcaaagcctgggtggggattagctaaacctaatggagttaggagttgtggtaaggcttgagctgagaggaagggtttggaggagaggaaggattaaagaacagtttagggactagtctgaatgcatgtggagactgatggagaaggagtcaaggacgacccaagaggaagatggtcctattaactgatttagaaagcaggaggaagtgagtttgggtgtagggatgggaatgagagatgaggaagataagagaaagaagggaaacattctttcttttacccagtattctctatgtattcctatggagacttggcaatcatattaacaatgaagaccaccaaggggttataactttccttgtggtgattgacaaaggtgcttcccaggacacaataatctctgtaggtgctggtcaggtgactttctggacctacaaaggtgctctacatacatgtgctgaatttagttgaattccattggattaaattgtgttgaaacaggcaaaaaccaaggatgaacttaagacagcatatttcccaggctggcagacccagggctctgttgccttgagatggacagagtgtataaggtgtcagcttcctatcacagttcagtacattctgggccaaaaatacagtcccaaactgatgtgcacctgcgggaagcacccatttgtctttgagtggtgaaaagcatctataatttttgacattatgtaaaacaggacacacacaccgacagaaataagagtctcagagagagtgaaatactcaccaccaattcaccgcaagtcagacactgagactgctgagaggtaaagaccttcctcttgacatttcctaaggattacggctcttaggaaggggcaggcgtggggatgtgactgaatttgtatttgtattgagggactgtaacccaaattccccagtgatttcatggtaaactacacacacacacacacacacacacacacacacacacacacacgtatgtatatattatttttccatacgttactggggtaaggtggtgtttggttacatgagtaagttctttagtggtgatttgtgagattttggtgcacccatcatctgaacagtgtccactgcaccctatttgtagtcatttatcccttgttcccgtctcacccttccctccaagtccccaaagtccattgtattattcttatgcccttgcatcctcatagcttagctcccacatatcagtgagaacatctgatgtttggtttttcatccctgagttacttcacttagaataatagtctccagtctcatccaggtcgctgcaaatatatttcatggtaaactgcttcttaatggggtcattggcttcagccttagacttgagagcaatacaatactctagagataaatgttgtttctttaagttttacaggttaaataagaattataatgcatgaccaaaagtatgttaaaaaccttattcactttacatctgtattacctatatgagtatataggttatatctatagctctctctatatgtatctacatatggcatatctatctatctatctgtctatctatctatctatctatctatctatctatctttaaagaatcagtatatcaatagatttgggtatacaaagatttaaggctgggcacggtggctcacacctgtaatcccagcactttgggaggccaaggtaggtggatcacgaggtcaggagttcaagaccatcctggccaacatggtgaaaccctgtctctactaaaaatacaaaaattagccaggtgtggtggtgggcgcctgtaatcccagctacttgggaggctgaggcaggagaattgcttgaacctgggaggcagaagttgcagtgagccgagatcgtgctgctgcaccaggcaacagagcaagactttgtctcaaaaaaaaaaagtttcaaaaaaattatctgatttcccttgtgacaaagtctaaaaccccatagcctgagctttgaaataagcaaatgatgatatcatgaggagagagtgaaaacggaacacaaactgagcaggtgcgcaaccactggttctgtgttgttgcagtaggagtatatggtgaggtctcctctgcagtgtggaggacaaggaggacaaatccagtaattgcagagatccaagtctacatctctcagatgccataggtgttcacttgcgcaaattgttataaataacttttaccttctaaagaaggctatgacagaattttgagtagatcctttagagaaacatctcaatattgcacagtctgagaagttctagcaccattgtttattcccatttcagaagtaaaatcaaatgaaagtgcaactcagtctttttgtctcacctttgtgtcctagaacatggtagccccggggagacttgtcactttgagagccgttttccagagagttcagttcacacctctttaaacacaaacacctttaacatttttgccatgtcagatggacagaattctgaagtacagccatgcacctcaaaaagacactttgaccaatgaaagaccatgtatgtaatggtggtcccataagattaaatggagaataagattataagattaatgcataagattataatggataataatagaaacctgatacatagcacttgatactgacatttcagatcaagtaggggaaatgattaagattcattaatgatgctgggactttttttgtatgaaaaatatatgtaaataaaagtatatagagcgtctaggcttatgtaagtacgccctatgatcacacaacaacaaaattgcatttctcagaacatattctggttggtaagagatgcatggctgtatattatcctctccttagtgtggtgattaggaaggagtatgggatttgaagccaaatagatggggtttgaattcttgcattaacctttcttgactttgattcctttatctggaaatcagggaccttactttatatcatgcctgtgagttttaaattgggtaatataaggaaggtttttgtgcaagcttgtccagtccaccttttgttgttgttgttctgttttgttttgttttaggtttttagtattctgaaaccatggtttttagtttctgtctttagtgataagcagaaaagagtgatgaggaaggggatttactggcccaaccagaaacagaaactaggaacccatgactgtattctctcccttagacactgctgctagtgttggataaatggtaataactgtttatcaataactagctcttcattaggacaaatacctaatgcatgcagggcttaaaacctggatgacaggttggtaggcgcagcacaccaccatggcacacgtatacctatgtaacaaaccagcacaaagttttgcatgtgtatcctggaacttaaagtaaaataaaataaaaatttaaataaaggtataaaaagactagctcctaataataattaaaaacaaaatttgatcatatctcgatgtcccaggctgtcagccagccctctcctgtagcatggggcttatttgcctccagactctgctatctgggctatttccctcaccttccatgtcacagggaatttgaaaggaactgaagactgagcaggggcaaaagaggcagcactgaccatcaggaaatggtgtggcaagcctagtgtcatccagagtgggatccaggggagaacagtttgccagaaaggaaaatcggataatattattaatcggttgagttgtggcagccgccaacaagtggctgcctatcaaatgttgaagactgcagaggatagtttatacacagtattcccattctcaaaatcgctgtccacatttaccaatgaggcaagagtctctgaggagttaagtgatgtgggaaactcacacagccctcgagtgtcccaggaggtttactttcttcaagccaatctccagttctttaagtgactctcccgagtcataggttcacaacccctcatggaagtagtccctttggtgccctgagtatgacacccatgtctgaccagctctggttttgtactagggagctggaatagagctgcaagaagcttctgggttacatcttacgtgggaaacagagttttcaggcctaggaagagcctgtgtcaagggagatggggctattgcagtaatggtgggtacccagtgacagcacactcaagctcataaaaataaacatcttcctttgcaggtctgacacccttagaaggaactcaagacacctttaccaattttcagcaggtttatctctggaaaggtgagctccgtggtggaagagggggttagcaggacgctgattacatgagattgtctggcaccacctctcattcacagggcactctatttctgtagaggaataggtagagagtcactttccaaatgcatactttctgtggaatagaagggctccaactcatcagataagatgccaaagtctaaaacaaaaatgaatactgtggaaacccaagaagggatggatagaggaagcactaggttcccgcgagataaagcttgctgaccacaagacacccttgttcctaggaggggagttcagggccattgcaaagcacaggaggcatttgtccaagtggactcagccccatgtgcctttcaccctgaggcccagggactggggacaggaccccaggcaggtagtgccctgatctcctgctcagagataatgctactctgggtgtgtgggacagagtgtgggaaaaatggagagtctgacaacatgtatgcttggcacttcccttctgtttctttgtcctccttcacgttttctgaatgttgaccaagtgcctactcagacccagggaaaatgaaaggcatttaggggagagacgagaggcacagccctgactattgaagggttccggcctcaggagggagcagatagagcagtggcccatcacaggtcatggccatatgtgctgggtgagaggcatgagaaaaagcctctgaccccatattacttccttcctgttcccctaatctgtcctcgctgatcttcagtgtcccaagagaggattggcgacttgcttctacatgctgataaactgaaagagcaggaaggcacagacttggaatgatgggatgtgaatcctgttcctatcaatccccattcatgtgcctgggagcccatggaccagcccctcatgcctagattccccatgggtaacgtgcgatacagacgccactggcctcagaattgcctgagcaataatacatcaatgcacaaaacaatgctgtggatatcatacatgctgagtaatgttggtgggggtggtggtgatgaagtgaagaaggaaggcagaagaggaggaggaggaagaggagaaaaggagggggaggagaaaatgaaaaggaaggtgtttaccatcattttcattttaaagagataaaatgagattatgtacttcttttctcatttaattatacccataatgtaggcctaaagagggggtgatattttattcattttccaggcaaggaaaatgagacttggagaggatacgtgaaatgcccatggtatgcctgggaggtcctggggttgaaaccagacactggtaggagatcccaagtccagtacttcctagttatcagaaatttctgataaagtgttagctgatgaaaaatgagggacttacatttctccaggacatttgccgcactacagagaagtgccttaaggcctgcctgatacctgcactgccacaggctcactcgctttcatggaagacctgttcctgacttgaacatttagttaaattgttaaaatttctaattcatttactggccacttgagtggtctgggataaattattttgcctctttaagtctcagttttctcaagagtaaaatggaaatcttgttccctacctacacagggagttataaacagcaatatttatgagcatattttgttaactcgaaagggctttgcgtatgttaataatttcaatatcacagataatgatgttctatcactgagaggttggatgatgttccatataaaaaagagtgcagatccatgtcagggcatctgttgcagatcttctctaagtcacctggctttagggcctgatttttctcacattgctactaccattttgttgaccagtggagtactacccattctccccaacattgcaacaactcttttttttcctcctagattctgacatggggtctcggcctgagtctatgggatgtagaaaagacacagtgccaaggccagcatctccaacagaagcaggtactgacccccaaaccttcttacacacttgggtgtctgaatgcagagactaaatgggtgcaccaagagtttaatcaatgaacggacgtattgacatcactctattctgtatccatggactctcctttaatcttttaacccaattatccagctcataaatatgggaagctcctcagatgggcaattgtcacagaaagtaaggcaaaatcactgcaaattcataagtgttactggaaatgaagacaaccataataataaaacctgaaaaaagaaacaaagagcaaggttcacctgactgtggccaatgggcttcacttatgtcagccctgaaaagtataaacaaagtgtaaatattctgaaattgtttcatgaatgacatgtctgtgagaatcttttgcatgtcatggcatacagtgaaagctgtgattccaaacatgaataggaacagtacgtatgtactgtctggacttctctacctccagagtctgtgattattattactgaggtggagctgaaactcagagagagagggagatcagctgctcaatatgggctcagcaaggaccaggagacaagacatctgcatgtggtctgcagtgtgtgtgtgtgtgtgtgtgtgtgtgtgtgtatttgcatgcatggacgcactgtaggaataggagtaggagcagaaggaaagaaggaaggagaagggaataagaagagggagagccagatcagactgctggcacaggaaggcagcatggtacaggggaaaaaaacgtcatgctacagagcagatactagagctcgaaccatgtttctgccactgactacatgccttagtgcacggccatgggtaatttgcttccctgctaagatccctggattcatgtgtaaaagaatcttgtctacctcttatcccgttagatagcaaccacttggcacagtgcctggtacttaacacatgcctaaaaaatgcccagcaccctgccctcccctgcttgatcaggcgttgtgtttgtgatcctcaacctcggcagtgcctttgaggggcagccacacagcttgtgataatgtaaatgtgtgtgagttagtggcacttgagaaggttctgtcaaatccatcatcacacactactttagggctactttagggcagcatctgcaaaactctcacatgattcacacaagatgctccccctgccccctgctttcttccctctcccctagaaggggagcttggcccccactggagaccttgcggggagtcagggtgaatagacaaggctcagctcagttttccctttctcagttgattgcattcctgggctcaagtagataaagtgcctggagaaaaaaatcacattgagtccaggccgagtggcatctccacgtgggctcgtttactcagacggtgcttctcagggtccatgagaatggcctctctgattcagaggacagtgaggaatcttcccctttgtgtatcaggttactcccatcagtctgaatgtttgagacaaacccaggaagccaacgagagtgattggtctcattgcttttaaggagggcacatagttttaagagaaataggaaatggcttaatctaatacggcacgtaaaccaggtataagatgaagtggctacagtattcattctttcatccaaccagacatttttgagcacatgtggctgtggccttggacattcacaggctagtgagaattccatgtgccagccactgcatgacagtgtggcaagggatgcaatgtggacaggtgtcggttgcagtgagaatgcaggagaaggaatgctagcagcctgcaggggccaggaaaggtttctcggaggaggccagaaggatctgccagatgctcccaggtatacctgagaaaaggtgttccaggtaaggggaacacctgtgccaaggctctgagagcaggtgtgccttcagtcctgctgccttgtttctcttctctttctgctttcttgaggggcaatctgtgatttccctgagctcctactttgtgccaggcatggttcaatggggagacccacatggggactggccattatacaatcatgtgagatgaaggctggggaggcaatatgatctctgaggtctctgtcctcttgtgccaggcatggttcagtgaggaaacaggcttgggaactggccatcatacaatcacatgagatgcaggctgggatggtgacatggtctctggtgtctctgccagcactaaacttctgacctttccaagtactcataaagcctttaccttgtccagtggttctttctagtgaagaagctcagtctccttgagcctgctttatgaagtgtggaaaatggctgctgacaagcactacaaggaaagtgcagggcccaagtccacagcaaagtggaggtatatatgggatgtagtgccccttatacagagccctgaatgaatggacattgcaaacattccccagctcatctccctgatctgcatcttgccatcgttgtacatccccctggaagacagagccctccaaggttacagagctatccccactgggcctgggtgttggggtccttggccctatagaacctctttatagagtcacaggacatcagagccagagggatcaaagctgatcctcaaagcacaagctgcactagctgggtggtggaggaaggtgtaatggagcttgagccaacagagggaagagcatgagcaattgcatggggactgcaaacagtgtggtgatgagctagagttagcagggctgttgtgttgctgaagtgcaaatcaagacaatccgagttgaggctgaaaatgcaagtagagcccagattaagaaaagaatctggacttattttctgtaggcagtggagactccaggaagagctgggatcatggcatgtaaatacctgaagacagagtcagggaatggttgagctaaaactttcaagtttgggttaagtggagctgaaagctgactttgtagatgaagactaccattttggagagaggctggacttccatgtggcttcagaagacaaaaagaggatcagtggttcaaagttacaaaaagaggacttgactatacaacttcctaatgatggagtgggctgctgtggttagcacaatgatgtcatgtggagctatagaggcattagacagaagtctccaggggaaaacttctgcattaggtgaaaaggtggaccagataacttccaaggctttatccaaacccagagtctaagattttgccatcccataatttttaggacttcctggggccttctgaactattcctgtctgacccaactcccagctctactgacttcaatcctgctctggtttcacacagcataaaaatgtctctgtctctatctctgacactttctctctctgtctctctctctgtgtgtgtgtgtgtgtgtgtttctttcttgtgtttttctcatattcactagagttaaaggtgcaggaagttgactccctgcttctttttcaggtttgacaacagaacttttctcccctgtggacctcaaccaggtcattgtcaatggaaatcaatcactatccagccagaagcactggcttttcaagcacctgttttcagcccagcaggcaaacctatggtgcctttctcgtaagtatccttagaactcattcttcttcttccagacactgtagtcaggcatcacaggccaagtctggcaactcctgagacacagataaggccaaattttgtgtcataactcatggatcactgtggatgatataaaagaaagatagcacataacccatatcttcaagaaggttacagtgtagttaatctctactctgcttccataacctatcttcatccacctgtctctccatctatccgtccattcacccatccatccatccatccatctacccatccatcccattcatccatccatctacccatttatccatcccatccatccttccatcccatccacccatccatccatccatccatccatccatcccattcatccgtccatctttgcatcccatccatccatccattcgatccatccatccatccatccatccatccatccatccatccatccacccatccaaccatccatccatccatgtatccatgtatccatcccatccaaccatccatccatccatccatccatccatccatccatccatccatctatccatccatccatttggcagttattaagtatgcattatgttcaaagctttgtgtttgattttggagaagaaagagaacacccaaaatgaatcaaatcaaccatgttccttgcccttggggagctcatatataccaggggcacaggctgacttgggcacaggtgcagggagaccattcacaaagttcacagtttttacagtcctgtgacctctggtctgcagatcctgacttcctctgagatggccatgggtagatccaatgcaatgttactcttttgcctcttgtattgctgagtttgaggtttgtcccttatgccttcaactctgcctttattcaggagcacacggccccctccccagctagcagaaccccagcgtttttgcatgggccttccagactggatgatcatgacagtctcaggcctctgccctaactaggagggatctctaccaggcatttccccacccagagaatcctgtagagattattctcccctgtagaccccacaaaaactaaaatcacactactctcttgcctgtaggttgtgtgcaggagcactctttctgtcagctcgcagagataacagagagtgcatccttgtacttcacctgcaccctctacccagaggcacaggtgtgtgatgacatcatggagtccaatgcccagggctgcagactgatcctgcctcagatgccaaaggccctgttccggaagaaaggtgagcacttggagagatctgcataaactgtatttccaatgttctgctggctctgtggttttagaaagatccacattagtttcttatttaaaaaacattttctttatacttttattggtttcaagaagatgggaacatggatccaaactttcacggttagaatcaataaactactacgtaattgtctcagtttaaacaaaaaatatgaaaaagggttatttgggggcagtatttcaatgcagaagtgggctttaaaaaaataaaacccaaaatgtttattcacacttaaaactaatttattcttcttttaaaagtaaagttattcatgttccttgtagagatgtgaagccatttagaactgcatcaatttgacaatagaaaataatcctctcctaagacagccacctttaatacatgcatcagaatcccatttggctgtatattacaaggaatgtcagcaacagtgactttaacaagatagaaggtgattttctctcccaggccattaatgatgccatatttttggagattttttttaaccccatacagtctgttttctccagatgttgtcacctttcatttactgttctatcttctctgttggatgtctttctcagatgtccagtgacccttatttttccactcgaatgtcaaaggggtccacaagctgactgggcagccccaaatgtgtggtgggaacttgttgactctaggtttctttgagggataatcctgttgggttgccctttggggaattcctcatgccagtatttttaggttcctccttcagaggagtttctcaacacctggccttggggcacgaacctggctcctggtggtttgggcaccaaataaatctggaaaatgtcggggggacacctcaatattcattatgcaggctgacttgaaagaatctcctactttctgtgaagtgctcatgccatggtttgtatctgatgcacccaagagatcctctcttctgtcgtcctgagagaacgaaccttctatcttcttccgtggtggggagagggctgttgtcagctgcggagaggagaggagagcatctagaggccaaatagcttcttaaagaaattccagccagtacttctgtttgggccaccttcacccccagggctgccatacttaaaccttgtgggattccagagggcagatggcgttgcttctttgttctttccacagaaaagttgagtagttttcttggtctgttaggcctatttttatttctccatatgctttctagcttccaacattttgttgctgtgtctccacttttttaaaaaaaatctttgtccctgtggacttgccatcattttagtgagatttgagttaggaaatgaggtttaatatgaatttaatatgtcatctttaattggaaactttcagtctgtattttactcatttgtcctcatattttcatgactacagcaaatctctaagtaatgtattttctttcttcctctatgaagttatactggaagataaagtgaagaacttttacactcgcctgccgttccaaaaactgatggggatatccattagaaataaagtgcccatgtctgaaaaatctatttctaatgggtaagctacttgtgtctcacccctaatgtttattatgaataatacttcctcaaagaagatgacacaatcacagctaaaaacagaagcatacccagcactttgggaggccgagctgggctgatcacgaggtcaagagatcaagactatcctgaccaacatggtgaagccccgtctctactaaaaatacaaaaattagctgggcatggtggcggcacatgctagtagtcccagttactcaggaggctgaggcagaagaattgcttgaactcaggaggtggaggttgcagtgagctgagattgcgccactgcactccagcctagcaacagagcgagactctgtcaaaaaaaaaaaaaaaaaaaaaaagcacaaaaaactataaaatccaaagctaagggggtaaaagataataaggaggtaaccatatctgaaaacctcagctaaggtaagttactgatagtaaacacaacatttagccttgaactactcgctggatgatgaaagagccaccgagcattatttaatataaattatcaagtatggtactaaatttgattgtcaaaacctcacattgcagtgctcagaatctggagagcaagtggaaattttaacagactcatatacatataaataatttttattttttatttttaaaatttattttatgattgatttatttgcttagtcattatttagttgttttaattgaagatgatgtctctcctagtattgtctgtggatcttacccattagaatcacccggagagctgaatgtgaattctaatgggtgagatccacagatctgtattcttgggtcctatttataaactgcatccttgggtcctatttcaaacctgctgaatcagcatttcctgggatggagttcaagaatctgacctttaaggaagcttcccctggtgattcttttatacttaaaaattcaagtgtcatccattcatgaaccattgatctatgaagtgctcttgagttatgactgaatcatgttgctggtgcttaagatctacttttgaaaatgggggtaaaaagatgaggcaggctagtctgtcttgagattcagctggacaccactgtgctgatgggagtggtggatgaaaaggagggttggaaccagggatcagcctgaccgcggagctgtgatgggaactaggggagtagattgtgcgtctggactcaggaaaatgtagttggctgggaaaatccatggtccagactggatcttagaaatgagcttccaagataggaaaaggaagcagtaagtggacaggttagcagagaactaggagatggaaaagcagagaggtgacttgcaggcatcagggcacagatgctgccaacattggagatgctgcccagcaggtaaaagcatcaccgctgggatgtggcttgggttcagggaaggagaatggcaatacgaggcaggatcccctcaccaagaaggggctaagtgtttgagaaagctctcaggagtcacgaatgagtggtcagactggagcagagtggtcggggcaggggaaacttggaattgaccccagaaacattggtttggagccattaagtccctcctgccatgaatagccctagaagctgagggtggggcttagttattgagtggataagaaggtcagtcttgagagagcctggctgggtgggctgacccagtaaaccgaaatgcattggtagagagtgattatccacgttgtacactgagtaagaggggaagtgaaggggagcacaggctcggctctggctgcttacacaggcccttggctgggtcaccctgactgtaagcctatggactctcctctttctagaaatgccttccctgttatttctttattttcccagtgtccaaagctgagaccttctgcttacctgaaaggattgaaagagtacattctggatcctgggttagcttggttggagcctggcacataataggcacagaatatatgcatgatgaatgaatgggtgaataaatgattaatggcaggacagtattcctgagaggagtagaattttgttttcagaaagaacctcaaagctaagaatccactcatgcatattgaccaaagcacccccagtttaagtagggggtaaaaaaataagctagttccccaaagcaagaatgactaccatcagcccacccagtaggtcctgggtcaccagtgaaaaccttcaggcctgctctttctcttcctatgccaggttctttgaatgtgaacgacggtgcgatgcggacccatgctgcactggctttggatttctaaatgtttcccagttaaaaggtaataatggtaacaacttcctctcccctgcgcacagtactctgcagtttagaaaacacattcacatctatgcttttacaaatcctcagcatctcctatcctcgttcacagataaggaaatgggggcttggagagggcaactggctaataaatgtggtagctgagacatggctcctagtccagtgatcatcactttacatgtgcagttctacctggccaaacttccttccttctactcttggcttggatatcttttgttcatctttcaacacttaggccaagcagcttggcgaactttggatccatttgcatgatgtgtacttaatgcttggttgattcccttactagtgtgtgattctggaaaagtcacttaatctccctgagcctctgtttcctcctcatctgtatatagggctaccaaagctaccttcctcgtaaggttatgtgaggaccaagtgaagtgataccaacagagacctagcacagccctaagcacatgttaggtgcttgataagtagctctatccctttgctcttagatcagaggctccttgagttcaggtaccaggtttttcagcagtggctgagatagtatctgaaatatagtggtgtatcccaaatgtctgctgaacaatgtacttgcagaatttttctcatttattagactcttccattgtactcagtttcctgattgtggttttttgttttttttttttccaccccaggaggagaggtgacatgtctcactctgaacagcttgggaattcagatgtgcagtgaggagaatggaggagcctggcgcattttggactgtggctctcctgacattgaagtccacacctatcccttcggatggtaccagaagcccagtaagtacccttctcatgacagctatatggacgtctttagttaactatttcccagccatgcattaggacaatattcttggattggtgagtagattaatgaagactcattgggttcaagcaacagaaatagattctgtttaacttaagcagacaagaaacttattgaaagtttgctcattgactcaaaggaaggatgagcaactaggtctcagtaaagacggaaatggaccatttccatggatgtatgtaacaagaacaaataggcaacttcttcagtgtgccatgatcatcattaatctgctccatagggtttagtggttatattcaacctttaaattcaaggaggagagtttggtcccacctgggcttagtcagcacgctgccagagggagagtgggacagcttgacggtcctaacaagatggtatgcactaggatagggggtgttcctcaaacagtagtgaaggcactgttgctggacaggcaaaatcaatagatatagactctggcacatttccttggttttcttaccttgacaatcaagacaatgtaccacatggtagtcccatggaggaaaacggggacaaccaatgtgtatttgacaatgcatatagagttaggacttcagggccaaggcagcattgacccaacatgggtccttaaagtatgattctgattatatctatgtggcacgttttaggagctcaatttgaaattgatgaaggaatgaatggcatttacagtgtggcataagagctcctggactcagataaggagacattaggtttgttccaactctgccatctacttactatgggtttgtctttcggaaagtcacaccacttcctcagtttttccattggtgaaaacagcgaatgagactcactatgattctgtcaccgcttacatcacatgtgtttatggtatggatagatttggggaatagtgggcagccacatggaaactagacatcttcatcctgtgtcccagaagcaaattcacaaagatgtcccagatccaaaaagatggaacaccctgtgttcaactaggaggagtcaaattagagagaggctgagcagaggtttagtatttccaacttctcccactagtggcttccttattagtttcagagtaaatatatggggaattctggctcttacttagcacttgccctagaaaatagagccatggactgtctgatctggaaatgtggaaggggtcttcgagatccctacatttgaccattccttttttttttttttttttttttgaggcggagttttgctcttgtcacccgggctggagtgcaatggcgcgatctcagctcactgcaacctccacctcctgggttcaagcaattctcctgcctcagcctcccaagtagctgggattacaggcccccaccaccatgcccagctaatttttgtattttcagtagagatgggatttcaccatgttagccagggtggccttgaactcctgacctcaggtgatccacccgcctcggcctcccaaagtgctgggattacaggcgtgagccaccgcacccagccacattctttatttcacccaatataaccctttgtccaaagtaggcaaagagagaagaaattacattcttcacgtccctgccgtttcagaccatgatggatttacgtgggttataccatttaatactcataatactcctgcagagtaggtattgttttttccattttaaggtgagaagactgcagcgtagaaagttgaattgcttgacccaaaccacacggctggtaggaaacagaggcaggcttcaggcccagacctgatgaccccaaacttattctccttccctttacgatgttgcctcctggcaggtctttcacatcccaaaaatgactagacaggaaaatgtctagatacctttcctgactgaccttcccccaactcaattgattaacaagaaattgactaacagattaaaaagaataaatactgataaactaacaaatcaaaccagttggtggtttggtgccttgttccatagccatatccaacatgaaagatccagatgcagctcccaggcagtatctggtgctcggcccttgctcatgagcctacccattccctgtgtgtgcctcaacttcatggaagatgtttctggagttaattattaccagtttgaatggaatcttcctgctggtgtccaccttcagcatcctgtgatttgatctgaattgactctattggctttttattttattttaacatctgaaattattttaagaaaaacatcaggattgtataatgaaatatcctcagtgggtttctattaaaggaataatgttccatatataacagtttccctgctttaactcatagaggaagggagaaaatacctgcccaggtctttgaccccaaaggagacccagtgccagcactaggtatttgggagacttcagaactgagctctcacctctcacttcccccttgccccatctgtcctcttacctccttacctcaccaaagtcttaaaaatgtcattttccatcttcatattactcatggaagaatcgggtaaaaagaagcttaagaagtaattcatttgttcagaagtaatgagaatcagaccagagtgttacaacatcttgacaggagttggcaggggaaggaatcaaggtactcattgtcccaactcattccatctgttctttttcttttcatctgactgcatagatcattaactttttccagcatatattctgtggggtcagtctggggactcgactcaggagttttgaccagaaacttagagcagggaattaaacattcacagaggggttcttattcaaccaacattgactgagcgttaatcatacctgggggtcctctggcattaccaatataacctctatgtattgggctcatactgtgtgcctggctggattccaaacactttgcatgcactatctcacttaattttcacacccatgtatcatgaggaagtagaggctcagagaggttgtcacttactcaaggtcaccagaaagtaaatcagagttagaatctggacacaagtctttctgaccctaaatcactatgttgtgtgattgaaggtgaaaaagccatgatttctgttttgcagtcactcacagtctaagaaggagttaaagattataaataaatacaacattcttgtgctgggtctctcttactataagtttttcaactttactgagtgtctgttttcagttatatactgtactgggcactgtggaaagtgagattaataagatatattcattttccttagacacagtgtagtgaggaaaatatgaggaaatatgattaaatatagcagaagaaatgaaatactagaacacttatcagtaaagtgtcacggaaacatgggagaaagaaattgtgcttgggaggtgtcttagtccgttttgtgctgctataacagaataccacagactaggtaatttataataaacagaaatgtattggctctcagttctggagactggagagtcaaatatcaaggagccagcatctgtcaaaggccttcttgctgcatcattccatggggaaaggtagaagagcaaagaaaagaaaggggaccaaacttgccattttataatggcattagtcccacccatgagggctctgcctcataaaggtttcacctctcattactgttgcaatggcaatttaatttcaacatgagttttggaggggacaaacgatgaaaccatagaggaggtgtggaagcctgttgctggaaggttcctatgggccctctttttggcctaaggcccagctcctgcaatctcctctccccaagcaggtggtctttcacactgtgcactgcctgcttgcagtgtctgggtgcctggggagagaaagaaaaagtgctacaatgtcatcagactctcattcttccatccatggcccctgaacagaaaacaccatgggatgcacatggcttatgggcattctggtgtgagtggctccgtggttctcatttcagaacagaaggaggaggactggctgtcacaaggttgtgttgacatggtgtgatttgactctccagcagagcaggacagggttctttctcccttaagttgtcttcatcaaacagaagtgggtggtgggataagtcttaagactttgtggattatttcctcctaagacctagtttgagaagggtaaccttacttaaggagactggtttaataaattacagtattctcacaggtgggccatgtggaccagtaagaaaccatcttttgatttatgatatagtttgagccaaaacacacttattagctgagttctgaacattagtacattggattctattttctctagtaaacaaaaccacaccagtatactgatgtaaaatcccagcactgaagctgacattgtcattacttttctccccactcttagctttgtattaggtaattgcatacataatagtaggaagtagcctctatgggactaggaaagtctgcctagagacaggaatctctgggcctgagccttgcaggatggataggatcctctccttcacctctctgtcagcactggcacatgagacaaacatttttaccaaggatttgatgaatattttcaataatagattttggccttgcttcaagtccatggtttggtcatttagtatagtgacatctatactgagtgatgactatgagcccattaacactatgtattagtccattttcatgctgctgataaagacatactgataaagactggttaatttacaaaagaaagaggtttaactggacttacggttccacatgactgaggaagcctcacaatcgtgacggaaggcaagcagaagcaagtcacatcttacatgaatggcagcaggcgaagagagaaattgtgcagggaaactcccatttttaaaaccatcagatcttgtgagacccattcgctatcacgagaatagcacgggaaagacccactcccatgattcaatcatctcccaccaggtccctcccacaacacatgggaatcatgggagctacaagatgagatttgggtggggacacagagccaaaccatatcacactaggtcccctgtttctgaggaattgccactaggatcaattaggaattgagatttattgagttcctactatatgccaaacaccttggaagcacagagggtagaagtccctgcccacaaagggttgacagtctggctaaggagacagatgttaaagaaaacaaacctttcttaagcattactgtatgtcagactgtgttcatccattttgcattgctataaaggagtatccaagactgggtaatttataaagaaaagaggttgatttggctcatggttctgcaggctgtgcaagcatggcaccagcatctgcccagcttctggagaagcctcaggaagcttttactcatggcacaaggtgcaggggaagcagacctgtcacatgatgacagtgagagaaagagagagggaacaagagaggaggtgccagtctcttttaaacactacttcttgtgtgaactcatagagcgagaattcactcattactgcgaggacagtaccaagccattcatgatggatccatccccatgacccaaacacctcccaccaggatcacctccaacactggaggtcacatttcaacatgagatttggaggggacacacctccaaaccatgtcacagacactactctaaaggcattccttgtatcaactcacacccctctgggaggagggtgctgttctcctccccagcctcagagaattacaccgtgatgtggcttgtattactgtagtggaatcccaggggagaggtagggtgttgggggtgcttcttcagagcatgagagaggaacaggaaattctgttctgcaagggattatacaaaagtgactctgggggaaagctggatatagagaaagggaagtggggtgaaggagcagtggccactgactagccataggcagtaggtagagaggaggtagcatgtccctgcccttacagatctcacagcctcagaggcagagacctgcacacatggacaattgaaacataaccttcttagagggctgtggtcacagatcaaaggatggagcagagtctcctagcattcagaaagagaaaagcacagacctagtgcagcagagcaccaaaaggagagtccaaagagcctgcagccatgggccttctgattctgctatgagcagagttcagaagtgagcagaaagttccatgcatcttagcatagaattgcagagtctcaggctaagcaatgtgaatgcaaatgagactgtttgcagccccttcctggcagtagagccagagaggaactgttctaagcctccagaggacaagggtataagtgctgaggggaggagggggtggtgcgtggaataaggggctgctctgtggttaagcagtaccccagagcccagggcttcctggaaggggtgggcctctgtggcattggtactctctgttctttgaagagaactagggctgcccatcttatctgcagctgtgcattgtctgcaagtggggcaagatctgtttacaaagtcaaatgtgacttctagaaaagagagttgaagcctcacagttcctgtcttctgctaagcaaatgtttttggaccctcttgcaattctagatgtaagaatctggaaaggaaatgacaagctcttctaattatgtgtctctgcaacccacatagaaacttccatatgtaggtagcaatttactgtagaatctattctttatcatcattcacatcctatgaacagcttcttaaccttttactaagcataaagtctgctgctggcactaggctagcatttggcatgcagtatctcatttaattccctaacaatctcatgaggtagggcctactgttaccccatgcagtgctgtgctggcaaatatgttacaactgatgaagtgggagtaagagctattttttactcacaacatttctgataccacatctgtcaggttttttgcccccacaccaaccaattcttcaaccctctgttccagtgattcaattcaatccagacactaactacctggatttcaagtcagaccccacaggttaagtctcagtcccagaagactgcccccacttcagataccaatcacaagccctgagcctcctgcacttctgaccatataaattgggggtctccatgacctcctccttggggtcaataatttgctagaatggctcccaggactcagggaaacacttactaattaagttttattataaaggatacaactcagaaacagccaaaaggaaggggtgcataggacaagggggctggggaaggagcctctaagtcaagagcttttgagtcccttgggatctctagagtgacaaaagtatctttttgtcttctaataagatgactggtggctggaggcccctagacaggttaagaaggagggctagctgccacaaagaccaaggcaagagtagaagattgaaactctcagtccccctcccctatctccaagaagaagagaacagctggagattgagtgcattgaccaatggcccatgacttactcaattactcatatgtgatggaacctccttaagtcccctcaacaaccaggtttggagagcttctgagttggtgaacacacagaggtgctgggagggtgggacacctaaacagggtgtggaggctcccccccggccctcttgtcctatgcaccccttccttttggctgtttctgagttgtatactttataataaaactttaatagatagtggtttccctgagtcctgggagccattctagcaaattattgatcccaaggaggaggtcatggagacccccaatttatatggtcagaagtgcaggaggctcagggcttgtgattggtatctgaagtgggggcagtcttctgggactgagacttaacctgtggggtctgacttgaaatccaggtagttagtgtctggattgaattgaatcactggtccagagggttgaagaattggttggtgtgggggcaaaaaacctgacagatgtggtatcagaaatgttgtgagtaaaaatagctcttactcccacctaatcagttgtaccatatttgccagcacagcactgcatgcggtaagagtaggccctatctcatcagattgttagggaattaaatgagataactgcatgccaaatgctagcctagtgccagcagaagactttatgcttattaaaaggttaagaagctgttcataggatgtgaatgatgaaaaagaatagattctacgtaaattgctacctacatatggaagctgaggattctcagggctcatctcagtcctgtacaataaagaaggtcccacgcaaagacttataatgcctgttactttttctcactgatagtgggtgtgaaaggaaagtaaagcaacgcagcagactgtgtggcaaatgctctgctgacgtgagatgcatggtaatccccccagtagatgtgctgtagctcacgccaccattctcatagtgttcagcatttatgtagttgccagtgttcaatcagtattgggagatgtttcctttgcaaacagagcttgctttgaatttcaaagtaaatttctaggagcagaattactggacccaagggtgtggacgtttgaatgccctcaacatagatagtcaaattattctctgaagattgcactctcaggagcctggttctgtgagtctcttctgggaagaacagacattttaaacaagtgacaacagggtgacaagtatcaagctggccagctggatatagaggaacatgggggtacttctgagcaattatgagttatattaggagctcccagaacgtgagatgacagaagccttggctcagcgtggatcagcagcaacagcagcgctggggaacttgcttgaaatgtagacctcagatcccatcccagacctgcggaatcagacactctggggtgggacccagcaaggtgtgtgttaccatgccctccaggtaatttggaagtctgccaaagtttgagatctggtgccttagagtgatagtagcaggtgcttccaggcagatgatgccaaggggaaaagacataataggattgaaggctctagaatgcaaagaggctggggcttggcatatctgaccaaagtgaagaaggcagagaaggaggtggatgtgaggcgacccacgcaaggactttgggaccagaacacagcatgactctgacccatggcttttcatggagacacacagggacaagagacatggcaagagtatattattgttaaagggcagtattaagagtgaatcatacacaggatgtattgaacgtttactatatgatcagagctgcaccagtatcagctcatctaaacctcgcaaccctatgagaggcactgttactatgcccattttatagacaaggaaactgaggacagagaggttgagtaatttgctcaaagttacacagcagaaaagtggcaaaccaatcttgcctggggctgctgacccgggagcccctacttttgactgctggccatgctacattgccgcagctccctgtgagcaaggagatcccatgtaccgtcctagtttgggccactggagagaaaagagtaatgaagatttagatttattcagtaaaggaagaaaaaggggaagaagataatttgcatttatgtgtcacatactgggtatgaatggttcttcatttaatgtttacatcatcttcgttttatcaatgctgaaactgaaaatagaggaagttagaggacttgttactctacgctgcttccaagtggtctgatgaggtccatatccagtctgtctgccttcaaagtccaggctgccaccatgctgtgctgcttgctattagcagctggcatttgctgagctggtatcttatgcctggcacagtgccaaatgtaataaattgtgttatctcctgtaattttgtcataattctctaggtgggtagtactaaactcattgtacagatgtgaaaactgaggcccagaaagcataagtgccttgcccagttcacagagtcagtaagtgatagtggctagcatttgtgttgtttcccacacgtttcgactctctgctctctgggacggggtaggactgcacctcctcacccttgatctcataacctaactttggtcaatgtcatgagaaaagaaatgatgtgtgtcacttctaggcaaaagctctaagagcaagactgaaataaatctgctgcattcgctttgccctgcatggcaattattgaaacttgaggcaagaagctgcctttttcagcttggtccttgagagacgataacatagagcaaagcccccagcctctctgcagtaggcaggtggtacaaggagagggatcctgaactgttctaagccacttatatgttgagattgtttgttagctcagcatcatccagcccaccctgaccgatacaggttgggacaatctgtctgccttccaagtccaattttacaatcaccatcttatacttatattaatgccttctgaactcgatgataccatgggggtagaaaagaactgaaagactgctttttccttttcagttgctcaaaataatgctcccagtttttgccctttggttgttctgccttccctcacagagaaaggtaagttcattgtctttttatctcttggatgagagtaccccctcattcatcttctttctcctcttcccccttgcttttgtacagaagttgatagcttgcatatcactcgcattaattccagctcctatgaattaaacacatgtataagtggggtgagtaccagcaacatgcccactttgcagatgagaaaattgactcacgggaatgaaatgatttgtggaaattatgtggctgattgaagcagagtaagacctaagtcgcgttctcccagttttcattttaaggattatttcgccctatcgagtaatgactagacacacacaatccggaggcaatgtcaagaatggtgttatttatggccaaaaagggaaagaagtcagctccttattagtgcaaaagagttggagcttacagttatcggccacactgggcagcactgtgacatctaatgatgaaacactggccctgagtccaggagcccaggtgcccaggtgcccggtaacatagcctggacccaggctgcccttgctcctgcacatcccactgatcctcctcactcatggcatgagtcagcagaaagtgcagagaggttgggtgcagtagagacatctggatgctctagatgggggtgaggtggaggggtcaggacagcatgggcctcactgcaccgtccccttttctgcttccctttgtcaggaaatgagaggctcagcctgggctccacacgctgctcagccaagaggccaagcgatgttaattcctgtcctgtgacatgatgtctaaggggccctagaaatctgtcattatggctattatggccctggctggagagacagaatatagctcatgtaggaggaaattatttaaaaccagggctgtggctaaaagtataaaaatgtcttttactcatatatgttattagtttccctcagtcagttaaaatagcaaactttggagaacacattatatataaagttgttgagccttctatagaaactgtgtatgctaagcactttgcattcatgatagacgttagcttcctgagatactgtaaggttggcatcgttattgccatgtcagatggtggagtagggcttagagacagataaggttgcccaagaccaaacagataatacatgtgctagccagattttggtcaaaattgattttgaattttatcaagttagtgtacaaacacagttgaaataatcaaaaagtcccaaaagatttatggtttaaaaagaaaacaggccaggtgcagtggctcacacctgtaatctcagcactttgggaggctgaggtgggtggatcacgagatcaggagttcgagaccagcctgaccaatatggtgaaactccatctctactaaaaatacaaaaattagtcaggcatagtagcgtacacctgtagtcccagctactagagaggctgaggcaggagaatctcttgaacccaggaggcagaggttgcagtgagctgagatcacactgttctccagcctgagcaacacagcctccatctcaaaaaaaaaaaaaaagcaaaacaaatgagttccctatgtcatctatgtcatctctgctcatctgccactcccactcctagtagccccaaatttcaactcttctaactactttttttctcatcctggcctccgtgtttctaagttacagttggcctgctctatgtgggttccatagccgtgtgttcaacgacacatagatcaaaaataatcagaaaataaaattccaaaaaattccataaagcaaaacttgaatttgctgtgcgtcaagtactacattgaatccatgcagacaaagctgtgtgtaggcattgtattagacattttaactaatctagagatgattaaagtatacagagaatgtgtgtgagttatatgcaaatgccacaccattttgtataagagacttgaacatctgtgaattttggtagccatgggtgggaggggtcctggaaccagttacccatagaatcccactattccttgatttgtcaacttcagaagtgactgttcacttcttgccttgatggagacttagctctctgtctcttttatcactacccttttacaattttcctcctttatcaacaaaatatattaatatcaagatttggggttgaaacaagagtaaatcattattatggccatgtaaatatggttcaccacagagccccaaagagaaacagtagcatcctgttacaattgtcaagattttcagctatcctgctgtcacacacaatccctgctgtacccctgccctctgcagcacctgcttcctgctcatcaaaggcctggggagctgcagatcgtgtgggtgcttccttctgtaggcactggggcactgcttgttcctctctgccaagtcagttaacatgcctccatctcccattcttcacttaacagtgtttgaagtccctcatctgctgtctgctccttgcgtttccttttttccttgttcttttttttgttatctttgtgggtttagatgcttatattcttttacttcattttgcagggggttgtggagggagagaggataaagggcagtatttaattcaaaacaatactatagtatttttcaaaactttttaacgtttaatgaaaactcattttgtcttcagcactgtgctaagcatttaaacttcatatgaacctcaagcgataggtcctattataatatttgttagctatagaaaattcacacaaagcagaaatatagaaagaaaatcacagttatttagaagttactctgtgtcagttaattcatttgtttattttttcaatctttttaggctctctgtatggtctgatatcattgtagtctctatgtataatgttgcatttttggttgtttttacctaatattgcattgtatatatatatgtgtgtgtgtgtatatatatatgtgtgtatatatatgtatatatgtgtatatatagtatatatatgtgtgtatatatgtgtatatatatgtatgtgtatatatatatgtatgtatctccaaattgttacatatctgtctaaatcactcattcatgcaggcatgtatatacgtagtgactcattcattgagtcttctatgttcctactctcacgatgctcaccttctagtgatgaacaacaaatgagcaacaatattgttaacagagatagctgtcctgttattccaccagttcattagtccatttctttatttttggtcatttgattgtttattattattcatcattataaaaatagcaaagtgaactacttggtacctaaaattccctccagaagaccagattatttcctggggtaagattgaccaaagcggaattattgggcttgagaaatttacattttaagaccctagatttatattgccaaattagtctcaaacagttgttgctagttgcatacttaccagccgtaaattaaagtggttttcggcttttgatatacttgcgatccttaagttttatcactaaaaaattatttattaaatttatagataaagagtgttttgatgtcaaatactattgttaaagatgcataaaccaaagcataacttctttgggtgattttacaatgcttccactctatttttgctaaacatttgtattactgacatgtgaattacctacaaaagaaaaaaaaaaagatggagcatggagcatgtcctttcacatatacacacagcctatgggcctgagtaggtgtttccaaggtggaatgagatgtcacagtgcttgtaagtgtcttgttaacaagtatgatttaaaagcatagaaatgtcagagccaacatcctatctatgtgttaaaattcccaaattagaactaagaattttggcatgttcctttgatgtgaatcagagggaggggataactctgccttcagggtgttgaaatgtcattgtatggttctgacatagattgtgaggatgtgtctatatgtgtatgtgtatgtgtacaggcacgtatgcactgtgtatatgtaaaatattcatctttatgtactctctattcagggagaaaaggaaatatttcttaaatatcaaatatttataaatcatataatattcacaagaaatttaggttcatagcatggtctgtttttcaaataaggaaacggaaattaaatgactgagctgggatttgaacccacatctgtatggaccctttcagagttagataaggttacttggttgagtttctgaaacaggttagcaaagatgagcttttgagtctagacttgtctggagacctaatctcttggtttcatgtcttttatacgtgtgtgtgtgtggtgtgtgtgtgtgtgcgtgtgtgtgtgtataagccacccattcaaagtctacttcaaagaaagaattctttgcatatgcaaaccattctctctggaaagactttctaaaactcacctgcctgctaaactggtgccttcaaaccagctagtgtgttagaaaccttctctagagcaacagaaatgcagtgtttagagcagcccttatcacatagtatgtactcaagacaggtgcatgagatttcagaagtctcctccatctgcacaccatccccactgaccagtcgggggagcagaattctttctttgaagtagactttgaatgggcagcttgtacatacacatgcacacacacacacacacacacacacacacacacacacacgaaatgaagctaagcaattaggtctccagacaagtctagactcgaaagtccatctgcacagtggaactgttcctaggctgcagtgggatactgacaagtttcccccagattcaccatagacaggcaggaaaagcaccacaaatatattatgaccaaactgtgacttggaggaggagtgtgcatctgtcagatggccaagaggagaatggatagtgtctgaggcagagggcactgcatgtgtggaagcatggggacatgcatcagcaaggctcaggcaggaccatgcaagtagctcagtgttgcaggaccaacaggtgcagaagaggaccggggccaaagcgtaaagtgcattggatactgcagatccttgcagggcttgaagcagtggaacaatgatctttaaaactatgtaaaagctttactttgcactatcatgagagtgttttggtggatgactagctagattttgagaaagtgaggacaattatatcaacggtgtatagtgtatagttgtactctctttggataaaaattgttttataaacaagtgaaatagtaaatatatattttctttgtcagacaaatgtacattgcatcttaaaaggcttacaccaaccaagccagcaaggctgctgcaggttagcttgagttatcttctccagtgttggagcctgcctgtgtgatcgtcgcaccccttccctgcttcccaaatgtgggatctcctaagggtttattcccaggacaacgagcattcagcttgccattctctatttcagaaatgtttctcttagaggtgtgtattagttcattttcacgttgctcataaagacatacccgagactggacaatttgcagaagaaagaggtttaattggactcacagctccatgtggctggggaggcctcacaatcatggcagaaggcaaggaggaacaagtcacatcttacgtggatgacagcaggcaaagagagagcttgtgcaggcaaaatgccatttttaaaagccgtcagatgtcctgagacttattcactatcatgaaaacagcacaggaaagacctgcccccatgattcagttatctcccactgggtccctcccacaacacgtgggaattatggaagctgcaaggtgagatttgggtgggacacagagccaaatcatatcaagatgctacttaattaaatttactatttggattgaaagccagggtaaacacagaatatttaggattttgtcctctccattctatgtgtgtttcacatgaatacttcaacataccatttggaaaatgctcccgccattgactttgagcccttttgagcaatgggtgcagcacaggttgctgctggcagagcggactgtgaagaaggctgcagctgagaggtgcgaggtggagcgaagagagatgtctcgttacagtttgtcctgctcagctttccagcacctctctcctgacctcatcctggagctcagtgacagggacaaagcctgaattcagggcagatggaaacagcagtggctgccccaacagcttttgaaccacacaatgaaaaggaatcaactttgtctgcttggcctccatcctgtgcctttgcctgtgcccgtgggttgacggaattcacttgatcttttctgcaaatgtttttcattaagctggaaacagagtcctgtgatcctaaaaagtgtcagcaccggcgggaagcatgtacaccctctaagcgaggaagcaatgcgacatcacggtgcagcacgtgggctttgaggtccacctgggcagcttcactgagtatctgggccagatttcacagcctcttgatgcccctgcttgccccagtaaagtgagaataatggtgaaatataagcaatatcagtctagcaggcttttgttgaagagcagataaagtataatgctcagcatggaatttgctgtagagtgggtgttcaagaaacgtcagcaataattcccaagtccaaaccgctttacagaggaggaaactgaggcagagagagagtgtgacttccccacatgacaaccagttaaagctgagctatacaattatatatatatatatatatatataatatacatgtacgtatacacacccatgtatacagtcacacacacatttttatggataactgttattaaggtaaagagtttgctagtagctctatcattttttgctcttatttttagttgacatataataattttacacatttatgagatacagagtggtatcttaatacatgtatacaatgtgtaatgatcataccagggcaatcagcatatctatcgcctcaaatgtttatcatttctttgtgttgtgaacattccaaatcctctctcctagagttttgaaaatatacactaattgttagccatcttcccactacagtgctacacagcagtgggaatcatttttcccgtccccctggaactgcacacccttaactaacctccctgtctcctccccctccctctgatcttcccaacctctaatgaccacacacaatcatatattttaaaaattcctattcatggaatgactgaatatgccaatcaccatgctaaatgctttctatattttaatcttcacaactgccctacaaggtgtgcacaactgtgtccattttccagatttggaagctaaggctcagagaggcccaaactcacataaccagtactttgtagagctgaaatttgtactcaacccggatgtaaacccagagtctccccgcgaagatggtggctgtcgctgctccagtttcccgggaatcatactctgagatgaagtttagtaggaaggccagtttttttttttttttttttagcaaaaagttaattctaccaacaggggtgttaggaggcaagggaaggcccaggactgggctgagggagaagttgaaccttagtgttgtctcggtggaggcctcagatggccctttagggatgctgaagctgggatgacctttaaaattgttatggcctcacgctggtcactcattaccatgagctgccctgagcagggcatgaccttcagccgaggcagtcctggaagggggcagacagtggtctgcctcagcagcacccaccactgctaatgtagagccctgcagtcctggagggagtcagggaccccacagcactctccacagtggctttgcactctaataatccagactgggacgtgtctgacggtggaatgcatgcctttaaacgctgtgcaccaacccaggcacactgttttcttactactataggcactgggctgatggcgtgttaaaggcacacaggactgattcttcatccctttggtcctcagcctagaaggcccaggtgagtggccactgattccaaaattgtttagtgtttgtataaaacttaaatgtcctgtctaaatacgcacagagcttatgcatgcatgtgcacacgcacacacgcacacaagccattttgagggagctcatggtgcataccctgtcactatttcatcagaaaagttgtccagggataggttttatatcccaggggccagcaagacatgccggttagcacaccctgtttcctcactttggttgagagtgccaaatgaatcatgttgttagcagctgcaacactcagcacgcgggaactccactcccaagccaggatccacatctgccagggactgtgctgcttgggtgactataattgctgtaatgtgtgaggctgagtatggtctgggcacagcctcacatctggcagccccctggacctcttctctgtctctctgagaccgagagattgagaaggaaaaagaaacagctggcaaactggtgctgcaatgatagtaggtcttaggaaactgagaaaggtgaggaaactggttcccagttcccttccttcctggaaggcttcacttctctccacaggtgcaggagggagccactagccaatggagaagtgctgggtttaagactcagttatggtttcatctgccttggctgcctttcccctttgttcagttgcttattcattcaacaagcatttggtgggtacctactttgtaccaggcactaagcactggggtacggctgtaaatgagcaacatgagtgtgtcagaggatgcaccataggctccctctttgggagtgtttgtgtgtgtgtgcataagctctgtgcatatttggataggaaatttaggttttatacaagcattaaacaattttggagtcagtgcctgctcacctgggccttctggccggaggacaaaaaggatgaagaatcaattctgtgtggcttcaatgtgctccatcagttcaatagaaagctatagtattaggtgcaaaagttactgcagtctttgcctttgaaagtaatgggaaaattgcgattacttttgcacccacctaataggaagaagacagtgctcctgggttggtgctggagagcctgcacagtgtttcatagcactcattccaccctcagatgtgtcccacattggactaaagtatatagacactgtggagggtgctgtggggtctctcagactccctttaggatggaagggctctaccccagtggctgtgggtgctgctggcagagagaccactgtcagtcctgttctgggaaaagaccacacctctatagggtttgttcctcctctgctctgagccccaggtcacttcctccaagggatggctgaccaccccatccaaagtagctcccttctgcactctccatcccttcaccctgctgtactgcctctgggaaccatcgctatgaattgttgtcatttgtttacttgttgagtgttgcttgccctctctggaatgggagctgcaggaggacagggactttatctgtctcatttactgcgactgtgggagtcccagcacctgtgggagtcagtgttcagtaaatatttaccgaatgaatgaatggatttttcttgcttgcttgttagattttgggctcccagagggcagatattttgtaattcatggttgggttcttcacatttagcaaaatgtccagtatagagtagatgctcaatattattttatttatagttatttggttttaaataatagatataagtctccactttgacctaagtcagtatttaaaggtaaaagtgatcaactaacttttgttgaagaaatgaatgaataacagaatgaaaaacgaatgaatggagagggtggttgtggagtattgaaagccacatgggatatgagtttgggcagccaagttttgaaccctccctttggcactccttaagtatgtgaccttggccagtttaaagaatctttctgcatttcaattgtctcacctgtaaaatagagatgattataccacttcaaagaggttgttttaggcttaaaagagatattatacataaaatggctgtactcaatgctcagtaaaggttggcagtggtggcatggctgggttaggtcatgcactaccagttctaatggggtcctttcacaggtaatctttgtaaatgttacccctgcagttgtgctatgcacaacctgtgcagctgtacatagtgagcctgggaggcacttgacaaatgtttgctgaatggttatgtcttaaactcttgctagatcttagagtcttagaagatggggaaaatatatggattttctacagtaactttctccctatacagtaccagttttgtacctggtccatcaaaaatttgcttaattatatttaaaggatatggagccaagagcaaaatatgtcaacagaaaacctaccatttggatttggttatttagcctttagctttaaatattttcttctaaatatccttcttagctatggaagatatccttcagcctagaatcagtcagaaaccacataatcaaaaatgacctcaatcaaagccgtaggtagagggagctggcgtttggtactgccctgtcttcctctttctctataattcccctctgcccactctgggtaactcctgactacatgctcttaagccatgattctcatctagaatggcaatcccaaggcaggacactgtgatgaaaaagtggtttctctttccttctcacccctgaacagttgccttgaacaggcaactgttaagaatagaaggaccttgtttatttattattttattttctagtgccatcctggagcctcttgagccaaatggaattaacaaagttattcacactaaggtgaaaatatcaatattttaatatctttttcaggggtgttcacagtttaacaagtgggtaaaccggttctattctgagagcagagattcaaaacttttgccaaacacgcgggggaaatattttaggcaggttgcctgtcctggggctcctcaggcccttctacatagctgacagtgaatgggaccatccctgagtacaacccactagaagatttccttagttttatggcttataataattttaatcactgattaaaaagagtgatagtatgttacaagtggctagtgctacacaaagttttttttaaatgatccttcagtcatccattcatttattctcccttgttgagtgtgctgaattccctgacctcctgaaggaactcagtttgacttattacagaagcatctacctcttctccccagtgtttaaagtccgggaggtgagagggacccagctgaagaggatggagtgagggcttccgtataactggagtacctggtgtcatgggaaggtgagatggggaaagaggagagaaggggctgggtcagatgatggaaagcattggttatcttgctgtgatggagtaagattgaggtaatgagctccctgtcactggagtattcaaatatgttgaagattctcttgttgtgagaggggttggcttaaatgtcttttaaatttccctttaaattttgtaattctcagcattggctcagttatgctgtagcgtgtgattttttcccttctgcttttgtgagcgctcacccacaggcaagcagaaggagccaggcaaaagcagaagctgggaagcacagagcctggtgctgggcagatctcagtctctgttctaattctattcctactctatgaataacctagggaaagtcactgcactgctctaagccccagtttctttaaggtagaattcaccatgttacctattacctacaagttgagatttgggtaaagtcctatgtgtaacatgcttagcctactacccaccacatacagcaagtgcttgataaatggaatgagcagcagctgctcctgctcctgcagagatcagacacaggtctctaacgtggagggcaacggtgccgccttaggagtctgtctgtgttcaaggcagctgtgtgagcttgggcaagttccctacagttcacccatacccttgttcagcaccccaaaggaggcctccatggtgctggactcactttgcttagatcagattggttgttcacatgcatttgtgcctcagaatttctatcgttttgcccacgcacccaggatcatgcatgtgaccccatgaaagaggagttcagatgctcttaggagacccaattcttgtactctctccatgtagcttttgtgtttggggaagttggtggggatgtccacttgttaggagtcaaacttcttagagagaaatcagattcaatctgagcctttgaaatttcactaggaattttgctcgtaatgaacttagtaatttgtcatgaggccatagaaggaatatagatccaagtctggtttcgtgtgtgtggcttttccttagttagaaatttccctagaagcgtctttgaagttagcagcattaaagatggttacccaccaacacacaagctcataaactgaacagatgctgggccattacagacgtctttggaaacttctgcctgcaatgagaagccacagggaagcactttatgaggctgcagctgagtcatatggaggaggtggcagctgtggggcagtggggattgagagggagtagtctggatgaagtccctggcagtttggctcaccggtcacaagttgtgatcttggccatattatgtagcacctctgagcctcagttcagccctctgcatgatagtaattaaggcatgggatgatgtagttattcttgcagtgtaaatgaaagtgttttataaactagaacacaccacgtagaggtgagattttattaaatcagcttcccattatttgcttcctatgtgactaatctattaactaattgactcaataattatttactgaggttttgtagtatgtgaataataataatcttaatctttatggagatataaattagcattctattgctcctttattaattaacttcattcaatacctatttatggattagggcagtttatgaaaaaaatagtactattgctgctgttaagcacacagtgaacacttagtaaatgcaaactacaactacattactatttctattgccaatttttttttgcttgctattataggtcttggagaatcagtgaaactaaagcacagtttttgatctcaaggagctcatgatttaacaggcagatttaaaaataaacaaattgcaatgcagtatattagtggaacagtaaacatatctaggcatttagaggagaagaagtaggcatttagaggtgatggtggtggaggaggcagctgtagaaggggatttcagagtggattatctgagttgggttttaagggatgatatgaatttatcctacaaataaattgacttaactttgtaagtcaatagtgctgttcacactaataatgtacaaagtcatacaacacagagtgtgttgacagaccaccaggtgtgagagtgggatggtaggaggcagactaatgagagatgaagttggagaggtaggcaagaaggcatcagatagatttcagggaaactcagacactacgttttttgtttgtttgttttgctacaaacctagatggagtgtgtttgctgcagggacaatattcacttgtaatggtagaatctgaaatttatatttaaaatgatatttattcagactttccttgtataatgtcctttctagatgaacattcagtccacttgagcaccaatcaaggacaagacttaaggttttgagttgggcagccccatggctggtggtgccaattccaagataaagaatgtaagaggggaaccagtggaagaatgtggttgtgggtggaagtgagattatgtgttcagttttcaacatcctgagcttaaaggacatctgcttggaggtgtccaggaagcaccgaatatataagcatggagcttgggcagagggtctagcctggttgtatttggtggtcattagcatgtcagtggtatttgaagtcgtagggatatgagcacacccatggagaatgtcagatgtaaagagtaagagtcaagggcagccccttgaggagaggaggagacactaggaagagcagctggagacaggggaggcacactggtggcatctgctatcatggaacccaggccagggagatgtgattcatcatttcaaggaaaatggagactggaagtgtccattgagttagtcatgaagagccctttgaaaatttagtggagtaaagaggaaggaaactcaatagtagtgatttgaggaagtagaaactacaaattttcccaagcatcttggctatgaaagtaagagaacaagattgacagctaaaaaaagaattgtggaacattagctggtaatcatgtttaggtcatagattacttgtgacagtgaattaaaaacagtatgttccaccatatatatcaaattttgcctatattttttagggaaatgggtcacctgaaacccagaccatgagatgagaaactttgggttaaagtgtttttcttacaagggggatatttcagcatgttcctatgcaaaaagtgaagtgtcggtgtcgagggacacactaaagataaaggaagaatgggagtggggctgggttgggggtaattgatagatggaggcccctgaaggggtgaggaagaatgagctctagagcacagatagaaggactgacttccaatggacacccttcttctgtattaggagaaatcaagagggaaagataaaatggcttatagaggggatgagggggaaggaagctgaagcagatattgacagatggcccctttttgctctgggaggccagaggtcaggcactggctgagagcagaaggggatggatgaggtctaggcctgagagagcggcaagcactgaaagcagtggctgcaaggggtggaagagaggggaccaactgatcaaactgtgccgggggtcagttgaagctgaaggtccacaggttgtaaaggcaccagtgtgttcagctgtggccatgggaaatttctttgcccatgctcagcagactgagacaagctgcagggaaagagagcccattgggttagtcccattgggaggaagagaattgaggacattgctcaaagggaagctgagataatggaccaatgggaggtcttggttggatgatgagccactgaggatggataccatggagtgggtgggagcgtagaaatcacagtgaaattaaagagctggcgtgagtgggctaaagtgtgaatgtgctggagagaaagaaaactgtggtccatatcagcaagtgcagcttaggaaaactacaatttaaatggtgatggagttcaatgccttggcagggtttggggtgtgatcatggaggcagttggctggaatggagtggaaatgaaggtctctgggattgaagcagacaagaaactgagaccagagtttcaaatgggcttctactctccctaagatgatgaaaccactcaagattttagcaggatttggagtggcaatgggcttgaggaatatgggagaatgactaggcattctcagttaaggatgatgagaaggactagaagatttcattgtcagagggttgggcctccaagaaccaggactgcagcccagagtgaaggaggggacattacagtcatggtaagaaccctggtttctgggacacaggaggctggggaaggatgagacaggttcagggggtagcagtgcaacaacgtgagttggtttcagagagaaggacgagcaggagtctggaccagagtgagaaaggccaagatggtgcagagaggacaggcgggctggcattctgctttttgattgggggaaggtatgtggttgccaccctttcatcctatcaaataagaataattaaaaaaaaaaactagaatctattcttctcattattttgcaaaaggacattcatttccccagttaggaaggaccactatcagcaggtcataaaattacaatattttgccttccagatggcatcccttatactcctccttattcctggaaaaagcatacaaactccctgtcaagctgcctgtaggatttttggttcccaggtgtggactacccacccattgaggtgcataacgactgggttcatgctctctctcagatctgccttctgggttggaggtcagaaaactgcagcctgcagcctgcagcctgtttttgtgtagcctaggagtgaagaataggcctatcacatttttaaaggggtgcaaacaatagaagaatatgcagcagagaacaaatgtggctggtgaggcctacaatatttactacctggctctttactatcttctcagtgatatttcttcttagaagatatttactatcttctcagtgagcagaaggtcactgatccttgtcctgaaggcttacattgtctctgtccttccttctgtatccctcaatcctttatgtgggtcttttctggtccttctgggtcacacaaccagacctacatccccctgtgggaccatcttgatgtgacagcatttctttccaggaagatgagggggtagcaactgtaacatcactactattaacattcactcttaatattaaattttggttgaaaaagccctgttttacaagtgacagcaaggatgccatcatgcattcaacaatgcagacagtggtgagagctcaggctctggaggttgatgtatgggaggtcaaatccttaacaaatgttagtgagtatggctgtgccaagcagtttgcagccattggatggctctattcagccttcagcctgtgcccagagctccctgatttatcatgctatggcacacacaggggatgatgacaactgcatgactcattggggtaaacagatgggaagatgggaccaaccctagctccctccaccccttgccctcccacaggctggaaagatcagtagcaaactgtgactctcactgtatgagaagctctgctttacggttcaggtggtaaaactgttcctgttcacaaattaaaacaaaagaccaataattgagacttagcgtataatttactccaagtcacagagctggcaggaggcagagctggcatctggccaggcagagtgccccagagtggtccttccttaaaatgtgcaatgccacctcttagagcaggagtgaccggaagagtcacatcagacagctgcgtgtggatggaaggagacaacacacggagcacatcacattatgtctgtgccgcttcgtacaggagatgcttcaaccctatgagccatttgactatgtgcatgcgatagggtgggaagtatcagtatgatgagcattttatgctagagagcagcactggggcagagcaggccctctgtaaatcagtgagtggatgctgtcaccgagtgcacacttattttgttacttggctgcagctgccataacaaagtaccacgaactgggtagcttcaacaacagacatcatcttcccacagctctggaggctgcaagtctgagatcaaagtgtagacaaggttgattccttccaaggtccctgtgggaaggatctgtccccagcctctccccttggcttgtagatggcaccctctccttgcacctcttcactccatcttccctctgtgcacgtgtctctgtcaacatttcccttttttacaaggacaccagaccaccattggattaaggcctactctaatgaactcattttaacgtgattatgtctgttaagagtctaccccaataaggtcacatcctgaggacctacgggttaggactgcaacgtgtgaattttgggggggacacagttcaacccatgacacctactgtcacccctctgctaagcactgagatgcggagtcgaagataagagtgtgctcactgaagagctcaacagtaggtatttggaggctgaatggagaggtcaggatgtctgggtatttttctagggttgtgaatgttgaaagaggcccaggagtgtctgctgcaagtgtaaagaatttctcctggagaaatgctgaaccaatcagcagctctcctcccattttcattctgcaaataaccacaacattacaaggatgtctttatttggtcttccttccttctgttatcaaaggaacatctggtctttgataaatgctgttaagaacaaacataggccactatgtcctggttctcacttgaatgatggtctctggtgagaaagcaggatgtctcaatgcaatgttgtctccgtccgatgacgacagggagacgtgagctgggctcttccttccagcaagtgccctgtggccgtacaggcctccaaggcagcttccagtcacttctattctgcttatcacagggatcatgaaggtttgctgggggcctgaaagacttttcctgcctgaaaggtttcagaatgtcacggtttaccccagccagcctgtgcaggtgtggaaaccgcctcttctatttcccagctattccatattcaggagcaatcacttgatgagtgctgagcagctgaaagaaattcctcttggttttgattgcgggaagaagggtgaggatcctgaagacttttggatgccttggactcactgtttatttttgatgagtcctaagaaagtcatgtgatctttttatacaataaatgggatgggtctgtgattatttgaacgttggagagagtgtcaggcatttgctgccggtttgacattctgcccttggatctgatacaaaaatgcttggaggcactttccgcctgtttttcaaatgagggaggcaatggccagagcagaagctcacctgtcattacctgccagcaagcggcagacctctgcctgtggggtgcatgcagctctatagtgatgtgtaattttttgggcaatttttaatgtaaattattttacttcttccatgatgatttagttggactgtctttaaaccagtacaaatatttcataaataatatctggccactttctaagcgattaatttgttgctcaataagccgcctcacatctttcagcaagaaatacattaaatctgaatagcaaatacattacacaataaattcagacacaattaaaatttgctttaaatatttctttgggggagaggacatcacacttctactcaatgaagagaaacatttttacagtctgatgtcttatattttattttaacatctactatgccatgaactcatagggaataggttctagcagctctggcctttcccactggttctcacacagtgcgcttctctgcgtggagcaagctggcgcttcagttgagcccaggtacccttctcttgggcttctttttctgatcattttccttcacgtgtttcaggaagctatcttgactcccagagtgcttaatgtgctcaatacccacattaattctcttgtcaagaatcatgcccttgttcatttgcaacaatgccagcagtacactggggaacattgtaaacgcttccagttttgccatggtaacacctgtgggttatacctttttgaacagtgcccattcccttgatgcctaccatatcacctttcttacagattcacatgtacctggccaaacgaacaactccatgttttccaaaaggcttggagaacataccaggtacctctcctctttccctttgtgtttgtcattttggcgaattactggaagatggtggttccagctgaaaggctttttggcaatttttaacagctgaaaataaaccttgaaataaacattttctcctttaactgatgtctgggaaggaagaaacaaaaaaagaaagagaagaaaggaaataaggaaggagggagggagagagtgaaggagggaagaaaagagaattaaacacgattatctacatatcaatggaaaatttcaaatatattctagcataatttttttctacttagtatccattaaaaaagggaatcattgtggaatgcttaaatcaatcaaatgaacacagccatccctcggatacttatttttttttttttttgtggtgagaacatttgaaattgattctcttagtagtttcgaaatgtgccatatgttaactatagtcactgtgctgtgtaatagatctcaaaaagtactcctctgcatcatatacatatatcataaccttgtattataccccataaatatgtataattataatctgtccgttaaaaataaaaattaagctttaaaaaaggggatatggtgctttctagaaaggaatagaagtgcctccatgtcacccagaggcccgcctgtgcagagactgcagctgtgctgcctccaggttgtgaggtgacccaagctgcccccatcacctcctgcctctttgctgcccccatcatccctcccagacccttccttctcctctgcccttgtcccctcagcagctctggtttgcagggggtatcaccatatagggctgtcctgggtgcaaacactgacttgctgcctgcctttcagctgtttggtcttgggcaagtcagtggccctctgtgaacctcacttttccctcctataaagtagggttaggacagttcatctcaatgaagtaccattagatggaaccagttaatctttacatgactttttaagcacttcttacctgctaaatagatagtagcactcattgctagtctatctggtcacagaggaaagaggctgtatgacctcaatgagtctctcttccttcagggccactgttgcccctctgcccatggaaggggcaaggcctcttacttccaagggcatattctcctccaaggcttagggccttctggtgagctactcctactcactgaaagagtcaccaagacctttaaccaccatgctgtggggctgtataagggctgggaaggtgcctactagctgctgggaatgagggctgatctgtcaattaccacctcaatgaggagatccaagactatatagcacagcagaagaaaagcacagttcctgtgtcctgctggtaggacctcaactaagttctgcactgtgacctggggctgcctctgtaaccttgggggtgcctctgtaaccttgaatgatgcctctataatcttaggtggtgtctctatggtctgggggagtatcctgtggtctttcctccagtgcctcagtgtccccatctgttatgaagatcaatgcgagttaacataagtaactgaaattacattgtaaatcgatattgttttcacttctgaatgtgtgttgtgtttggtgagtgggtgagagtaggggacacacaggaccaccctgtaaaagtggagggttgcaatgcagctggagtgactgaccctgccaaccacacatctgcctggtaccctggaggaccataggtggtgagtgctgtgaccagatgcggatgttagaacggttttggttatcccagcaccagcatgagaatggcctgagtgggctgagactcatgatcaggaggcccttgtttggagcctgcatggtaactgcagtgaaattgatgaggccagaaccaggtggaaaagaaaagacagttcctagaggggctgagcatgtagactccactgggaggaggcgataaggatgataggatttctggtttggacaatggagggagtggtggaaacattccctgaggaaagaaagaacatggtgtacgagtgaaaaggagcactgggggacagtaatggcttcattttgggacttgctaagctcgtgaaaccttgaaacactgaagtttatagatgttgctgcaattcagcagcaagtttcccatgaaaactgaggcccagcccatggcaccgcaggcacactgcgcaggaggtgagaggctgtggaggccctcctgggcaggaagcaagctgccctgggacagggggacagggggacagtggggcgaggggaggaggggtcaggtggaagtcaggagtcagatgtttggtggggacataactggcagtagtttgggctcctgtgccccttaaaggacacccctggtacttccatccaggctgagagccccatcattttgaaaaaacagtgtccagactgcatcaggaaccaagtagcttgacccagagacggtgaaggtggctgtgtttgctgagcatttcccctgggcagcagctcacatctagtaactcattcatttgtggttacaaccctaggagagacagtcatttaatatcaccattttatagataaggaaactgaggctcagagaaggggagtggcttgcccaaagtcacacagtgtagtctggctgctttactgtgtcccatttttgacatacactcatagccaattgttagtgtcagctgctgggtgtgttcaactcttctctggtttctggcaatataagggggccctgatgttattctctaaccagcgttggctccccgggaggtgtgcagagggctgtgtggtctcgcaccactagggagcatgccagtgagcatggagggcatcccttcttaccaggcaggacagtcactgtgtaggagccaacctgtccggctttcctctcggctcacctctccctcctactccatcttctccctgcactggaggaaaagaactcctttcctgaggcctggatccaagggcctcagagcaaaggtgctgatggattaatttaccccacaaacgcaatggtccatgtgtcatctacagagagacattatgcttattagagatcatgaacaagggcaatgcgtaacacaaagatctttaaaattagagtttctcagagtagttaagggacttgcctgaggacacacagtgtcaggctgagtgaggtttagaactcagaactgtttcttcactagcctaagctgtgtctccagcaatcatggccaaaacaaaaccaaaaccaaaaaggatatcttagagaccacagtcattttcaaacttggacgtgtgtcggaatcaccaggaaagttaatagactacagaggccccagctctttgaagtgagaactgggcctggactttggaattcttgtcacatttctcaagagaatctgatgctcacccaagtttgagaactacgatggacgggtaagaatcatcttaaatgttttggcttcttagactgtttttccaggctgccaccgttggctgtcaggtacagtcctggagtatcagaggaggcccgtaaatagttgttgaatgaatacatgattgaaagaacaaatatacacagctgacttagttaataccgcaggtttccaatctactgcctcgtggaggcatatccttgctagaccggaatatagttttggtcctgttttcaaagtaaccacacaacaaagagcctattaatattatgaatagtcagttgtattttgatagtaatagaaaagccagtagacttgaacaggaaaaaataggcaaataatttaaaagatgagatgttaattttttagttataggttttttgaatcacgatttcagttttgaattttttaatgtgatttggccagtggttttaaaatgtgtattagaatgggccataatatgtagtcagttggaatctcagaaaacctggcacgttttaaggtttcacaattttattttggccatttttatgttaatttttttttagtaaactcctgtcacccagggagatatttgttgaagtgttgactggaggttggctgtccggtattttgttgttttagtttgggatgatttattttttattgcaagaatttagtaaagcaggcagagttcaaaagacagagcctttttaatttaggcctttaaaattatggactttatttttatgctaagtctgaaatgtcatgggactggagtggcgctggaaggagtaagaccgggagaagggggaggagaggcggggacggaagaaaacacaagagttgactttgtaagtttttttaatgtgtttttaaatttttttttaagtttatggagtccttttgtttccattgagtgtgtagatcaattagtttggggattttttacaaggctttttttgtgcccgttaaagtctttaatttttcttgggccagatattgttacacagaccaaaaatatagccagccagataaacaaaaactagaattagaccagactgagtattttagtggaggtaggtttttagtattagcttcatttttggagaactcaagtctaaattatatttgggacttgaccctgatcaggatttgttttaggacggaactcgaacttataattttagacaaggatagaactttaatttataattttggactataaaaataggacttgaatttataattttatgatgggattaaagacaattaaaggcataggcatatattaatgaggtatttattagaaatatgtctaatttagttcttttttttttttttttaaggaaagtagtgtcaagggagcctggagtgttgaggcagagaactaggaatcttctagtcaaatctttagacaaaccagtctaggtggccactcagggtcagtaaaggggacccataccccactaaaaggatagagtatcttgaaccagttttgtctcacccatgtctgtgagtttcattgatggtgattttagtaagttgtcctgttagaaaatataaacacataagtaaatagcttttctctatgtcaacaataaccattttgaaaatataatggaataatatcatattctattcttaatggcatcaaatattaagtttaatattaaataacattcaaatcaaaaaatttctctcaaattaatgtttaactttgagatcattccaagtaacccaatgaagctttcttgaaccttgaaatggtaaattttatccaaaagaatgaatagccaaggagatattttacaaaacaaaataatgtggagaaacttttaccatttgatgataaaatacagagtgactatggtttaagcaggatggaggcagagccaggatttgcaaagacattcatggaaaagaagaaacacccaccaaaacaaattcacttacagataagtactcacgatgcgataagcatgcattttgaattaaaggagagattatattttaaaataaatgacactagcattgcaatctatgaactaaaaatagaaaaatgaaaaaaaaacaaaataaaaattaatcaataaaccatagactctacttttcaggaaaagactcacactttgggtgagcttggaagctgctaccacctcattcatctggaggggaagtctgtgatgtactaactctgggttctgtacctgcaagaactggctccagccctagctagcgctaccacttaattagccatgctaacactggctaagccgattggctaagcaaaagggtgtattactggatcgtctgtttccttgtctgtaaacttggacagtgacagtacccacctcattggttatcatgaatactaaatgcagcagtgttgcaagttcctagcaaatagtaaactctcacaaaatgctgccaagagccccaactttcctgcttcatcatccttctgcctccacaaagagtttgttctcagaattttcatgagatacttgtggacctcccagatgttggattctgcacaaaagcagtgactcatccaggggttcatgcaggccaggggacagtggcaggtggagggaatggcaggacttggctccaggccctggaatggtgacagatgaactggttttcacttggagatgaaattcactctttaattatagtgctttctcccagacatcaacctaaacacagagtatggccaaggcttccattttaagaccataattggtgagtctagccctaaaaccctttcatagaacttctctaaaattgcagtgttctcaccctctaaaaatatgcagctcagtttggtcatgttgcaaaaatgccccttatattgaccatgaaaatagcaacatgtggaggatgcttaagaaaatgaaaacccagcatctcttgcagtcaagccaggtcccaacttcaggaagacacatctcctgagtcttaggatggcacccactgctccaggacagagtatggaggtttaccttcctcttgccgggcctgggtgaaacattatgttatttggcaacttctctggatgaatcttttctctctcttattttttctttctttttttaatgtaaaaaagtatagacatgtcatagactgaatgtttgcatcctcctcaaatttgtatgttgaaaccctaacctccaatgggatgttattaaaaggtggggcctttgggcactgatcagggtgcagagcctcatgatggggtcggtgcccttctaaaagaggcaacagagggctcgcttggtctttctgctctctgccatgtgatgatacagcaagaagacagctatccatcaagcagaaagagggcaccaccaagaacccaatcatgttggccccccgctttcaaacttccagcctccagaactgtgagaaataaatgtttgttgtttaagccacccagcctatggtattctgttatagcagcttgagcaaccaaaacatggcactagattgttttgctgctttatttaccagtctaattttagtgaactctccaccagtgtgctggttgtcaaagacaggtttaagataaaaattataaacttccctgtatagctaagaacagggtgttatcaaaggcaaagaccctttcatacctggggataatgttctggaaaaggtgctcagctgcataggaaactcagacaggatagaaggagcattgacttagagccaagacatctgattctcttctggcctagttattttccagctccatgttctgaaaaatgtcatataacttctctgagtttctgactcctcctctgtgaaagaggcactagagcccctacccaacccctcatttgggtgctttcgggatcaaacatgatgatgaagtgaatatggtttgtaaacttcaaagtgctatgcttgtgatcgccatagtgttctgctaacacaaggtaaatgctaccaaatatttattaaaggacacactactgtggtcttctgggaaaagaagcaagaaaacaagaaagaagaaaacacaaaagcaagcaagaaggtgtgtgtatgttacagagagacagagattttctttattaatgatcactgatgccccactgaacatctctgcaggagtgttctggaatcagctctcccgaatgatcatggaagcctatcttgagaggcagcctttcaagctcttcagtgttatttgtggaaagtatgatacatccattgacctagactcacagtcctttgtctcagtggaaacttaagtggaaactcaggatcaccctcacttcgtctggctctaggcacggcccttgcaccagatgggacgagctcacctcctcacctctgcccaagccatctctgtggctgctatgcctgtgcttccctcccccatgctgagacagccacgtcctacgtacaggactagggaggcagcaccagagagcagttggagggcacaagcttcactacatacaaaggccagttccaatcctgttccaccgagcaggaacagtgccctcacaggccagtcattttaacctcttgtgtcttattttcttcatatataaaggaagacgtcttagctggggttttccgagaagcagactctcagatggagatttgcatgcaagaagcttggtgcagagcatgcttgggatatagaaggaagtgaggggcaggattggccagaggaagaagaactttgatgcaaatcaaatgatggccccactgatcttccagtgagctctgaagctaggctggccgttcagatttgttccatcttgaggctgggggtacgaacctttatctacccccatggacagtgttgggatgcaggctgtccatggggaaggggaggcagttctcttagatcaaagacaattcctagagagagactcagttgggagctgccagccatcagcttaacaacagttggggaaatgagagccttggtcctgcaggggggtctcagtactgcagggggtctaaatggcaccccacagtgtcccttacagaaaacaactgatagcaactggtgtagtgtctgtaaagacctgagcatagtaccacatgattaacctgatatgtctgttagtatcattacctcatattattttaactgttgctttgtaacaattatatcatgatgtttttctttcttctcaacttctctcccattctactatgagctgcttaatagaaacagccatgctttctgtttgtttcgttctgttttcaacctttgtattcctaggcttgagcacagaatctggctcataaataattcaataaatacttgtagaatggaaagatggatcaagctataaggttgcacaggaatggagaccaagaggaggatgcccctaaggctgcctttggggatattgggtaatacacggctgtctttgttactcaccaggtgacaactgcatgtgactgtccgttgccttctctcctagtgtctctggactcgtggcagtccctggccctctcttcagtggttgttgatccatccattaggcactttgatgttgcccatgtcagcactgctgccaccagcaatttctctgctgtccgagacctctgtttgtcgggtaaggggagtttccaacccacaggttgggtgggacaaaacctcacacaagtgctgctcaagattctcaacttagaaaaacacatgagacactacgataacctaggatgcttggaagtaagggattaacctggggaagaagacctgggtgaagtctcctcattaccccacagggcagccaaggtgtccaagggaatatgccagccagaagatgagggacataaacccaggtcagaggaagatcagaagaatgatctagtgggttagtctgaggcaggaaagatgcacatgcgtggcagctctggcagctgacctcagttagcaggtgggctgttgtggtgaggaggaagtacacttgtctggccagtgggatacacctaagagctattgttttggtaaaactcaaattttgggagacatttttcaatgcagttgaatgactttttaataggcaaagctgcccacagatgcataattcttttagagagtttttggtcattgttggtatttaaacaaaagctaggtaaccacttgatgggaatgttctacaaagaattttagcttctgaaagagggagacatcagataacatttatacccttgccaagattctaacccccactgaggttctatgaattccatgaatctccttctctgcaaggttggataataatatgcacaaagctatgcatatcttgcagattggaccaccatgtacagatatgcaggttatgcactgcacacctctgggtggtaccattcacagaaattgagctataaatagggctcttaggctgtcaacaacctgatcaataaaatgaagcagcactttttcagaactgttcttaggactgaatgtcatataatttaagttgtctagtgcagaacttgacatgcaagggaaagggcatggtccctggtggaacactgggtatggtgccagctgaggaggcattgaagaacaggagaggaagacagggctgaagataaaggccggagtatggagagccttgtttgaggtaatccttaagtgcatggggagccatggagatatattaagcagggaaataacaagagcacatttataaattaaataaacaaaaaagaccttaatgctgcatggaaagtagattgatcagagggttgggtttctcattgctaccattttatttccatcccctggtacagtgcctaggatttattgtagtgctcacataaatgagtgattgcatgactgatggatggattcatggattcatggatgcatgagcggatgaaaggatagatggatggaagggtggatgagtggttgggtggatggatggattgatggattcatggatacatgatttgatgaaagggtagatggatggaagagtagatgagtggatgggtggatggatgaatggatggatagacggatggattcatggatgcatgattggatagaaggatggatggatggaagggtggatgagtggatggttggatggatgactggaagaatgcatgagtgaagtaacatctctgaggcccaagcatcactcttctccctcttttctgcagaatgttcccaacatgaggcctgtctcatcaccactctgcaaacccaacctggggctgtgagatgtatgttctatgctgatactcaaagctgcacacatagtctgcagggtcagaactgccgacttctgcttcgtgaagaggccacccacatctaccggaagccaggtaagcccaagcctatgcctttgcagccatcctgggaaactgggtctggggaagggactatttaaacacttggtgagttggaggacagtggcttttgttggccaaagttctgggctaggtggcactcacttgaggtagactgaaggaaggtagaaaaaattcctacttctgtatcagttttattcatttattcctttaagttatagaagccatcttggttttgaagcttcttagtaaaataattcaaaagcccactttttattatggttttgtagtttagagagttctttcacaggccttatctcatttggtcctcacattaatcctgtgtggtggcaggataagggctttatccctgtcttagaaatcagaaggctgtagcccagataatttaagttaattctgtgatttcacacagctaatgatgatggagctggaacttggagccagatcacctatctcaagatgcaatcctctcccacaaagccatgcagcctaactatcgcatctaaacacttcagagagagaagctgttcctggctgagtttagttttaaaacacgtgtcagatactgtgttggttctggggctccaggcaaggcaagagggagtagccataaatccatcactaagtaagactgctaagagctgtagaacaggaaacagggactgggcatctgggggaatcccctcccccactagacatatttattggatgaaattgatgactgttgttagctacatctgccatcttgtcttctagagcaaggttctacaaccattcttttctgttaacactaatcagctgctattgtagcatgggagcagcaataaacaacatgtaagtcagtagatgtgactgtgttccaataaaactttatttacaaaaccaagtagcagcagatttggccccatgctgtcctagagcattgacagtcctttggttctgtcttgattccagagatatcttcctcttctgccccctcctcagccttagccttcagaccacaagagtgtcttccagacctgagaatgctttgatcgctaggtgatgagctgttaggccctcaatcgtaagtcttgccctctctttatctggacatttatattatttagtcaggctatgtagattttttttctgagacagagtctcactctgtcactcaggctggagtgcagttgcacaatctcgggtcactgcaacctctgccccccgggttcaagcgattctcatgccttgctgggaatacaggtgcatgccatgatgcccagctaatttttctatttttaatagagatagggttttgccatgctggccaggctggtcttgaactcctggcttcaagggatccacctgcctcagcctcccaaactgctgggattatagattttaatagtatatttcacaacagtgtgggcaatctgtgtggtagttctgctgaaaaatgacttaacattgaggtttgagttctgtaaaacacaaattagactgcttctctattacttcagtgtgactaaaattcaatgggaaatgctcacttccaaaagatgtgtgcacatatgcatctacaggtgtctcaactttcacacagacgttatttgtttacagctaatacacatggccacagataattttcttaacccaggtagtcacgtggcctctgtgggtattctagaaagaatctaccatttctgcaaaagaatttgaaagagataacttcacatctaacattttccccgtgtttgatctcattgagttggggattcactgggcagcctctgaagggaagactgaataccactgccatgggaaagcaggcctgcattcccccaaaattcttcagcctttatatttgttctggctttgctcccgcctttggatgtgccacgtatacaaaatgtggctgtttcctgcatagcagaatgaggttccagcacttcagcagccacggtcctgagtgcttgcccaagaccccttgatttatgattgtgacaggaagttttgcaaggaggaactatggggtgacatcagccatgatttgtgattgaggccagattaaaaaacagcaactgttcctttccagcctgagtttccattttgagttctaactcatattccaatgtctttgcgacagagaaggcttcatttgctctttttttcctctttctctttttttctctccctgtgtccccccacccctgccaattccttccttttttccttccactcattcattcatttacttatgtgttggacttctgccatttttcaggcactgagcttggaacattacaggtgttattatttattcctgttgtaggagatgctattgttcccatttcataggcagaaagactgtaaagtttttccaataactagctgttccataagcataaaacccagatctgcttgactccttaaccaattcaccatggtgacgctcagtgacctggaagtcaaggacagacatgatacccaggcttctcaacctcagaacccgctgacatttggggctggagtattctttgttgtatatgtgtgggagcagtggttgtcctgcctactgtaggatgtctaacaacagcccttgtctctcccaccagatgtcagtggcatctctccctgacccctgtgacagccaaaaatgtctccagatgtggccaaatgtcccctgtgggcaaaattacttccagttgagaacctctatatgatacaaagctcctgcggagtagatggacttctgtctgcaggtctatctgcctcctctccccactgtcttgtttagtcaccactgcaatagatacatatttttatagaaggatctgcagagaaagcagaaaggctttgtctgtcaatcagccgagagtggagttcagcagaccaaatctacgtgtcagaaataagagacttctcacacacacttgaagtatctctccatgagtgtttaccgcttcctttgtgcagggctttgagtcctgtgtggcatcagacaggcctgtcttaagttcctgaaaacagtacttggcactgagcctgggcccaacaaaagtttaccagatcaatcaatgaatgaaagaaaatgtcgtcgaggaaacaagatagggctacagagaaactgatgaacgtcgctggcgattagtgttgcatggagcagggtgggaggcatggcaggcggcaccagtgttggccttgtggacaaggagggatttggacatgaaaaaatgggcaggagggcctcacaagctggggcacccagggcaaccttggcgcagagagaggcaaagctctgaactggtcccaaccctttgtgcatggggtgtggtcagagctggggttgagaaaggtgtggctttgaatcctacatcaccctatatcacctgtgatcctagcaggccctaggcctccacctctacatctcttccctcactaatgagatgtaaatgtgggcctgcaacccctgcactgcaattctgaaacccaaaagtcctaaaagtcttttttttttttttttggtaagtttacagctaactcatttggcagcaaaatctgacatgggtggctgaagaaattctattctttactcatctctctcaggatgagtaacccacacatctcaccacagaaatgttggctgtgtttaaaggtggggctgcactccagacctccccaggggattgggtgttgtttgctgtttgcttctctgttctttcaaaaggccccagggtgctggtaaagggtcctgggcctggatccatgtatagaagggattagcattgcattctgtgcattttggtgcctaataaagatcagctgtttttgccattttttttgtttgtttacattgaaaacctgactacatttaagctgtaggggtctgaatgaatgattgacattttcaaggtgcaaaaaccgtgatttttcttttgttgaaagcacattcagaatgccagtggagagagcactcactgaggcctctccccttcctcacccctttctcttccctttcccaacaggaatctctctgctcagctatgaggcatctgtaccttctgtgcccatttccacccatggccggctgctgggcaggtcccaggccatccaggtgggtacctcatggaagcaagtggaccagttccttggagttccatatgctgccccgcccctggcagagaggcgcttccaggcaccagagcccttgaactggacaggctcctgggatgccagcaagccaaggtatgggttgagtggagcacatcttggtaaatgctcagagaaatctcctccattctaatctatccaaatgggactcagtagcagagcagtgcattttggataaagcaatgtatggaggatggaatatattagctaagatatcattaagtgctgtgacagataaactcctaagtaacagtggcttaacactgttttgctcatgtaaagcccatcaggtgatggaggggcctgtatgctctgctccatgcagtgattcagggacgcaggctgatggaggctctgccttcttcagcatgaatcttccaaggtcccctggacattgatccaggaagagaggctgtgaaataattgacaggagaggttcccatagaataagcctggaagtggggttcacacatcactggcaccgctattgcagtggccaagctcagcttcctggccatatctgatcttaatgaagctgggagacacagcattgaagggaaagtaaatgagctaatgaaatttttcccactaggaaaaaaattacaagttttttttttttttagggcacccatatcctatcttctttcctcatcaaaaatttcattttttcctcttttccatgtgtataccactttaaatagcaagcatattgaagaacaatattgtgatttttttctaattaaagcatactcggagtatctgtgaaaacagcacttattactgctgctcttctccttcccaactgaatctccttcccaacaggtaccccatggctctatcctcaggcagctgcaacctccatacccattatcaccatggctggctgctaagcaggtccatgggcccattactagatagagtgatgagctaggaggctcttaaagtactccaggaaaagggtgataagggcttcagctaggatggtggcagtcggagtggaaaggcatggatttccatctgctccactgctgggaaacaaaaataacaaatatgcgtgaattaaagtgccttaccatgttaggatgtacccatttgacagatgaaatgacggagtcacataggtttgagtggagagtagttgagagcttgggtcattgtagtccagggctagtaaggattaggtgatgagccaagtcacccattgggtagatgaccattgcgctgccattagtcatagtcacagctgtagtcagctctcatactgggagttgctcaaaccagcactgtaggactctgtactggtgtagaaagcaggtaggacaccccctccagaggagagtctgcactcttggagcaaagaagggccaaggtcctgagtggctttcattgtcttcttctctatctcaagctgttgcatcagcagacttctctaagttggtgcattgtctctggggaatgttcttccacaggccagtggccagagagcggtgggcactctgtcattccctccattcactgaagctgaatctttccactcccatttcctgaagctgcctaatttctgcagagctggtgggatgccaggctttggaatggggtagtgggctctgaccatggtggtgggtggggaggggtggtgatggagcatgtcttggaagtcacccagtctgtatctgcagggccagctgctggcagccaggcaccagaacatccacgtctcctggagtcagtgaagattgtttgtatctcaatgtgttcatccctcagaatgtggtgagttcaaaagcacttgctatggttgccctgaagactgtcccattagaaatccactgtccccactgtggccagcacagttcagtctcctcctctgtggcctgctgagctgaggttaggtgatttgcctaaggacactcagttagtgagtgatctgtggacttggtcagttggtcctcagagcttgtggctagaaccagtgagtggtgaccatgggcgtgtgctttttccatagtgtcaggaagaagactgtggacgtggtttgcagtttaaagagcacttttatatctatgattttattggtcttcacatcaactctaggaggatagatagattgataaatcgattagtcaatcaattgattgacagaaaaatggagagagatatatttacccttatcttaaaggtgcagacctggggctaagagaggctaagtgagttacataaggatattcagatgggcagagtggaggctcatccctgtcgccgtgttccaaagccagtgctctttcttcttagggcatttcccagtaacagagagtttggctttttctgccttgggctgtccgggccccatcctgaccttggaggaggagcagtgttacctcagtccagatgggcagtacctggcctccaggtgacaggccctgcacaggaggggccagcctcctggacacttcctgtggctgtcgttgaggcgggagctgaggactgcctcttctttctgtgccttgcccttgcctcagcagccacaagccaaacggccttttcccttgttggtgagctacccaataaagatgagtcgggcacttttaggagggggacacagggccccttcactgatctgtcccacagaacaggacaaatgaactcaagaccactcaggctggtctttctctgtggcatttaaaaagacctcatattcgaagaatccacagccaccaagtggtggcatctgagctggaatgtcagagaggaagagactccaggtcagccccttcctctctgaaaggcatttcaatgagtgactccactgctctgaaactctgctttcacagctgtagagtggggtgcttatgttcaccatagcttctaccaccttgggtggaagatcaaatgagacactctagggcagagcctttagcacagcacttacgggggcaggtcctcaggcagtgtttgctcacgtgagggggcccctttgtagaaacatctgtgtgtctgtctgaggccatcatatgtggagtggtgatgtcacaaggagtcaggaccttggatggagcacgagttaccgggtgcctgcctaccccatggcctgaactggggcctcagatccccagctcagacacacgattctaatataatagggtcggcctacttccaaaccctcagctctgctacctcctagctgtgtgatctcaggcaagccattcaacatgtctaagcctctgcctcttcacctgtcaaatgtggataataagaatctgccaacttcacagaactgtttgaggccccattgtaaacacttggcacagtgcctggctcctagtaagtgcatactaaactctagctctgtgttaccaagatgggtccagtcacagagcatccaagggaaaggggacgccaaggacccagaatgcttttttggaataaaccatgggccagaactgggagctggaaggctgtgtgttaccatgagacgggctccaggtctgcagggagcagccatctctgacacctgctcactctgcaatgtgggagaagtgtcctcaccttttgtgaccttcagtttccttctctatgaatggggtttaatagttgctcaggctgccataacaaagcactgcaagctgtgtggcttaaacaacagagagatttttctcacaattctagagacagaagtccaagatcaaggtgttgcaggactggttccttcagaggctcctctccttggcttgtagatgttccttttctcttccttgtgtctttatgtggccttccctctgtacctgtgtcctgaccccctcttcttataaggacaccggtcctattggtgacttcattttaccttaattaccacattagacactatctccaaatacagtgaactgctgaggtcttgggggctaggacttcaatgtataaatttagagggacacagctccatccactgcatggggctaagtatgccacagagctggccagaggagtcctgtgtcaaccaagaatcaggctccaagcatgggaaaggtgccctccccacactttagcctcatgtttctccaatacccacaggcccctaacgcgtctgtgctggtgttcttccacaacaccatggacagggaggagagtgaaggatggccggctatcgacggctccttcttggctgctgttggcaacctcatcgtggtcactgccagctaccgagtgggtgtcttcggcttcctgagttctggtgagttgctgcctctggtgggagctgctgaccccctgagccaaggctcagccccttttccccaagacccatcccctcactgcccctgctcctcctccagccaagctaggcacacagtggaaattttagcacatatgggagaccctccggggatactgacacccatagacaaggatgatagttgccatttattgataacttactacatgtctgagcttcactgctccaagtccattacaggtcttatcttgtgatgtgtgtgtatgtgtgagtgtgtagtttaaagaggaaattgaggcccaagaagattagaaactggcttaagactatacagtcagggaacagcagggccaagaattgacttgccctgaacaaccccaggggatgagttacatagctcttctgcccacagggaagccatctgatttggaatcagggctgtatcaataaggagattctcacctccttttaatactggcctcacttgtgaacaatggcctgtccctcatcacaaacctgttgatcaccccatctatggcctccatcttccccactgactcctagggctgaagtgagccctggaccaacctaaacatcctccatccacgtcttttcctccagctaccacatgcagcagggaatgtatcagctgcagtggtcgggacagagtcactgacctaggaatctgaagagcccagggccacctccggctgtggaccctcagacaaaacctttcctttcacccagtctcagtcttgtcctcggtaaaatggggataattttacctgattccaaagttatgaggaggcttaaatgaggtaatacatgtaaaagggtttcagagacttgagttttgcacatcttcgaggatagtgactgcttcatctctgtttcccaagggtctcatttaagatctgagatatcctacgtgctaagtgtgggtgggtgaatggaagataggtggtcggaatgaccagctggactagaatgtgtgtgaatgtgtggggtaggcgtccagcatgagcagaaacctggatgaccacatggcatgaggccttggatgctgctaagaagattctagacttatgaaatgggcaacaagttaagacaaataacaaccagatgtctatgtagatgaggatgagaaacagatttcagattttttttgatggggagcagggtcagctgggaatccaaggacggatataacttcccctttcctggctctgagagactctgggtccctcatttggcctttccaaatctcagttttcttggtggtaaaataaggaaaattatccccaccctctttcacatatatgtcgtggtaagaagtgaatatggtaactggggttttgtggaagctctttggagagtgtttaaagaattattcacgtgtgagtttattttcctctttgaagagggagacctcttggcctgggtttgctttcctctgtgtgaacacaagactgaccataatttgtgccattggtagccccttcctctagaggtggtgacatcaggactcgccccaaggagcctgggcctggggaacttttcccagacatggctgtcttgttggcttagagcatttctagacagaagagagtttccatatgtcgtctgtccctcagtgggcgggggattatgatttcacagagtgtaatcttgttgagaattcatgtgcttctggagaggcaaactcattttggctgccggcaggggcagcctgtgggaaggaaacggaagcttccagaacacccaacccgctcattcctgatgtgcaccaagcctgcctgttcattttgctcaagggaaaaaccatcagcaagagagaaggaaagttacacttatggagtgtgtctgtcttcaccagatatttctcctggattacctcatctatttctcacaggagatctctgaggccagcagggagcagccatttcacagatgggtcagcggagctcagtgaggctgaggaatgttatcgccacagtcacaagtggcatcctgtgccttcaactctgttggtggaacaacaagaaatactgtagtgcaggcagctccctcagatggctggacacgccctttcaattccctgttcttcagctgtgctgaacagtgtctgtcttttgcattcattagccacaggccattttctttctttctttctttctttctttctttctttctttctttctttctttctttctttctttctttctttctttctttctttctttttctttttttaattttactttaagttctgggatacatgtgcagaacatgcaggtttgttccataggtatacatgtgccatagtggtttgctgcacccatcaacctgtaatctaggttttaagccccacatgcattaggtatttgtcctaatgctctccctccccttgccccccgccccccaacaggccgtggtgtgtgttgtttcccctccctgtgtccatgtattctcagtgttcaactcccacttatgaatgagaacatgtggtgtttggttttctgttcctgtgttagtttgctgagaatgatggcttcctgcttcatctatgtccctgcaaaggacacgatctcattcttttttatggctgcatagtattccatggtgtatatgtgccacattttctttatccagtctatcagtgatgggcgtttgggttggttccaagtctttgctattgtaaatagtgctgcaataaacataagtgtgcatgtgtctttatcgtagaatgatttggcgattcctcaaaaatctagaaccagaaataccatttgacccagcaatctcattactgggtatatacccacaggattataaattattttactagagagacacaggccattttctttgccttccttcctagcctgcctcgtgtgtcccacattcccagacttcccagtctctcacattgcgcctccgtgctcttcagctctgagaagggagcaaagacattcacatcctcaccaaatcattcaggaaactgaggcacagagataaggaaagggcagagcagcagcagcagagccatgatgcagattcaggcttcttgctatggaggagctatctcccgcctgcctcaggcaagctcagagacaggactgagcctggccctgcagaggccaacaggaagcaggtgctcacatcctgaagcacaaaggggccagcccttgatcccagttaatcccccaataagcctgcgacactggtgcaactgttccctctttcatattttttaaataatagattttattatttagacctgttttaagtttatagaaaagtgagcagaaaggacagagagttcccatacactccctctccccctccttcttgccctgctatttataagatgctttggttgggcacatgtgttacccttgatgagccgatggtggtgcattatgatttactgaagtccacagtttaccttggggttcgtcctgtgtgttggatgctctctagggtttgtgggttgcctgatgtcctggacccaccgttacaaggtccaacaggatcattttgttgccctccaactttcctgtgctccacctcttcatctctccctttttccagtttaagtcattgaaaattgcagttcagaacatagatttggaaagagctggttactttgcatgccagcctcagcctaggattctgcagggaatgtggctttgcatctgagcaggatggggtctgagagctgctctgtggctctgtggggccaaaactctgagcagctccttccttccccatcccagtgcaggctgcctgtctgcaagcagaagatgctaagtcttgcagggcgtctcacgtgagatgaagtgtgtgaggacaagcaccaggactcacccatgtttattccctgcttcttccctagacaggggctcttcccaggcagggctgtgtttttatcatttcctggcccagtatctagctgcctcctggcacagagctgcctcctgatctcagcagtggcagccctgtcactcacagagccaggctgagcagcccctcgtgagcatcatctcatttgataaatatgtgcagcatctgctgctgtatcccagagtgaaaacggtccctgagagccccagactccagaggtactttgtgaaagagaccagaggaaaacgaaagcagaagctcgtgccagtcctgaggcccactagacaaacgcatgctctctggtgaaaaaaggcaagcccagcccagtgtttaaaaggagtcttggttcctacggatgtgagcagttggaaaggaagcagttgctgggtgaagggaggccatttccccaagcctggaccctgtagcaggacagaccccagggggcatctggcaccaagttgttgttcctctctgtctggcaaagcaatgcagtgaagggaactggggtggtggcatcagacgggacacaggaggataggctggacaaggggcctatgggctctgcagggtgtgggagcagaggaaatgcgctttggccaggacaccagacagaaggtccggctgccaacggtaaccacacatgccatgacctcattgtctctgggacactcggaggcctactgagcaggtctgctctcctctctacccaaaacaggctcagaatgctcccccagtgggtgccccctcacaggcaggctggagacaaggacacactgctaggagcatcagcaacataacgttagaacctacacttgttctattttattaaaaattaatcttctatggtgctttatgacaagcactgttctgttccccttacaagtattaactaatttactcaaccttatgaggaagtgctattatcacccccgttttacagatgcagaaaatcaaagcacacgaacattaacttgtccagggcccctcaaggctgtacctggtggagctgggactgcagccggctggtgtggttccatggccactacactgcactgcctcttgttgatgttctctggaaagaccagggcgagcccagaacagtgctaaggggcttctatcagatcgttgaagagatcgaatgagcaaacaagagccaattcaacaatgagggagcaggtgaatgcttgctgggtgctctgagcagaggagtaggagccaggaggtacggggcagaccagggcgggtggcagtggatggagaagagtgttagtgcaggcctggagggcttccattcaggtcagttctccctgtgggcagctgagagcagtcctctggtgtcttgcccctgggcccaagcctcaaagcacatcagaaggggcaaagagtgtgcctgtggtatgactgagtgaggtggggcctgaggatgagaagaactggagctgagacacacagactgcagcagagggggcggcccctgggcagtgatggggacccagactgatgagatagcctcatggcccatcttagaaggtcaggaaggccaggaagaagtttgcacttgatgcagtaggaatgagggaggtataaaggctttttgaacagagaaagtttcagaaataaagcactgaaaatttttaatgcacatcatagatttttcaacaaatgtttattgaattgggttgaatgttaggacagaattctaattgtgaaataggatttgagtcccaacttgatctcaaattcacttcttgcatgtaaacaagctcattccctctaaagtttcagtttcttcaccagtaaaggaaaaggttggaccagacatgttggaccgtaattgcttggtaactgccttctgcatttgtctctgaggttgtgtgtccctaggactaggtaggatctctcttgctttctgccttacctagcatagtgcctgatagcagctgaagcccaattcatacttgtttgatgagtggccccttgagcacatgctcacctctgacctctcagaagtctagaccccagaagtcaacattgaccctttttgtgtagtggggaaaaagctgatacatgggaagggagagtcaggaacatttcctctcctccttgtccctggtatacaggctgtggacgtcacttttcagatttgcaggacttggtctgactcagttggtgccctgctttcctgggttacctgagaccttggaggaaacaaacacattcatcctaacaaatggatcatatgagcaatccagaaagttcacagcgaggatcatgttctaccaatggcttcaccagtcccagaacacaaaatgcatttgaagaacttttgaacatctccacagctggaagaataatttgtgtcgttatgcactctgagctaagtggagtgctcaggcaggctgcagacaagaacactctgctaagagcatcagcaacataatgttagaacctaaacctgttctattttatgaaaaagtaatcttccatagtgctttatgacaagcacggttctgttccctttacaaatattaactgatttagtcaacaaccttatgaggaagtgctattatcacccccgttttacagatggggaaaatcaaagcacacgaacatgaacttgtccagggcccctcaaggctgtaagtggtggagttgggactgcagccggctggtctgcctccatggtgagaccatggtattctcttcaactttgtgattactagactggggaatcaggatgcaagatttttctgttttttcttttcttttttcctatttgggaatatggggtctcatcagtagtttcttgctggatgctgaatcctgtgaatcataactatggtgcctcatggagaaacgtgaggggtctggagctcggggagtgggctgggccgctgacacacacaggaccatcaccaacatgtaggtggtaatgaaggccatggaacctgatgaggttccttagtgcaaagtcagaaaggaagaatgggaacctcagatgagacaagaatgagatctggtgtttcaaggtctgataaagaggacaagttagtggagtagtttggcaaggatctactgaattcacaagacaacgagaagtgtatgtagtgtctcaaaaacctaaggagaagagcatatttttgctatacttgtttgtatctagatcattttatttaaaaaaaaaaatagtgttgagttttcaacaaatgttaattggattctatgaaaaaggaaagagatcaattcagttgcatgctaataaaggcttcagatgatgaggtgaggggaagggtgggatccagagctccagcctggcctggccattgtcagggacaaccacctgaaggggtcaaagacatggggcagagagttcacctccttcccactgattggccaagacagtggtggacctgaagctgtgctgcctcaaatctgagcaactcccctcagctaatgacagggaagctgtggctcagagagttgtaaggacatgatcaaggtctcctagctggcaaaggagaggtacaagaacatgatcaaggtctcctagctggctagcattcaggcctatgtgtgtctggtctcaaggcccatgctcctccactgttcctcactgtatttggaacccacagtctctacctgtgaggacaagagcccagagcccctggcggggccgcatatatgcctgccatagacagcaccatgattttcaaatccaaggttgtaaagtcacaaaggataaaaggctttcctcttttctgaagggtccggagaggtgagtggcaactgggggctgctggaccaggtggcggctctgacctgggtgcagacccacatccgaggatttggcggggaccctcggcgcgtgtccctggcagcagaccgtggcggggctgatgtggccagcatccaccttctcacggccagggccaccaactcccaacttttccggagagctgtgctgatggtaagtggtgtgtgttctaccttcagtcttactgcagatgcggctgggggaggtggttctcctgtgctgcaaaagtctagttggcttcaattgcttgggtttcccttgtcctttgtcctgagtgtggatgctgcttggagttttccatgtatgtgtgattccacaatgctgaagagctctcctgacttttttccactcacgtctgaagtgctaaaaattttagatggtgaagtgtttctatttcctgagagtggttcattaggatttagtgatctgaaccatcaattatctctcttgtcaatgcatgatggtaaagaagagaactcactgttcgcaattcttctggatggcctgaagtgccggctacgtgaggctgatgatgatggtgatgaggaggaggatgatggtggtaatgatgataatgatgttggtgatgatacaatgatgttgataatgacaataattatgatggaaaaaataacctggttggccactgcatacgccctggtatttactgatctgtcattgattagtttctaatttcatggcacatccaattggtgccagatatgctgtgcaagatgctggaaatgccatgaaacattatacataacccagttcttaggaagcttgtcattactgggggttgagggacaaatgcttaaagcagatatttataagaagatctcagggcagccctaagagaaggccccagccaagcataagggaaggagggagtttggatcagcacatcccttgaggggagtgtctgagccaaatgctgaatgctgggtaggcatttacctagagacaaagtcctggcaacagggaaagcttggaggacagagccctggtggggcagcagtgtggagcagagatgagccagactgccctgaacagcttgagttttatcctgagtccatggggagccttcagagtggttttgattatttatttgtttgcttgtttgttttgttttatgattttaaccattttaagtgttccgttcattgggattaagtacattcccaatgttgtgcaaccattactactatccgtcgccagaacagaacctctgtatcctttaacaacccccatctcctcattctctcagcccctggtaaccactactctactttctgtctctatccacttgcctgttgtaggtgcctcatattagtgtaatcatgtaagatttgtcctaatgtgtctggcttatttcccttagcataatgtctttaaggtccatccatgttgtagcatgtgtcagaatttctttcctttttatggctgcataatattcctttgcgcagagggaccacattttgtttatccactcatctgttgatggacatttgaattctaccttttgcctattgtgaacagtgctgctgtgaacatgggtgttcagaaggcctttaagcaggaaggaaacgtgcttagagctgcccttcaggacaacctctcttaaagctgggtgaagaatgaatttaagaggggcaacgctggaggcaaagaaagcagttaggatactgtaaagttactcaagttaaggaaagatggagaacaattaactgtacctcagccttgcccaaccttttagggatccaaactcttgatcctaggagggtaggagaagtgtcattgtttgggcgcaactgatgctaggtcagcattgtcaccattgccaacagaaagccgtgtcacctgccacgcatctctctccatcagccacaggagcctttcatgttccttggagttcatgctctgttctggctcatacaggcagtttcctttgcatggaacagtttttccccatccccctctttgcctgccctacttttcctttagagaagccttcctgacttttcagcctagaactgagccctctttatatggcttgtgctgcctgtacgtctcctatgcagcattcaccaggatttccaacagtaagtaattgctcttagtgccaaagctgctgcctcacaagactgctagctccagctgagcaggggctgggtgtgccttgctctccacgggaccccgagcaccccacacagcacatcttagagtccgtggatgtgccataattattttggggcagcaatgagcagatgactgggggaagtttcagttgttgctctcggggccccaggacccacaggatacaccagctccctcccttccacccctttcttgtgagtcttgtcctttgattccagttttctgcaatctgtccctccgaaggtgatccatctcagtggcaggagaattgagcacaaacatctttcaattcctggtgttgaaaacaaactatcctgcgttgaattgatcctggagagatttctccagggccctttcaaaaaccagacactcattaggacccagaagatgccaaaaataccttccaatgggctcagaaagcagatttttctttttgagggtttaagtgtttggggaatttcaaatactaatctgttttaacaaatggcagtgtatttaaaaataaacccttccatctgttttagtcatttggaagtagcttttacaactgctcccagcagtccttgggatgcatgtgaaattatttggaattgagagaactaaaatacttcaatatattagcagttcttaaatgtgttctttatcaacagatgtttggggaaatgaatatgagttggcagtttattctgggataaaatcttaagtctctctgcaaatcttggggccagaactgttgaaacattggtcaagggaaaccctgtgatgataatgaataacctgtattcattcagcacatttgagaccacaaagcactttcagtgtcttatctcacagattccttgcactgattggcatggggactttattttatttttcaacctagagataagaaatttgaggctcagagagatttagtgacctaccaaagaacacacagcaaggaagaagctgtgttaaggactagaacctaaagccaagtcctgtatttccccactctgtgatgctgcctttccaggaatttgggactctcttggggtctcaaggtgtaagataaagagctgaagcctaagatcagataggcctgcatgaagatcctggtcttggagaaaacacttcaccttgtattcttcacctatcacatcaaatcagtgtgatgaattgtatttcccaaggtcttgagatgttatcaggacttatggtttgcaaactatcttgcacaacataggaactcaagaaatcaagctccttcttccctcttcccttgccaagggaaggcaactccagatggaagtatgtcctagggtatttcacccgtcctgaggccaggctggaggatgaaggatgacttgttgcaaacatgcatcctgtggctgtgtccctgcacagtcttcagacagggaaggtcatgtcctctgtggtatgattcacggacccagaaaacatttcccttgctgttctatgacagcgccccaagtctgcattcctcagggtgaactcctgacctcaggaatcagcctcaagctaaattttctggtcttgatttttactccattcctgcatgaatcctgcatgaatcctacactccaggctcactagctatcacccttctgaggaaatgccatgccttcctccaggcctttttatctctgttctgtgttcagcatatccagtatccacctggaaagttcctgctgtccttcagggctcagctgaaatgaagcctccaagcctttcctcatctcttgaaacagaaggaaagaatctcaccttagtgaaaacacttatatgtagcaatgcttagtaactgtgccttattttacatgcttattatttttctaacatctctcattccaattctactatgactaggtgcttgaaaacttatatgagtttaatccgcttagtgtttccttaacacttagcacagcgcttggttcagagacagtgctgagttccactaaagtgatgagagagatggtggtttggactcagaacactgttctctatcgtttttgcagtatatctcatagtgtgagcatgctatgcttgtctattcagaattcaccaagatattcatgagttttgatgcttctacatgtattttagaataagcttattgaggttttattctaatatttttgctgggagttggagtgacatagacttggtcattaatttcagaaaaaaaactacattgtaatggtgttaagccttgcattcatgaatcaggtaaacactgtaaccatgaacgtagtatttttgccttgttaggtctttttgtacagttttgaacatgttttaataaaagttttgtgcaatcattgtgaggtaagttcctacacatgccatcatttgcttggtattatcaatgctgtcttcttttctattgtattttccagtttgaaaatactagtgttaggaaataagtggattcagcaatttgctgagctgttttgtcacgtctaatgctttgcctgttggtttctttggattttctatgaagtttcctcgttattctgcaaataatggcgggtttatttctatacctattgaagcaaaatgctcaattgatataaggaggagacccagtactaaagcagcttagtggataaaaaagttcattttcttttttctttctctctctctctcataacatctgccaagggggcagtccaggtgtctctggatcactcagggctctggtttcttctggatatttctctgccatttcttaaggccttcctcatctgcagggttgagtttgggctgccagggcttccagatagtagggaggggatggagaggaaggaggaccatacctgccgtcttagggctttgctggtaaggggcacactccctctttaggtatggttacaagcagaactgcatttgatttgctttcattctccatcatctttcttgatcatgcttgttcatatttttatcacattagtctacttaaacaatgttttgctttttaaaatcttctctatggctgtgttttcagaagtctatttcactgatgtcttattgttatcttctaccttcttcccgtttccttggttatctattgttcctttagcttcttaagttgaaagttaatctcattactttcattctttgtttcctgatcaatttatttcaagcaataatttaccctctatcagctacacccatgaaattttgaaaagtagcaatatgtcatttatttataacattttatttattgcattattttcttcttaacctaaggatttgttttttagactttagatccctagaatttttaaatttttattcatcattttggaatttgatttccaattttattgctttattatcatagagcatgaattggaagattctgactctgaaatttattagtactttctctgtgacctaatacattatccatttgttggcagaaaagttatatagtgttatcaaaatctatctacctatttatttatttacttatctttgcttactgtatcaatttctgagatttgtatattaaaatctccaaataaaattattgacttatctatttgtccctgttcagttgcttaatatattctgaaactatatcatcccattaacataggttgcaatcattgtttcttcttaatgttttgttccttttgcacatctctctttgccattatgcaatttatttcaccttaaatcccattttgtctcaaaatgcaccacaggttttccttttgttcatttttgcattaaaattttttgcccctttattttcaaactttgtgtgtcaatagacaatacaatgctggaattttaaagatttgtcctccacacagcatgatcttttaaacatatcagtgaaatggtcttaccccctacttggatcctttcaatggctcctcatgtctcctggaatggaccctatgccatcccctaccctctagggccctgcaggaccttcctgatacctcctaagcacactccctccttccctagctccctcagtctggccaccctgcctccttttagctccttcagcatgcagtcttgctcttcctgcctgcaggaattgccccattattcctgctgactccatacacttcctagatctttacaaggctgtttgctgctcatctttcaggcctcagcccaaacattgcctctgcttggaggcctttcctaagcctggacctgaaggatgtcctgcctgccaggtgactgcttggagcctgccctcatcctcatcaccatcattaccaagcatcttgtttatttatgatgtcaagctccatgatatcagagacctcatctggttttcattgctatagccccagtacctgagcagtgtctatttagtaggtgtccagaaatatctgcagaaagaaattcttggaagaacaaatagcgcagctatcacaagtaacgtgcagaaaatctaggcaggacgtttttataacaatcgttcagaatttggtgtttccttcaatcccttaggcccatcttcaagtttcgtaagacaccccccagagtcatacaatctgctttttcttaaggtcacacctaaagaagatgctgagctgctaactggcaccaggtttctctgggtgatctttactcctctctctctagttgcacgtttatttgaaaatttgaaacccactgagcttctgaatgaaccacccatcctcctcaacccagaaactctccctgtgtgccaagggttaaatatttattaggtttgttttaatcaggaataaatacatgatttagcaaagtgtaatgcttcccactgagaaatccctctgggtgctccccaaatgttccaatcacattcgtcacaacggaaaacaacacataagatactgtgcagacatctggagttcagggggtcaccctgccttatgcgggaagtcaatgtccacagtgttacattcatttctcatacgttggctggttcctttgaaatagccttttggaacggttggggaaaccacagatgtctccttgtataaacacactagaatctatgatacagaaaactgtgtaactgcacatacacataccagtagcacgatgagctcagatggacggaatgcttatgtgagcagacagacagggagagatactgcaagcatgttcccctccttccccaggatccctttgaaacagggaaacatgagtcacagattcatctgcagcccactctcttcctagtaggatttggatgggagcttctccttctctggctatacattgtgttttctcccttgtctcttaaaattatgcatgacatcattaatccacttggactccccatctttcctggagctgagcatttttcctcatatggatgccagacccttcttagaataaagtaccgggtgagttaattctttagactgtatccatttcttttctaaaaaatccagctattcttacctacccgatccagccagcccttccactctgaagagcagctggaaaatgagctcctgagtgtccctcacctgtctctaattccatcctaagccatgagctgatttctctttttacacatttgtttatacattttttccctgtctacactgtgaacacctctgttgggggttaggacttacgcatcttttttttttttttggcttgcctgacaccttacagaggacttaatgcaatgcctattcgggcaataaatgaatacttgatgcattcatacaggcaagaatcccagcatcccagagaagctctgtctgcgctgcaaagccatggctgcagacatcagggaagctggtgcagttctagtctcgcctcctcgatttccctgccagcagtcttcctctctctcattcttctggccctctgcagaaccagggaggccaactgacttccacccatatggctttggtgcaggagcagaccaaaggtatctcccaattgaaggctaagaagtcctttgggctaatgtttagtgtcacgaagttcctttaaaaagagaggaaagcataccagaagtccctatggattagttaaagtagttccattcagggcacccatctgcaaacccagaccttctgccaggacacagcttttgtttcctctccctctcaggcttgcccatacagaagttctctccaatgaccttggagtgtaactgtctggacaggtccagttccttggagagcagtcctggtgccctttcttgtgagagtggctttgtccttcccacacacacaatgtgtgcatacatacatgctgggctcttccaagcatcgcccgacatgtcatgatccaatgtttcgtgatgccacagccctgatcagacaccagggaggggttcctttggtcatgatgtggatagagaagatgcgaatttgagtctccatgtggcttctcttggcttctaaaatacgtgaggctcccagggatcagggaacctcgcttttcgcaagatcccaggcaatagttggaacttctgttccttttgggcatgaaccattgtgtctgttcttggctagtcctcaaagtaaggtggtgatgagaagaatgagctctttctcttgctgccaccatacatcagggagatgcttttcttctttcgatcaaaggaggtgttgtcctcactggtcagggacaggtaagaggcaatgctctctcgaaggccatagctgaaaagggactcgtctaccccaagcgggttctctgttccctcggggtcctcctgcagtctgtgggccagaagaaaaggcagtagagaaagggaaaaaaagagagtcatagagagaggaggagataaagggcaagagaatgagaacaggaggaaaagaaaaacaaaaatcctggtgactatttctctaacttattattatttttctttatttattttaagatggagtctcgctctgttgcccaggctggagtgcagtggtgcaatctctgctcactgcaacctctgcctcccaggctcaagcgattctccctccttagcctcctgagtagctgggattacaaccatccaccaccacgcccagctaattttttgtattttgagtagagacagggtttcaccatgttggccaggctggtctcaaactcctgaccttaggtgatctgcccacctcagcctcccaaagtgctggggttacaggcgtgagccaccgcgcctggccctaacttactattctagttattaccctaacctattactctaactactctaactgcaattattctaacccattattttaattctggttcttacatttgtgggctgtgtgatcttggacaaatcacttaacccgtctgaactgctcttttcttggatggctgacacttccagctgtaaattttagtaaaaattaatttttgttatttacaagaaagagcagttttcttcatgtctcgcataattttgatcctgattttctttgatttgccaatgggatgtctggattgatactgaattattaagataacccaccaatcccaaactacagatatcctttaaaattcacaggctgacaatggaataaacagaacaaatccatgaaagtttttttctcttagaaaaaacaaagaagtcactgtaggattctgctgatgtgtttaagctttgtgagtgggttttaaataatattaaatttacacaggatgtgttactttctaggatcctaacaattagaaaaggaaaagtggtatatttcagctagaatgtatattgctagcatagaataaggactcagtaaatgtttgcagaaacagggggagctgccacacacctcgtgaggcctgaagctgcccctgcacccagggattcccttggtctacacttgtggggggtgctcaccccccagtttcagcagggctggctgactctggccatggttttcatgtgctcggcacacacaccgttttgtgctcacatgttcacagagcacttgcatgcacacacacacacacacacacacacatacacacaccatactcacctggacactctcctccagtccacagtcttctgacgcaaggtgacaggtgagctggaggccctcactgctggggcagccgtgctttgtgtcaggcagggcgtggtgagcacacagcacaggccatcagccacctctgaggagggaagcagacagccggtcagggaccctggggacgcctcagccagtgtggggttcaggcctgagacactctccagtgcagctccctggctgctgccatggggaactgggcctgagatttcaaaggggcatggtaggtggtgacaatgctgaaagtcacgcgcccagctgtttgagaaatgtaagcgtgccctggtatactctgcacttagccaggcatgggcagagagagaggtttaagatccagtatcaaccaagcttgggtttgaattttagctttaccccgatagtaaattatcaagaacgtctctgagctttcctttcttcaactgcagaatgaaagaaatgaagcaacaagtgagtgcctgcagaagccgcagccttccagggtttcccgcaaatgcccaatccattaacctcacagggtgtgagaatggggctgcatacagcgctgatccccccagttgtgcatttacaatggaacaggtggactaaatagatctctaggaagaaagataaaagaaacaatgaaagaaggaaggaaaggagggagggagcagaggaggaatgaaagagggcgaggaggaaaagcaaaagtgagagggagaaggaggaagaggaggaggtgaaaatagcacaaaaagtagaagacacaggaagggagggaagagaaaacaaagataaagagggcaaagagaatgcagacaaagaatgaagacaatctctctttcactctagaagctcacgcacaaaaagaataaaagttaaataaacccgtttcttttttctcttgcatgaaaatctctgtataaaatgtctgactctcaggatcccccatctttccaggcacattacgatgtagcttccgtctcttggaaggcttctccctagcccatgttatcatgagaaagacttgattctgctgtactcagccatcttagagattgaggaaattctgcacagtcttactcaggctgaaaaccccagtgcttctcctgtgccctggggggagatgatgtggtcaagggggtgaggtgccactggcctccggcagggctaagccacccctggcctcagagccaatccaccaccaggttttcgacagcacgtcacacctctgacaggccccacttcccatcgggtttatggagtgctctctggggcatccttgccaaagaacaaaaggaatttgtagcagaagaagcacactcagtctgtcacagggcgggcaagccaggaagacctcgtttcatggttttcagtccgacttcaactgtgaactcaaatgtccacccacacaggtgcccttggagaaatgggaggtgagaccatgaatttagagggagatttaatcgggtgggaatctgaaataatgacctgtcatgggttggaaattgaaatgacctcccaggatatgaggcgaggaagatgaagtcagatgcaaaggctggagagatcagctgcagtgtgcagcacaggcaggggacactccgtgagtgtccttccttagacaggttaatactcagggtgaaaaatacattttgacaaagagcaaaagaaccaccactcataagcacataacatgagcccagcactgagctagcctcgtaccctggatctcattgaggccttgatcagcttgtggtcagtttttttttttttttttttttttagacggagtcttgctctgtctccaggctggagtgcagtggtgtgatcttggctcattgcaacctctgcctcccaggttcaagtgattctcttgcctcagactcccgagtagctgggattacagttgcatgccaccacacctggctaattttttgtatttttagtagagatggagtttcaccatgttggccaggatggtctcaatctcctgacctcatgatccacccacctcagcctcccaaagtgctgggattacaggtgtgagccaccacacccggctgtcagtgtttttatacccattttggggagggaaaaactgagcatcccgagatgaagtaacttactcagggccgtagaaatgtgaccaaaatcaatcttattgactcattctaaaagcaactcattgcctcttaaatgaagaagaaagacatcctccagctgtctcttgggttcagaccccctggtctaattcacctctgtctacatggctcatcagaatgcacactcctctgcacctttagggtccaacagctctatattgaagggttcctagaccctcaaggtccccagcccttgattttcccagccatattttagaattcatgtatgccccatgcactctgttctctcagtaaccaccatgcatggtatactttaggtgccacatttttcacatgcatcttttttttttaactggactagtggcaatcctgtgaaaattattgcattttaatccccatgttgtaagtaaaaaaattgagcttccaagatgccaagtaatttgcctaaaggcatcatgatgaaaattataagcaacctgttgctagatgtcaattcaaacccctggtgcacaattcctctcattctgtgtctttttttttttttttttttttttttttttttgtgagatggagtcttgctctgccacacaagctggagtacagcagcactatctcagctcactgcaacctctgcctcctgggttcaagtgattcccctgcctcagccttccgaatagttgggattacaggcgcccaccaccacacctggctaaattttgtatttttagtgcagacagggtttcaccatgttggtcagactagcctcgaactcctgacctcaggcgatccgcccacctcagcctcccaaagtgctggaattacaggcatgacccaccatgcctggcccatctgtgtctttagagtgaatccagtggagataaaagtggccatgtggctcccacttggagattctcaaggggcataggaaacagttccggtttttacccttttcagttattcacagaggtgaacagatgactgtaatccattgagtggttcgatgaccaggaacatactgcgggaaggcgccagtgctgcactggggtgagatattccccatggtcaagcagcggcagttagatttcggtatttttggcctggtagcctcatggcctcatggtccctagaagctttgctaggacagcatccttctcatgtttgcttttgtctatgcaaaacttatggtctccacaccccctccgatggttgttattaaaagccaaataccacaaccaaccttttctcataaccaatataagttggctgtttccaggactcccttcctctttcgtttttacctggctgctaagttttcggatatcacaagtaatatgtgttatcatttattttgcatctgctatgtgacaggctatgctgaacgcactacatgaacgattgtgtttaataatcacctgctaggagcccatattcacccacctcccataaatggggaccccaagttctgaggggtagctgaccttgcccaaggcctcacaaggtgcaaatctgagcttggacctgcctctcctgagcagccatttttgcctcatgccccactgcttctcgtgggccagctgtgataaccaaagccctgtggacccatttctccttgaaatgcactttgcttgctcagttcaagagcccatatgcaagagaatgccaacaaagttgccccagtgtgtgaggtcaagcatcctgaacccagaagggggaagatgctgtcaaagcaaaagcaacctctttctttcctccctccaatatgcagaggaagtggggaggatggcaatgttccgctgggtaaaagtggctggcatttaatgggagctcacgattatgggccaggcaccctccccactttccatgaactaactctgtggatcctcacggtgtccttgggagggggaactactagtgtctgcctggcatagatgaagaaagtgagacacaaacagccaacctcaggctgcctagctaacagtgagtggatctgggatagaaacagagcttcctgagtgggtttttggaaatgtagcatttagccaaccgttcacaatttctcccttttctgtagggtaaagttccgattcctgagctgacatttgggcctttcacagtataactcaactttctctctctggcagtatcctacactcttccagccaccacaccacatgatgcttgctttatctcagtggatgctccccatcttatcagcctgggagaattcagacctctctcctgggtctgtgaagggcacaaaaatgaattaaatgtaattcttagtctttaggagcctgttgaggaatacagcctagcacacaattaaccaggccacggggaagcatgatcggaatgctgggaaagaaacccttggcatgctctgagcacagcgaagacaggtagccactgctaactcctatagcttcatcgcagaggcgtttcatgttggtcttgaaggccaatgaggattctgacaagcagaaaaggggaaatgagtggcactctataacaaagccccagaggcttgaatatgtatggcccacttaaggatgtgcaagctggttgcagttgtgaatttaggcacaccctaacttgtttaatgtacacttcgagagagggcaaatttgagattagctgcatttgacttattaaggcaacatgcacaggcagtctgtttcagcctgaaatttacagtctgaattaacgagagagcatatcatgaaggcagcataggcagtaagcaagacccctctgcattccagacggatggcgccacagagcaattagctaagaggggtcccaccatcacaatcactccatattgtatgtctcttaccagaatagtggttcaccaggtcctccaggcactggaaggtgagcctcggggaaatgtagtaccagttgttgggcagacggaaaatgcggtaatgctttacctgcctgtgtctcaccgacagtgagtaaaaccctgcaggaggtggaggataagtcagtgggctccacctgtcctcaccccaaggcacccagctaaccagcccaccaccactgaggcagggagacctgcccacccttgggatacaacagtgatgctaggatgcagcccctccctccactagacccttctctgtttagatgttgcttcccgttagagactgcagaagtgtattattgtgtcaaagcagatatgttcatcacatggtccttacaggttttcaggaacacaggtttcatcctctttgctttttttttttttttttttttttttgagtctgggtcttgctctgtcacccagactggagtgcagtggtgccatctcagctcactgcaacctccatctcctgggctcaagggatcctcccacctcagcctccagagtagctgggactacaggcatgcgccaccacgcccagttaattcttttattttttgtagaggtgcagtgttgctacattgcccaggctgatctcgaactcctggactcaagtgatccgcccacctcggcctcccaaagtgctgggattacaggcctgagctaccatgccgggcctcatcctctttgctttttgaggcaaacacatttggggtgcttccacatcctgaggccaaatggaatgattgtagtttggttgcaacctgtagctccaggatccatggtcgtttttggactccttcccgagtactctccaagatgtgatccctactgttttgctctttcagcccctgtcccaccaatgctgccacagcacacatttgagggggtccttgcagttatgcccccttttcctttgtctatactctctctgacttatgcttagtcttctcagaaatctggagaagctgagtcatctttctgggtatccgtaagaaccacgtgaaaggcgggttattgctccttaagcctcgttagagcaatgacctgatatgggttggtaagagtagaaccgcagccatgtgcctcgatttcctcaaatgcaaaatgaaagaattggatgtaggccatgtttcagggtcctctcttgctctggggttccaggagtagaaaacacccaagagacagaggagaaagggagctgattgattatttgctatctctgctgggcagggctaagcaattgccatgaaatctctattaattctcagaaagatcataggaggtattgcccccaattattttaaagatgggaaaacagaggcctagagcccctatgggatatggccagaggcatggggcttggaaatgccaccctggggtgtgacccttgtcctcacacatccctcacagtgctctaggcctgccgtgagtcaacccagcatgagccttcccgtaaggtcagcagaactgggagtgtggtaagcagaccgagggtagcaagtgaaacactgtcagagctttgcatacccaaggtgggcctgccacacccacccagccccagcacaatggcacatctgcctgatgacatcgttatttttagatgagttacgacacccaccctgggttcttcctccctttggccaggccagcttaggagtttctttctgagtcggggcatcctgcctccggggacctctaggacaggcacaggatgttttgcttttgcattgatctttctgtaccccagcatatttgggttttttagagaaaagttgatcgcagattttttttaaatcatatatatgtggtccctgctttctgaaagcaaggctgatgctcattttggtgaagggctctagcaccaggtggctttggcacttattaggtgcatgggaagtactctcagatagtgtgttttctcttctttgatattgaatgtacaagaagcaagccaagaacttgaagataccttctgaattttaaaaaagttattattattattcagtctgggaaaaccctagctgttaagtatttggggataaacatggtactctcctactgtaaatctcatggtctagatcagggagctgaggcttagagagagagaagcagtaaattagtaatttgtaaggctaaaattggaacttgggacccttgctttgcatcatgacaaagagctcactctatttgtgtttttactgtggtacttaatgcatatgatgcaaggaaattgtaatgctagtgatgatggtgactgtgtgagaggacacatgtgattctcggagctgtctgatttagttacggagcacagaggaaactgatatcgggactgtctgtgcagcaagagcaacacaaatactatgacatttgaatctcaccacacccttacaagggagaggtgttctctccatttcacagatgagaaaactgagttcagacaaatcagtcacagagcttgagagcacagcccaggcccataccaaaggccacattctatctgcacagcatgctgcctacacactgcgttcagttttgttctcagttgctggaaaaatttccagcaggagtcatcaggcctgatgttggccaggcccgtggcagtgcccagccggctccccactgcctgtctctagtccccttgcttccccactggcctccccagcagcgtgtgggctgcagggagcttaactacattggatcaatttgcatggacgtaggaggaaggaaaatgaagccgtgtaatgagtcagccaggagcaaaacatgcttgtctgccccggatggggaaagatgagttgggggccactcacctttcttggtctcactctctctgatcatgaaggagccgacctttgtgtctggcagctgcagcagctcctcggccttgtctctgcccaggccctcaaacagccagctgggaaggaggaagacagccattaggatccggaacaagccctcccccaggaaaggcaggaatgcgccacccaccgtactaagcacctgaaacctaatcctcacctcaacccactgagacaggaagcatcatctctcttccacagatgagaatactgagggttccagtgattaagtagtttgctcaggaaaccatgtcagcagttgatagagttaaaattagaatgcatttttctgggacatccaattccataaccacctcacttcactgctgctcttccttttatttatgtaattttttttttggaaatggatccctgctctatcacccagactagagaacagtggcgtgaccttggttcactgcatcctccaccttccaggttcaagtgattctcctgcctcagcctcccaagtagctgggattacaggcatgcaccaccacgtctggcaactttttgtgtttttagtagaaatggggattcaccatgttggctgggctggtcttgaactcttgacctcaagccatctacctgcctcggacttccaaagtgctgggattacaggcgtgagctaccgtgctcagccctgctcttcctatttgatatgttaagggatgtgatcacctctgttggattggtagcctcatagggtcataattatgtcactcctcctggttccttaccacccccagctcgtgccagctgcagcctcacatcttcagcatgaaggcattgatgcatgcttgctagtgaatgaatggctccagggcaagcagctgatgtaggagagtcacgtgactcccatctctttcagaacgtgactcccacggcagctcctgcttcagttttgtttagcttcatcatcctaagcatggaagtggcatctggtattcacaattaagatcatgaatactaaaattaaactcgcagaattccagtcttcaaaggattcaggtggttatctctgttttgcaagatgagcatgtggcatgtagagtcctctggacatgaagaagtaacttagtgtttatcaatggatgcctccttctttcttttccatttccaatgtgctttgcatttctttgccaacttccagcttccgacacttgacagatgaggataatgtaactccaggaggtgaagcgacttttacaggaccctcacatggaaggaaggaagccaagatttgtgcccaggtgttcagggctccaaagccacccaggaggctgcagaggcctcactggaacgactacaggggaaagcagggtgcttattttcttatctgttgagcctagttttctaagatatctcttgtttatcttacccatttttcaaggaaggcacataagcatttttggcagtaaggattctgtgtgtttctggataggtatttgattagaatagagctaatatttatcgagtgcttactgtaatgcctggcattgctccaagaactacacatgtatcattacatcttattctcctaacaaccctacactttgatcatattatcatatattattatccctgtcgttctatgttatgatctctacttgacaggtgaggaaagggaactgatgcataaaaagcttgttcactggcacacagccagtaagtgacagaggcaggatttgaacctagacacactgacttctagtctctgcactgtgctgtgccctcccataacatttcccagctgtttaccactctgtgccaggagcaccatgttagagctgaaaggtccaacttccttcattttactgagggagaagttgagtcccagagagcagaagagataagttagcccaaggttgctcctttccttattgactgggttgggagcaggactatctcttcttgacccagtgccttccttaccactatgaatgctggaatctttgttccaccttatgagtcaccagcatacgcatcatgcttaattgctgccatttgagaaatgtactcacccatggtaaactctggccacacatattccagggatgtaactctctcgaccagtgctaagagaaatagctttccaccagcccccttcactgtaagaacaagaacagagaagaacacagagataggtaaatagcaaaaccaaaggatgaatgaacagagtaatcagatttaacccaggacagtttggaacattcctcttttaagatctgtcactggccacgttaacccatatttcgtcatctgaaaattttctttttaaaggatatgtgtccagtggatagccctccattgcaagccaactggtaaaccctcccatgtgctagaaatagctgcttttcagggattagcagctaatgttcccaactgttggaggctttttaaaaataaatgtttactatgttgatttatgctctgcagtatagccaaagatagtttcatatatctgaatcagtgaagatctaaataaaaggggcttagaacttctgtcatgttctatagcccatattgaatcagactgcagaggtaagaggagagaaggcaaatttttgttttttctcatccgaaggatttccagaccctgggggctgccttcccggtcttcattcctacataacatcaacactgcacatgtggtgggagataagaagaatatgagaagaggctggatcataaaggatctcaaaagccaagttaaggaatttaaatttgatctaccaggcagtggggagctatggaaggttctagagcactggccacattaaagaggaaggttgcagtatgggtcaaatttctcacctcataataggaccaggactcatgtggaactagaccactctagctaacaatcaaatacttttctcccaaaccaagtttatcctgctttgaagattgcacaagttttggagagctgactcactcagaaatcacacgcagtttctcccctcggcggaatatcggggggctgatgtcaggagacgggtagtcacttagcacggcaaggaagtcgctatccagtcctggggaaacaaaggcaagggggaagggggcaaggtgctttttattcacaaggagcttaaaggtaggcttgggagggagggtatgaagatgagattttccagcaggaaatacctttcttgttttgaaccaccaatttacagcaaggtcctctcttcagagatggctctgcagggtgtgcgtacgagccctgagggtcaggtgacatgctcctattcttaagcctgccttggccctcatgttctcatctgagaaatgggatccaaaggctgtgagatgagtcatggggtctggcttcagcgcctgttacgagtctactagcctcaccctctccatctttaaaatgggactaatactacctcattccagggtccttaggagaggagatgagagtatgttacaccacatacgttcacataagttgctgtaaaaaccccccttctcactaccaatgcctcgggtgtccactctgggactcagagttgttatatctatgacacttttggggaaggagtgtgaggcaaaatgagttctgaggacccattaggaccatgaggcagtaactctgaggttaaacaaaatacttatttcttgcagaatataaggccccacgctgggcatctatttaatagggacatttgttgagggtgggggtggtggaagaaaaacttagtacttttcctaatagtgtattgaaaggaattctggtgaagttttgaaaaggaaagagggctgtctggttcctgactgtagaggagagacagtgattttgctttttgacactgagcgatacgtctgcttctatccttagtgatttgatgtaattcagatgcattagatgcagggtaatatttggatacatttttgggggaaataacaagatgtcttctgtatcagcaaatacagttattatttgctatgactttcatcactccacctgctggctgggactttgaacttaaaattctgggtaacatcacctgtttattcattcggcaactacttactgagcacctgtcgtaagcagcataggtgagaaaagcaagcccattcttgctgctttcacggagctcatgttctacaggatacataaatagtcatgggaggaactgttccctggttcgctcaccccaagatctggagaaatcccagtactcaggcatgtgggctttggggcccaaacaagccactttctaggatccacacacctctagatcctgcctcttacaactcatatgtcttgcagcctccgagtcataagcctcttgggcagactaagtctaaagagagattaaatactagaatcagtgagaaagatgagtgaggttttgggcaaaggttatgcttatcgattgataaataaattagaaacaagtaatcacggtggaacagtgcagtcaaatgtattgttcatttggggaagctgagtccctgacaataagccatgtaaaagcaagagtttctgggtgtaagacagaaaccaagagtgatctttagtggctttacaatatggaaagggatcagggcttttgagaaacagtcgtgtcgggacgtaaaagggctggcccagccagacctctgacctgtcctgctgcagaccttccccaaacctgtgggggcagctccctcacattctgctttgctgaattcaaaaaagggattcttccctgtgtagctttgactccaccccagtaagtagaggcagcattacagttgtgttaagtttgaagccagaagtcccaagttctcacaaagggcaggttcacatttggcagggcataaagcttaagcaaatttggcagtcctctttaagaaaaaaatacacaattgcaaatacaaaatgaaggacagaccccagcaaggtgctgtaccagcaagggggtctcaggcgtatgatttgtttggcttcctggcaaatctgcccagaagctgaggctgactttgccactcactgagtgggacgcctccttctcctcttgggcctgggtttcctagtctggaaaatgagaggttgaaaaacaccttcaagatggaaatctatcttcctggactaatggcccccacatatgaatgggccgtttattaacatggcactgtgctgcctcggctacatgtgatgggcctttctccaacttgccaggcaccctggttctcagagcctccggataggctgttccctctgcctggaacacaccctgctcttccctccttcaccgttcccacctttgtcaactctaaactcacctctgcagaggctccagaggaggctcagccttcctgctgtactaattcttcctcttggcccctaagattttcctctgaagcggttaccccaggttgcattttcccatttgtgtgactgtcaggggaatgcccatctgtccccacccccggctgtgagttccgggagggcagaatactggtgtcttctgtgtctgtagcctgtgccacacctgttttacaaaggatgctcaaagcaggcttactgaatgtgcagagcggtccctgtgctgcaatgccccttaaatacagctgtcaagctacagttttaaagcagatccaggcagaaggaaacctgatttgtgggaggcagctgggtaggtggccattgtggaaccagccccttgcaaaaaacgtgttgaaatggggaggcacagtgtgtgttctctgtgacaataatagaaccttgaggtagatggtgtgtctacagaggggtttgaggtttgatatcaaattcaagattaagactgtggaacagaacaattgtctttcctaacattaaaaacaaaaaccaacagaaacaaaaacaaaagcaaaatcccattataaaaaccactgttccaatgagggaaagggaggcttagagtgttggagagtttcaatttcacaataacaaagttaagtttcctgtggaatttccgtaatagtgatgttttgatagctatggcacttaaacatcactgaggaaactttacatctgggcttttgcttaagggtcagataacctgtgcctgatcctttgcaagagatttcacctctctttatcatcaccattagccaaacgggacaaagtcactgggaaggtattacagtttggcttgtacttctgtggggcagggtggccattttaagcaaggcctggtgccaggatcccttcaaagtcttccctgagctttggttgctacagaaaaataaatgcaatgtaggaaatttaagtttgttggtaaaggtgagacatattatcatctactcctagaactccttagctttatggagagctcagcgtttgaattcaagcagagataaatgagtgaggcagagaagaggagagttgaggaagtcagtggaattattgcagacttaagataaggaaacaaattaagtgaagacatatgcactgcgcatgaaagaagaaacccagagagaattttcgggaaagagaatggggctttgaaaccaatcagaactggcttacatcccacctccgccactacacagtgatgcgatttggggggagatttatttttaactaatctgagcttgatttcttcgtgaataaaaagggaaattgccaaaatctgcctcataggattgagtgaaggattcaggatgcattgcattttagggcctgccttagtaagtggaagctaatattattttcatggagagcggggtcaccagaccataactcaagaccagtgttagccaataactttctaaaatttgcaaactagtaaacttgataatttcttactctctaaaaatgaactccacttggtgagaacagaagatgaaattcaaaagaccaaatatttgctgatagctcaacttaagaatgagtcaagttgaacaaaatgtacaaaagcgtaaaataggaaacgaatccacaaaggggagggacccaggcaggccttacgggacttagtcaagagaggacgggcccttttgtaaactgtcattctttggtgctgcatgaccatttctttttaaatgctgagaacattctcagtcactcccacttataactgtctaataaaactagtcgtttgtcacttccagtgccctgcccagccctacagaaaatacgtgattatttaagggtgaagaagccaaagctgggagagttttagtcacctatctaggggaaagtgtgaagatttcaaagcccagggtccttcacggagccacacggctctccttggcacttaatcttcaagctctcctcagcccacacttgacccttaacaggggagacaaaggcagactccaggtaagttgtcagggttagcataagcagctcagggcaactggtgggtagggagctgtacagcccagggattgcagcctcttgttttgcatttcctggagtcatggctaaactcatggtctcctcaggggtcaaagcaggcctgactttcagtgtcatcttcaggacacacacacgcacgcgcgcacacacacacacacacacacacacacacacacacacacacaggattatacatgcaactaaccaatcacacagagctggaccatctagcctggtagaaggtctgccgagttctgcgggtcaccatgaaccaggcttgtgagccctcttagtcatatgtaaagggctgtgtttgagacccggtagcccacaaagctcttttctgcccaagccttggtttttccgtatgttagtggggacagattggaactaaacagaccttgagtcttttcagggtcagtctcaactctcttagatgctagagggatataggcagggctagcacagaacagaagcaagaaatagtcaaaatgaatattttggactgcatagactcagaatgtgctttacttgggcacccagggcttctcagacttcagttgttttcattccaccattcccttcctccccctcctcatcaccagcagcagcagcagcagcagcagcagcagcagcagcagcagcagcagggcgcacagctctggggggaatcaggcactgggctgtggtggtaccgaggttacccctgaagtcctcacgcctccctgtgaggttgatagattgaaactaccttattttgagtatgaggaaatagaggcacagtgaggtccagagaccgcccaagagcacacacctaggaagctgagtgccaggtttcaaaaccaggtctccctgggcagggcagggcatggctgtgtttgaaccactcaggtctcctttgacatagttgacagcactagttacttgataatgtctttttaaaaattaatttacttaaaaaaacttgagtgctattctaagcaatgtgacatcgtggatttcttgggctagttatatattttatgatgttcatcaatgtacaattatgtaaaagttgaatgatcaagttctgcctaagaccatctcatgtaccagcagcgaggttagattcaaatagaaaaaagggatctggtccaagatttgacacggattcactgtctgtgggaccccttgctagggcacttgatcatctgggtcattaaatctgggggccaggcacattctcattcattcgagacgagcccatcctcttccagagcatgggggcttcttgaaaccctgtcctttccaggcacacactgaggtggggagagggaccctggagtcagaccacctggctttgaatcccagctgtctcctctgagctgtatggcctaaggcaagtcatttaagcttcttgtacctcagattctccaactgcaaaacggagatgataataggcagaagcctcgtggggctgtgagaatcgagtctgcatatgtaaagcactgggcactgtgtctggaggctgtgagcaccaagcggctctaatcattcccgttttacaaaggaggacagagagactaaggagataaactctttctcatctctcgttgtgtgtcagtgcaggggcaggactaaaagctggtctgtggtctgcaagctttaggggttacagagtccccaggaactcctaggaaattcagctggcggctaccttccaccatccccaggttctgattcgtgggcctggggtgggacccaggaatctgcatttcagttacttcccaggggattctgatgcaggtggtgcgaagaccacttactgagaagctgcaagctgggtttgagaggtccctacctccttcttccttccccgagccccacccgcccccttctttccactgggcaactatgtaaacagcattatttctacccttgcacggacagaaaggggtctgtgctgctgcctctgttggtgcctcttcaggtcagggtgataagaagagaaggaacaaagaggggaaaaagatcacagcagagagacagagtgctcattttaaggtggaaatatgccatttcctgaccacagcgggacttccctaggttgtattaaaaaatcctgtactgcccatgtctggtacagaagtatgtatagaattgtagagaaaatgaacactttgggatgatttgaaagcaaattacagaactaccagtttcaccactttaaaacttttggggaatggccatttagatataacctggtgcagtcaggtaaccccaaacagagtttttaaaagtttccacacccttctttgctggtgcctgccctgcatcatgctgtcgctgtgaggagggacttgttccagatctctggggcagcccgagtgactcacctaaagtcacacagcttccacggaacattactggaagctcagtgagggccttctgcctctgaaacttgctctatttccctcaagtcctgcttccttttgtaggtttaagacattagttcctgagaaattgactaatcaagaatattctggaaatcttagtttagcaaaacaaaaaacaaaaaaaaaaaaacaaaaaaacagatgggtaaagccatgttccaaggcattcactgtcctggcttgggagaagaatgatctcccaaaagctcagaaaacatggttgtctaaaagtgtccaggctggcctctgggtgatccttgtgcacggccagggtctgtggagggtctgtggtgcctctctggcactgaagctaatgtgggagctggctctaattgcacattggcctaaagcaaccagcaagacctgcaccgtctcctaggttacttgtttgagggtaaccggatgagcagccataggagcttgagctgagtagcagctcattccataaaaactctgaccctgtgcatgaggcagatggggactacttaacacggcatcactgcaccgccttcccctcccttactcaagtaggtagaagagaaaagaggaaacaacgttaggaccaatgatcgggggaacgtttcagggctgggggttgaaaaagcagcccaccagcgcttgatgtggttgcctggatcacaaacggggtatgaccaggggaattctcttcaccagggggtggaggggtggggagacccctctctctatgtctgttctagaggtgacctcccacccacataatggaacaaaatcaacttatttcatgacaatttgcattgaaaagttgaaggcaaatgagcaagccttggagactgatgttttcatgaggttcgctcaagcatgctgccccctctgccccaggctgagaggtgacgacccaagatgggttcggtgggtgggtgcctccccagcctgcctgggctcagggccctgcggtgtcagttttctagcagtggttatgaccagaggaggaggctgtggccaaagccagtttggagagggtgagaaagagcccggcattctcctgacagcagcagcagctcagccaccctgcacgttgcacgctgttctgagtgtcgcatgggagatagagggctgctgtcctgagagcacatgctctgttccaccttgtcatctggttccacctccttggtcctggggaatattctttttgtttatccctcttgcatttggcttgagaaggagagttacttcactagataaataagagcactaggattgttctgcatctgacttgaaaggggtgtggggtggctgggtcttggcatgctggcttgggggcattggaggccatcagaccacacaagctgggcctgtccattttggaagcagtgagaaggctcctttgtgagggagccacagaagtcatgaaatgtgcagtacctggaggcagcgcaggaacctggctcagtccacttccctgtcaggctcggcagacagggcagccatctgcgccagtgaactccgcccagggcggtgctgcaggggctgctgggaaccatgtgtggtcacccctgcgaggaaatgggacaccaggccccaaatgctaccatgtaaggtgggaagcagaagtgttccaaggtgccccctggcttccctaaccgtccctttcccaagaccccacaatatgagaattatggactaggaatctgaggaaataaaggtcaggccattagaaggggccagcatagctgagtccacagcatggtggatttgatgttcagccttttccctttgttcactggtgttccctcccaggcctctgaccagttgctgagggactctttgtagctttgggagtctaaccaaacctgacatctctccaaaaagctgactttggtcatcactgattaacctgcaatattaggctcttcccccgagaatgcttgtcaccttgcaatcccaccaatgggacataaggtttcctttgttttcaggaagatgtcacaggatggtgcctagcttagaaaagtaacacagatccagctcttgcggggctaagtataaggatgatattatattatgggctgccagagtttggtaaacaggagtctaggtttcagaattggatgggcctggattggaaatttaacagcaaatgcccagtgatgtggatcccattccctttgtgaggctcagtctccctatctggaaaataaagtgattaaaccagctgatcttggagatccatctcaaaatgccaaagatttgacacccttcaggtgcgccgagcacccaattcttttcgtcttttaattatgaagtatttgaaccacaaacaaaactagagagacagatataatgagcccttcggtacccattgccccatttaagtagttaccggcatccaccaccgcccagtctttaccacaggctcttgtagcacagactcaagcatctcaccagagaagccagacttaccctccgggttgggcaggggcctctcggcaggcgcaggggtggatttcatgctgtttcccatttctttctttttccctggggccgctggtgatgcccagagcctgtggtataggagacagacggggaaagtcaaccgtgccctgagccctccaagtggagaatgacccagtttagagagcatcgtgcatcatttttctggcagcttgcttcttgaaaggcggctgtttatatgtgaagatgagattggtgaagattggttacttttgcgcagctcaagttcttttatcaagggaatgacagaaaaaccacagagagggaagttgctagcaaatgctgttggtggcaaaagtttccattcctccgcacccttgctgaggatggtaagcagccacagcagggtttgtgtgagaaaccaagcagcatttcaggtggcccagaaagtatctccactcaggggccctcaccatcaactctgtgtgccaggaatttggagtacaggagttgtgtgtctgtacaaccaaaggcatgaggagaaggtactttctgctgctactttttgtcatccttttgagtttgtcagcatgctttaacaaaggatgaaagaggaaaacttcataacaactctgtggactggctgcatgctgctgaagccctttcacatcaactgttacttttgatcattgtaaagtccttgcatcatgcttaagcccattgtgcagtgagggaaactgagtctcagaaggggtaagtgacttgtatgaggtcacatggcaagtaattgtagaactgagatttgaaccactgatgctaaatctctgggttgctccataacggttttcaagttaaccacccaggcttaaattctggctgtgtacttacaagctagatgacttcgggcaagtcattaaccttttctgtttttgtttttttgagacgcagtctcactctgtcgcctaggttggagtgcaatggcacgatctcggctcactgcaaccctgcctcccgggttcaagcgattctcctgcctcagccttccaagtagctgggattacaggcacacatgccacacccagctaatttttgtatttttagtagagatggggtttcaccatgttgccaggctgatcttggactcctgatctcaggtgatctacctgccttggcctcccaatgtggtgggattacaagcataagcctccatgcctggccaagtcattaacctttttctgactgttttggggaacactaattgaacagtgttgggttatggtcacaaaattaactgagataaagcatgggaaccactttgaacgtggcgtggcatagaatacatgttagttattactctgtttactgattgtccttaatgataaaatttccaagtctggaccttcatacaaatattttggaaagggacatagattatcagagaatagggttttagggaagccacgttccctctggatggtggaagcacagagaggaaggccacattcataaatagagctctgcctgctttgtggggtcaaagagaagagacggaacagggtccccccatcggcctccagcccaaatggaaactaatctcccacctacctgtgtctgcagctcaggatcaaaccttatgaagggcacaaaagtcagcccatccaactcccaccctggccttgagtcctgtctccatgccctatgtgtacaggttctggaaagaagtacactctcagagcaaggccctccccgggttgagggaggtctgcactgctccataatttaagggaaggggtggtgtgaggtgagactcctactatattaagaaacaaggaacaccaaaatgagagttgtttaaaagtccgtatatcttagacatttacatgaacaacttgtcacttactgctcaagctaatgcatagtaatattccgaagacaatgaccaggctcgcaaaagctataaactcatagtgcaccacagaagggttggctagaacgggcagcatgtttaaagtgaagcgcaaatcccatcctttttggatcctgttgatctttgtgactagaaaagaggatgcccttgcaaatttgaggctcgggcccttctttcttcatgcttgcccctaccctcctcacaaaccagaaaaacatgcgcacccaaaatcccagggcctctgaccctggtaggaactttctagcagctgggcaggttctaacagcaacacctgcagtccaggagggcagggatacattggccttgtctccattcctgagcctggcgaaggtacccaagaaatgtgcttccccaaaatgcttacagaaacacagcaggtggcgtgactccaacccacattccccgcagttcagcagacacttcctgggcatctccccggtgccgggccctgggctagagccttgaggaagtcaggatcccacccacgtagtgggagtgtgctgcctccgaggcccgggtcaggcaagagggaagaggcaaaccaggcctccctggccctgaggggattgtagccacaggcgctgtcctgcacaggcctcgggaagcatgcgtgtgacatgcagaggccgctctgcacaggcctcaggaagcatgcctgtgacacgcacagggtgtcgtacacaggcctcaggaagcatgggtgtgacatgcacaggctgttctgcacaggccttgggaagcatgcgtatgacatgcagaggctgctttgcacaggcctcaggaagcacacatgtgacacgcacagggtgtcttacacaggtctcaggaagcatgtgtgtgacatgcacaggctgctctgctacgcacaggccttgggaaacacacatgtgacatgcacaggctgtcctgcacatgcctgcctctgtcctgctccttgggcttcctggtacctgccagctgccttggttcctcagcctccttgtctatcatcaccgaggcctttgggcttctggggaaagttctcaacatgcagaactaactctgaaaccacatgtgtgctggccttgcccatttgccaccatctccagtgtccccagacacagcaaactgtcccaacaatgccttcctgtcctttcagcctgactcatcaactgtcattcaacacctagtgattgtgcccagaaccccgcccccataagttccacccctccagatgccagggtgcccccagccctgccagccttccctcccctccatcccctcccccaagctgcttctaagcagcaggctcccaccacaatgtctgatctctcccctcctttatgtcaaccattccagaaaacaagtcagaacaagattttgctatccatcaaagagaattccaacatcctctctcttcccaacagctctatcattcttctcaagcatttgcatgctattttggagggattcctggaatccactacagaaaaaaaaaaaagcctttaaacttgcattgttgagattggagaaatgaggttcatccaggaaaagaaacgtacccagggtcatgagatgagaaagtttgagtcagtcctagaggcctgggttcttctacgctaacagtcttctctgctgttgcttgcactcccacccgttctgtcttgccagtcagagttcagtctccgtgacagaaggtgctgtgtccgggctatatgaccaccaaaaaaaccatcaggtctcaacagccctttagtggtctgctcagtggctttctatagtcttcaagaaggagttaacttatctgaaagaggcttttatttgagaagagtgaaaatgcccccagagaatgagagctggagtctctctaatgaaatggctgaacaatttgatttaatctgtgacaattttatgcagtggctgaaggtgggagagagggtaccggagacataattgcttctaagaacaatagaaaagggcaaaagagaaatgagttaattaacactggctctgcaaattcttgatttctttctccctttccttggtggtgtgactcttaggtttctgggtcatagaatcgtaactgctattaccttattttccctccggtctttggaccaatgttatttcctttgtgtgaacttggaccttggtttcctgttctgaaaaatgagatgagtagaaaagatgatctccaaagagcgagcctgataaccccatttaattttagcaatcaagactcaatggtttttaaaaattattaataaaacaaccattggcgtttttcaaatgaagtcctattagacagaatcccaatcttgcctttgtgtgctacaggatcaagggaagacagttaatgtgtacaaccaccttctgtgaggcaatctgcagatattgttgtatttaatcttacaagcattcccaagggcagatactctttcactttgttagtgtgagatcaggggttagtcacctgcccactgtcctggagctggaaacctcacatctccggacttcaggacctacactttttgttcaggaccatgctgctgtctctccagcgtaaggaactctggtcagtgtgcagctggctgccatttgagcagaaacatggcatggagaggtcacatactggcatggcgttgccgtcgacaacgtgggatatgccggccagcagccctcctcttaataggtttctgtttcgcagatctgggtcctttcattgtgtgctctgcattatctcataaatccaggtggggaggcttctcagaaccttccattcctgggacagtgtcccaggacagttgtatgcacctggtccatcttgtgcttctgatgcctggccttgctgctgggaaggagggtagcccgaacccctttatcgtgcaccgaaggggagacaaattgaggaagtccaaccaagggaaggcaggtcataaagccaggaactgaacccttggtgacagttagaattaatttgaaaacatacttagggatgctaccttccctttgttcttagaaatttctgctgcaaagtgtgacagctataagcccattcatataaccttcttctaaggcatggaagtgtggtgcggcaagtggagaagcctcaatgtccaccatatatgtgaatgccaacaacaacggtgatgaccagaacacccccatcccacaattggtcagcaagcatcctctgccaggcacaaagctaagtactgtccagccagtatgtcctgggttgctcagaacaaccccactttatagctgagataaattaagtgacttgtccaaggttatactgctaggaagagctaaagctgggattccagccaggtctgcctggctctaaaacctgtgctctaactcgccaccagtgctgccctgttttgctgtcctctgacagaaaagaagagattttcaaacccaagaaggcaacagaaaagtgatttttaaaagttatcaggccgggcgcggtggctcacacctgtgatcctagcactttgggaagctgaggcaggtggatcacgtcaggtcaggagttcaagaccagcctggccaacatggaggaaccccgtctctactaaaaatacaaaaattagccggacatgttggcacatgcctgtaatcccaactactcaggaggctgaggcaggagaatcacttgaacccagtgggcggaggtggcagtgagttgagatcaggccattgtactccagcctgggaaacaagagtgaaactccgtctcaaaaataataaaataaaataaaataaaataaaataaaaaagtaaaataaaagtcatcaaaacaaaccttaggaagcataaactttgggggaaactttaatacaatggaggccctgagggatctcttggatgtcacttggcagtgtttggaagcccgggtctgggtttccagcggggatgaggggtgcagaagtgctgctgggagcagaagaaacaagagagcgaggccagttgaggcatgctgtggtcaaaagggcaggagtgaatcgcaaggaatgttttctagcctttcacagcattatttttaaaagctgttacttaggaggctgaggcgggcagatcacgaggtgaggagatcgagaccatcctggctgacatggtgaaaccccgtctctactaagaatacaaaaataaattagccgggcgtggtggcaggcacctgtagtcccagctacttgggaggctgaggcaagagaacggcgtgaacccagaaggcagagcttgcagtgagctgagatctcgccactgcactccaacctgggtgacagagcgagactctgtctcaaaaaaaaaaaaaaaaaaagctgttactgctgtggaacaaaacaaaagaaaagaaacagaaaggaatactagctgtgcttttagaatctctgtttcataaaaatgtgccactcaaatgcatacacgtggaaaaatattaaagagaaatttccaaaatgtttccaaggactctctctgggtagtgattttatatgtgaatttataaatttcttatttacttacacatttctaaaatacccagattttctcccaagtgcctgaattgcttttataatcaaaaggttggaaagaatgagggcgccttaaagaagagattttcaaagcaggcaggcctgagtgcagattccagctcccaacctactggctgtgtatcgctgggcaagttagttcacttctctgagccttgattttcaaatccactaatttgggatacaagtatatgccctatggggttgttttgaggttgaaattatgggtcatatctaaagcagagatatgtttggtaaatggcagctaaaaatttaccaaagctagatcccgtgcaggggctggggggttggctaactcactgtgcaagcttgagcaagtaccttcctctgtctgggccaaagagtcctcaaatctgatggggaaagggttgggctgaacagttggtcatggctcttttgcctcaaccattttcccgccgtgactgtacccagtaccggcacaattgactagggacttgctcagtgctgcctgtggtctgacccttcctttcaggaaaaataagagctggcacaggggcttagcatccggtggtctccctggcaggatttccggggtcacccaccacatcctgacctcacttcacaggtgcacctctctgagtgcgaggctgggggctgccgaggccacttaccccgtgacccacatagtcccctgctctcctctagggcaggtgcagccgcaggcctgttctacctgctcccaccccacccccatctgcttctcctttctctacactgcagaggagggctgcggcataccaggggctctaggggcactggcaagacctacaagggcaggcagccagctcagagaggacatgcaactcctagccttcttctcaggcctgactccaagccagaggccctcagaaacccctggggaagaacgtgggatcctcttacctaagatatttcaaacacctggaatcccagcatgttgggaggctgaggcaagtggatcacctgaggtcaggagttcaagaccaacctggccaacgttgtgaaaccctatctctactaaaaatgcaaaaattagctgggtgtggtggcagcttcctgtaatcccagttactcaggaggctgaggcaggagaatcacttgaacccgtgaggcagaggctgcagtaagctgagatcgcaccgctgcacattccagcctgagtgacagagcaagactccatctagaaagaaagaaagaaaaagaaagaaagaaagaaaggaaggaaggaagggggagagagagagagacagagagagagagaaagaaagaaagaaaggaaggaaggaaggaagtatgtatggaaggaaggaaggaaggaaggaaagagagagagagagaaagaaagaaagagagaaagaaagaaggaaaagaaagaaggattccctagaagctcaatacatagaatagatgaaagggagtagctgcctggggctgggggctcagctcagcatctcatccctctactactcttgataggatacctcaatcctggggcatcataaagcatcacttgaaaagtagcaactcaacactctcacaggacaagggaaaggctcagagagggcaagcaatctgctcaaggtcacacattaagtttggatgaatgcatgactccctgcccagcactccatgccctgcaggaggggcaatgcccatctatctgtcaaccaggctgcagacctgacccacatgtccaggagcctgtatgctggccccctctacccttgagtgcccaggaggggatctcatacactctcaggctaacagagaggctgggctttatgctaagaccagaaggggatggaggtgtcctagtgtacattttaaggtcattttaagatatcatggaaagaagccagatttgaggcctgtcaatgctggggcaagttttaattccattctttattaagtcactagaccactctttctgctgtttttgtttttgtctttaatgaacatagtcatatgtgccttcctgggtgttctcatggaaggattggcaagaggaggtgttgagggctgtgcacaccctgcagtctccgtggctcaccaccacactgacgcaaggggctcagtgacccagacgtgtcagtacagtgagtgggcgtcttatgaagagctgtctggcatacggaggcgggcagcagaagccattcctgacgtggctttgatagttcatggaaataaaaagagcccatttctttctttctagatagactttctgtacacagaggcccccaacacagggatggtgaggtggggcaccacccagtcagcctgtggctctgttggaccagaacaaatttgctgacaaaaccaggctataaatggggtttggcctaggccaggtcctggatacctctagatcatataagcaggctggcctagcaaacattggcaatgaagaaagagtggtaaagacaattattttaatcctagccattacatagaatggggaaacagtgactaggaaacaggccttttcttttcatttcaaatgtggatacttgagaaaggcaggtttcatcacagaaggtggaggtagatggaaactttcatgaacatcctaaaggtcacccaggcttctaggcacagggactataaagtccgtgatttctttattgcatcgtatttcccagcaagagttacttttcctttttattcgtacatgtgaatcacagcattactcataaacttatcaagcaagatgggaatcagcatttcacctgacacagcatttgccagtgacctgatctgggatctcccctcactgtcagtcacttgtccagggacatggaccccagaaccccacactctacagctcccaggcatttggtctaatggggcttggtctctctaaagagatctccatgatgtttttaatttgctattaatgtgctcctccttagctcctgttccctccttagctcctcaggaaagccaattgccttagggtgggtcacaattcgacggtcatttgtgtgactgagtggtgagtgaccgtctcccctactggactataagtgccttgagagcagccagcaggtttgtttctactctcggctggggctcagtagatgctccatagggaaataaaagggaacagttagaaacagaagaaaaaggccaggtgtggtggctcatgcctataatcccagcactttaggaggctgaggcaggcggatcatttgaggtcaggagttcaagaccagcccggccaacatggcaaaaatctcatcttgactaaaaatacaaaaatcagctgggcgtggtggcaggtgctgaaatcccagctacttgggaggctgaggcaggagaaatgcttgaacccaggagatggaggttgcagtgagccgagattgtgccactgaacttcagtcggggtgacagagcaaggctccagctccaaaaaaaaaaaaaaaaaaaaaaaaagaaagaaagaaagaaaagaaaagaagaaaagaaaggaactgaagaaacaatgtgggcctaggagaccgcggatttgtggtgtgctagtaaatgtcaaacaatcaatgtttcagggggaaaaattcctaatagtgtgtgccaatttctgtggtgtaaatactcccaccatgctgacttccagtttccagtgtgacatctctgaggacggagtaggaaaaagatgtgtggagcggtctcataagccagcacaggccgcatccagacaccactggagcgaaccgactctttatgaaatctttctcccaacaagcatctgtttttggaacagttgcccacaggcctctctatttgttttcaaaacaaaagagactaatctaagtgggcatccactatgcggagggcctaaaggagatgtttaaaatacacggactcatttgatgcccccaagaacatactgttttatagacaagaaaactgagtctcagagaggctaagtgacttgctcagggtcgtacagctagctcagggctggggccagcatgggaatctgagtctcagagaggtaagtaatttgctcagagttacaaggcttgttcagggctgggtctagcctgtaaatcctttgtctttttactcccactcctaattccttcagtaataccttcatcccagcttaataaaactttaattctaaaagcagatgctctaagagctgggtctgctggcaagaccagaggagaatgcacacaggcctgggagctggtgtgcacactggcccgtgtctgcaggcacccccgctcctgaccgtggtgaagttgtcccttctctctggacagtagttgtcaactttgtcataaaatcactgggatgggtggctccaagactgtgagaggaaatttatctcaattgtttcccctaattttatctaattttcattttctgcactttctgtctttagaacccacagtgggccaatcaactcccctgagattgtggccaagtcactttcctcttttggtgtcagttcgcctttctataagtagtgagggagccagctggaggcctccctgtgtccacctcagattggtgccgtcccttgatgaggcttcgtgtacaacaacaggagagggggcaccagtgcgtattgaggaattgtgtgtcctaggtgtgttacatgtactctccacttgacctccacaactctctggagtatgcatcattacgctgaggccttttgtctaaccggggaaaccaaggccagagcattcacataatgtgtcggagtttgcccagctggaaagtgctggaggtggtactggaatccaggcatctggctctagagcctggctcccagctaccgtgtccttaggcctgaggaaagggatggagggcagcttaaagcagagctctccttttttctggcaaggttatggtactcttttgtgtgctagagggttatgcttgtcatagttattcagtaggtggattgataggtttgtggatagagcggtgcaatgagaggtgggtccacacactctggtgcttggaacttgcattcagaggatgcctattttgagctgattgtccatgtgacttggatggcatgcagcggggagaggggaggagtggggggaggaggcgcacctgcaaactggagggaacacgttcagctcccagggttagtgggagaattaaatgaaaccgactgcactgactacacttggtcccctctcttctctctccctggctctgtttccttcacggcacataccacgatttgtccttatgtatttgtttctctaaatgcttactgctcccagggcaactttcttaggatagggttcatgtctattatattcctcaatgaaaagccatgatctagccggtgtctggcacataatgcaagctcagttagttagaatgaatgactgaaggtattgtatataaactgcctggcacagtataggcaagaggtggtccacttccagggaagcctggaccgtctgaggtagctattttgcccctaagcacaagccagcaacaattctcactttcttcggaagctctttaagtctcccaacttcactcaccaaccccctctacacacatatacacaccaagtcctccagccctggttgcagtctgcctggtgctaaggagcgaagtgtgactttgcaaagctgtttgacaacaaaagagaaccactgagcccccaacccctaaaattgctgtcttagctagaattaccataatcaaattgcctcctcccttagcggttctcagataggaggaagtggtttgaacagagtgtacttatttccttcggaacttgtagggagattgagagagggaggaagtcgatcacatgatgtgacctcaatggatattttattgcaggaagagagggatagatggatagatggatagatagatagatggatagatagatagatggacagataaatgtatgaacaggacccttgggctgctaacaagaaccaaatggtttggtctgaaatatgctggaagttttgatgggaactttaagtttcagcctctctcagagctgggagaaatacattcttgatgaatgtcaaataaaaacataaaacccagcagcatctattaatgcagggcactgatttaggtgcactagaatgaataatttctgtctttaaaaaggctcatttcccttggaaatacattgccagatttcacaatttagaatggggaagttttcttctgaaagtgacttaggaaagtgttattcggaaagcgactttagtttgctgcaatgcaaacctacccctgtctgtttcgtttatatcagagggaggaacaagcagaaatacatattcagaaaaatggaggagtgccccactcattgctttagctgtttaatccatcatatttaacactgtttattaatagctttctgcctaggaaatgtaaaagggattggatatattttaattgtctgatttagaaatgataccaatagctcctatttagtacctattatctcctagatagtacatgtaaacttctttcaaacatacagagaaactggtcttctttttacaaggaaaatactcgaaggggcaaagtgacttgtacagagtcacagagttctttggtggccgacccagaatgttgacacaggtgcagctattacggcacaatctttctatgttgccatcttgctgctctgatctagattgtagatctgtttaagatgaaggaatctaattagatttcaatttgtctattccataggtttttaatattattatactttcagagcatattaagcactcttaaatagaattcttcttcttattttttttagatgaagtttcgctattgttgcccaggctggagtgcagtggcaccatctcagctcactgcaacctgcaacctccacctctcgggttcaagcgattatcctgtctcgcctcccgagtagctgggattacaggcacccgccaccaagcccagctaatttttgtattaaatagcattcttctaaatggagactattagttgcaacaaatttgccagaatttttacctgggcttacctctccacttttcgaaggaccacagcccagtttaatagacttgcagctcagcatctcatagcaaaccacacaatgacaatttaaagactatggggtgcattttttcctaaagtcaagggcaccactttaaacacaggcctcagctctgcatccgcttgttctcgctgaggctcccccaaccctttagagcccctcacttgcctctacctcccaccagctccgtgacttggacaagccacctaacttctctgagcctcatttcctcagttttcaaaagcaaataacaatcacaatcctataggattgttctgaggattgcagaaaaataactttttatgcattgctcctccccagccactcgggatggtggatatcacctcctgacacccccatgcacagccccaaatgaggacattctgaggccaaagctcaggtcacttctttgacaccaggctctctccatatgtagacacctaaaagaatgtggagtgtgccatatttcttagaaaattcccgttgtcctaaatctcttccaactctaacatgctgttttcagaatttatatacttcacatgtttgcctttcctttgattcctccttttccccatacacataccacctgctcagattgttattaattatcttcggcatcttcttaaagaagatgcatacaatcacactccaagtagcgctattgcaatccctcaacccacctggctccatgcacctttagacatcatgactccagcctgatagcgtttactgagcacctgctgtatgctgaaactggcctgggcacctagcatatgtcaatttcttcactttgccctatacctgtgtgcattaggtaccatcattgtcactttacagatgagaaaatgaaggtctggagaggtttaaatgagtccctcaaggtcgcacagctaggaattctgatggcaaatcccaattatcctttgtaagaagcctgctaagtacaagcctttttggcgagaatgtctcctctggcagcatcctgcccctgctcctccagcccttctctccacagaattatgcatccaacacccactgagccactgcagtgtgctgggcaccaggttgggggctgggcttctctcaagacattgccccacctgttctcagggagctcctttctgactccagaaagtcaacccctgccaactgcgtgttgaagaggccctgaagtctctccccaccccatctctgccacatactcccaaaataccttcacacactgggcatgactcctgtgggagctgtctgcagagggattgctgggtgcagagtcactgcctctccgtctgtcaactgctgctgctccagaataaacaggcagccgggcttctcgcggttgtggagaagcagcccatgctacacagaagaactgcagttgctaaactggccgcatacttcctctgctaggaacgaggaaggcacagggcttgcagaagggcaggttcctgttttcagtaaccactctgagcaagcttctctctgcaaggactgggaagatagatgggttattaatttttttacaaagcatttgagaatatggccagcttaactctggattctggaatttcagaagcttggtcttctttctctaattaaaaggcaaatcaatggggctgtgaatttgctcttgtacatccccagaactctctgggcccacgaaggctgtggctaagagctgcagcttctctgatttcggtttcccaatttttgcagcttccttctgttactgccgaatggaccccagagcaatgctttgagattaaaggagactaaagagacacaatgacttggtgccaatgtgtgcgtcaagggaaaaaaactagaaagaacattatgagatggcagttgtttgaatatatactgcacagttgataatactgttccagtcttaagtttcttggacatggtaataatagtgtggttatgcgggagaacgtctagttcttaggggacatgcggtgaccaagaggatgtctcgtatcatgacggctatatctttcaaagagtttgttaaaagaaaagctgcatccctatatctacagccatcatattggcacaaaagttattgtggtttctgccatagaagtaatggcaaaaaccacaatcattgtggcaccaacctaatacatctacatctatatatcaagacacaggaagagaatgagggagacagaaggcaaacgggacaaaatgttaatacttggtgagcctaggtgaaggggatataggtgtgcattgttctactcttgcaagtttttggtgagtttgatgttaaaatacgtgtgtctttatgttatatattataaaatgtatgttgtatatgttatacattatgtaaatattgcatataaaatctccctacttacagtacgtgagtctcaagcagagaaactcaggcacatggggcttcagagcttattgatgaaacaggtaaaatttctggaatgctgaccccaagattgcctgggaattgcctgcttgagcttggaatgccaggtaaccacactgggatggccctcagagcccctcacagcccctcacacctcacagagtggacagagcatcagagacttgagtgatctgtccacagtcacacagctagtcccaaagaagagccagggccagaatctacggccggtgacccaggccccagtccagtgaggctgacacagccaccctgggacagtcatttggaaacctcacttggggtagtttgcaaagatgaatcaaaaccctcagggctgcttctaaatttagcaggcaggcactctgcactagagagatggttccttagacaacttgtgaaaacacccgctcaagaagagcatgctgggaaggtacaaaggaactattgcaaaagactgagtgggcagtttgctttacagggaagacgggataggcagaaatatgcagaagtggagattttcccccaaattcacacagaggagtaaaagagctttagactgatagtcagaggtatgagttttgtgatgactttttaatagacacttaccaagaaagaatctagtacagatgaagctctgaatttattccctgtcatttctttagtaaaactttattgagcaaggcatattccacaaactgggatttagctgtaaaaaaaaaaaaaaaaaaaacaactgcaaaagccctgcccttccctgtacttaacttaatttaaaggggactacagagacatggcgacttggtgcaaagtgtgggtcacgggaaaagaactagaaagaacattatggggtggcggttatttgaatatgtactacacagcagattctactacttcccctaggaggagtcctatgggaaagactgaatatgtgactatcaattatggcgacccatcaaagaaactcaatgggttgatgggaccgaggggcgcagatgtgctactttgcacaggtggccagtcgtggggtggatgggctctctctagagatatcattaggctgagaactgtaggaggaaaggaagccagccctgggacaagccagggcatgagaggtgtgcgcagaagggactgctggtttcacacaagctttaaaagtttttgggaaagacaatcagccctaaagatgttcaagtcagaggcagaggcagacaagagagaggcccatagagtgggttcctgttcaaggggtcccgttcacaggagaagctacagaagaaggagaaaggcaggatgcagagccctggaggtcagggccgcaggctcttctctgtttttgtccagtgggtcattgggtgactgaagggttgctgctaacctcccctgacccccagcccggggtgtttatgaccctccctttcgcctcctggagtaaccgaggaaacttagtaggtttgagaaagtgttcctcatactgggcactgtgctatcccaaagcctgggctgtgccagagcagggggatggaatggaggttttggccctgggcccaaccagagacggcagggctgaagcccgatgccacgctagacaggtgactcaaatcttaggcctctgttttcagtaaccccaagcggggtctcagcctcagcactttggacattttggatcagggcattctctggtgtgtatgtgtgtgtgtgtgtgtgtgtgtgtgtgtgtttgtatgtgtgtgtgtgcggcagagttgcagggctgacctgtgcattggaggatgtgccacagcatctctggacctgaccccctagacagcaggagccccccgcacccctccaagtcatgacaaccaaaaatgtcccagaaattgtcaaatgtgccctagggagcaaaaattgcccccagttgagaaccactggatcatacccatcccaaaataagacacgtgtgaaggttgttctttcttgggttgtaaagtgctgccctgagggcagttggttttcctgcttttgtgtggactcagctctgcagcacgtctgcctgtgctctctggtacacatctaagaagctgctgtgtagcaaggctcctttgggtggctgtgtcacccatccttcctctccaccatcatacacgtgacccaagaagaggaactggtttgtggtctgttcaggagtccctgggaattagggcttggaagctacagtatgggcagcctgtgagctgcatcttaaaggaggagcagtttgctgtcaagaactggggtgggagcatgtgagccacgagctgcctaaggacaggagaggaagagcaggaggtggacttctcacaacagaggcccagccagggaggactgtattgtgagttcgcttccatgtcttccctgctcctccaccaccctaaccattcctctctcaaccattttccatactgttcctcagtgattcacacacctttttcttctaatccatcaagaagtctcgagtccaagaatattgtcatttattcaagcatgcattttgtgctccatacattcattcagttattcattcaacaaattttgttagcactcactgtgtgccagacgctatgcatgtaactgtactgtgtgccaggcaagactaggccctaccctcaaggagttcaaagctaaacactcttttttctctgttttccaggcccagaacaaaacaatgttcattacgtatttgctgaattactcactttagccaacatctattgtaaatttcgtgtatgtataacctatattcagaggacagacggggagagaattctcaggtagagcatgaatgtatctccatccctccctgccctcaaggagtttctgatctagcagaggagacagacacacatatcaaaaccccagggtgtaaagaaagatgtcggtagggagggggccatagaggagaccaagaaacctctagggctcctggtttcacacaggaacttcatggcactgaggcatggcgggaccacatcagattccatcccagcagcttggtcttctaggtccatgtactgagtcagcacaagaagcaaagacaaaaacacatagcaggtgatgcccccaccaaggacgtcaagtgtaagcatggagtcaggccaggctctgctgtactggccgaatgacactgtcaggaggtcaggctttaggactcaaaaagacacccagtaccatctgtgtaggaagcagctgatttccagagggctttgcaaattaattagaattaactactggggcccagactaatgaccataggcaaataataacaatgccagccatgcaaggattgagagtcactcagttaagtactacgctgtggtcatcaccttattaaagtgaaatgttcccctatgtaaaaactagctttacatacttcacgttgtcaggagccagttgttatatttctccaacatgtgttgatgggtttcccaggggaagcaataaaaagccacttctccagcttcaggtctcggaggagttccaggttctaggaggttaagagctcctaaggcaattcagcatcatgcggcagatgtgatgttgcagccccatgctgggtcagagtcacagcttggtccagtatgagcagatttccattcctactttatagcttgatttgttttcctctttcaacagaaatattcaaaagtttggaagaaggaaaaggcagtcttgggaactagaaagctttctatcgatggagaaaaccaagtgtaagctaattcatttggtagagaagttcaataccacttattgaatgcaaggcatgacacttggtgctataaaactgttgatgggattcccatatcaaaccatatgaccttcaagatcgcatacaagatagaagttctcgagagtaaagttttgccccctctatggctagatgagtgctgacccacttatacaataatttaataacagttttttgaaccccttcaatgtgttaggcatttctctgggtatggagttagagaaataaatgagtaaagtcatagaagggaactgaaggcatggggacagtaagaggaactctccccttagaaaggtgacatttgaaatgagtccagagtgactctggcatgaaaatcaagaggaaaaaacaccaggcaaaggacataactggtacaaaagtttggggctggaaatacttgtgttccaggagcagacagaaaggaaagggaatgaatattggggaaatgcaacttggcctttgcgtatgttacgtatttagtctttccactcactctatgtatctagacttcacctgaagaaactggcactcatagggcttaacatagttgcctccagtcactcagctgatgagtgacaccactaggcctaggctcatgggctctggaagtaggaaatttgctgtcactatttcactagcctcccattgggtcttcccacgtcccacctctccccgccaatgctcccttcccatcctctttcagccctgtgtttccaaataagactcaggccctgctgctatcctcctcaagcagctgccccaaactcaggaccatcttcatccctttcccacaggaaccacttcacccctttcctggcattcaaagctcatcaatctgttctccaccctccttatcagccccatggcaatgtcagcactcaaggcctccatgccccactcaccataggaactcccctaccactgtgcactgtagacaagcccctcacctcttcctcatgcacttcaccactgccctttctttcctgtgtggatgcctttccccctgcaagggcatggggcaggtcccttcaggcccaacccagtgctaacatctaggaagatgtccatgcatcttcctagatgcctctcaaccaacaatgattgctccctctcagaaggccacttggtgttttatttgcatcctaggaatgggacacattgcgtattggagtaacgagcaagagaggatttgaagtacttaggagttgtgtgatcttgtgggactctctgattctttctctcagcccagtgatgttactaatactactttatcatgagggtccatacataataatgtgtacagcccacctggtctcctggtctagcgcaaggcgcataggacgggacccaccagatagaggtgcttttctttcctttcaaattggagcctgagcttgggaaggcaggagtatgtctaaccatgaccatggagcctagcacagaggctatccccaaagatgtgatccgtaactatccctcagtaaaagaataaatgaaggttgtgccttttgaattaaagtaaataaattgtgaatggtgacttttcacctctggggaagacaataagctaactatgaaaaccatctggggggagagcagaccctattgtttctctggagataaaagtttatgtttctggaacatctccaaagttggatcagcggtccatctggatgagctgatttctccagctggagtggaacctaaatgtgtatgtcatcagaatcttcgggaggtcttttggccctaaaattattctcaggaagaagaagaaaaaaaaagtagccgctttatgtccaccacaactgtctgctgcgaagagctgcacagatatgttgattcgttcaagctgttctcttctgtcattgctcaacctagacccactgcctccacatcgggggagatcttactgttctcagccatgcaagggttgatgaagaggtcagcagtgttcccagaggttgggaagttctctgagcaggacccaatttcagttgtttgcaatgttgcttgctttgctcacttcctgtagctgcactcctgtgtaagccttcctgcctctgacggattgtcacacaggccccactcaagagaacacagctccaacagaagcgcagaggaggaaacaggcatctcatttctaagcaaagagggctgtagccaggaatgttgaaaccttgtattgtatcttcccttggtgccaatttagagtctatcttctgcaaagggcacagagatccttgtgaactctgtttaaggacacagacaaaagacaaagtcttcccatgtatgtggtgtatggtgtagggtgtacggtgctggtgttggtggtgttgggtgttgtcaggccgcatgaagggaattttttcaagggtgtttcataacaccaaccttccttatcttttctattggtcggactttcaaaaactgtaagttccaagaaggcaggagtgtatctgtttggccagttattgacagctagctttggcactttgcatgactggggcaactagcaaaggtccactggaaagacggaggaaaagaagggacggagggcaggagagacagggagcaagttaagaaaaaaatctttccctccttgtagattgcaaactttcttaaggccttaatcgtttttgattccctgcagcattgggcacatagaaggagctcacagatgcccatggaattatcctgataatcgactagcttgctgcagcagagcaggctgtgggcaccgggaaagtggaaacagcggctggacattgagcaataaggcctttgcggctagcttccccacgtcaccggagtcaggcctcttaaacactctgccctggtattttcacctcctaaacaataatgccattaaaccttgcccaatcacttctaagtgtgcttgaacagcacaaaatgacggtaggatctgtaacagcattatgatgacttttattacagtttcctctaatgttctcattctatgatgccttaatactttcatggcatatactttttttctaatgataagattctgttattgttatcagtttatgctgatagcaatttgccaaagcaaactcgaaactagcctcgatgtaatttaaaacagtgtcatccagttataaccgactagatgggtgtgaaatcatctgtcagcgcctgcttccatgcccactgagccacaactaattacacttagtggcgtggggcagacatggagggagagcgatgagtaggcaggcctagttgctatagaaatagttctggccaaaacaatatttcaatcccaagaaccatttttaggctggaaaattttatttttgtttgagtagcaataataaataattataacctgtaaagcatggtacagatgtcagttatcattatttattattggtaatactttataacctgtaaaacactatacagttgtcagttatcaagtattttttgaacctgttacttaattttcacaagaactctttgaaatatcaattgattttaacaattgctaccactatttattgtaaacttgaaacatgtatgcactttacatgttatctcatcaattcatcttaacaaatgaatgaggtaaatattctcatccctattttacattaggggaaactaaggcactgggactttaaatagttttcctaagaacacacagctggttagagggggtgttggacttgaatctgggctgatggaccccatggcctatgctcttgatgccacaccttgaaacatagcacatacccattttacagatgaggaaatggagacccagagaatgaagccaattatcaagttgtcagtgcaagagtcagtaagatttcttcaacccgaaagcccatgatctctctattttttttctgcatctctttaaaataataataattattttatttgaagaggatttgaagaggataatgttggaattgtgtgatgtgggttccagaatctaagcaggctcacggactcacatgtgcccttctcatccagtgccctactgccccgtccaggttctagtgaagccacctcctcctcagatggtccctctgcacccagtggttcccagttttccccctggctcccctctctctgcatggagccacctcagtcactcagcccaggccatgcctcctgtggcactgtcctctgagaggtgaccctgatctctcccaccttctatgccattccctctcctgtgctcatgaggccattcccacccaccagcatctcagaactttctgcatgcattgtgttttctagggcaggcatggtgagtcctttctgctggtcaagagctggcccatggcatttactggaggaaggagggaggaagcaaagaaaggagggacgaaatggagagagaggggcagtctaggggctactggaaggaaaatagaaaaagactttgcctctgtctaggcagtccccactgctctagctcttctcctgggccctgaaacaaagctgcagaaaaaaatgactagaaagaagcagtcagggtcttttacaagttataatgatgaaattatttttaaaaggaaacatatgcccatgtgtatgtatgaagtactcattgacaatggaagggaggctcaggagcctgcattttaaattctctttgaaataagagggcagccattgcctcggctatcactcatggtgtcacttttaaagtgtgacacctttgcctgggaaatcagaaattttcaagtgccaagcatttaaatggcttctgacagccagaaggtgacagaggcaattaggcttcatgtttgtaacagatggaaaaaggcattttgtcaagtctgtaagacctgtaggaaaatatgacaggtgcctgctctgaactaaagagacaaagccaaggctcaggtcctctccatttcccagcagaagtgcccgggagagaccccttagagcgctcccccacaggggcctgggaaggcctccacactgtgcctccacaggcaagggggacagttctacagctagaccacatggactgccgtgcctgtcaaagatgtctgcagaaggcaggttgagtgcagattctgtttggcacatagagggtgggtagtgtcatggctttggagaaaaatggcctgaatccaattccccagcagtgggtgatttgggacaaagtcatttaccctctctgagcctcactctttaataaaagaggcacagtcgtgtctccctgcttagtgagcacaaactgagaacagcatgtaaagtgcttggagcacaccagctccgcattactttttggtaccttccttctctttcctccgtgtgtagacacagctggtgagtgatttaagcttgcaagtataaaaatataccaaggtataatctctctctaggacaggttagcagtccattgtaaaaacaagtttttatatatctatagattgtaaaatatctatctatagaatgcaaggcagaactcgtggaccttgcactaggcaagcatttcttagataagacaccaaacctcaggcagcaaaagaaaaaatagatacatcggatttcatcacaatttaaaaaattctgtgctccaaaagatgccatgaagaaagtgaaaagaaaatccacataatgggagaaaatatttgcaaattatgtatctaataagggacttgtaccaagaaaacataaagaacacttacaactcagtaacaaaaagacagataactcaatctgaaaataagcaagggatctgaatagacatttctccaaagaagatgtacaaatgggcccataagcatagcaaaagattcttaacactattagtcagtcatcagagaagtgaaaattaaacccataatgagatattaactcacacacactaggatgcctataataataacaatttttaaaaaccagattgtaagcattactgaagatatgaagaagtaaaagcattcttttattgctggtgggaatataaaataatgcggccactttgacaaacagtttggcaacttctcagaaggttcaacacaagagttttcatgtgacctagcaattccacccctacctatacattcaagagacatgaaaacatgcatccctataagaacttgtatgtgactgttcacaacagcattattcataattggcaaaaagtagaaacaacccaaatgtttaccagccaatgagtaggtaagcaaaatatggtttctctatacaattaagtataatttagcagcgaaaagatatacactactaatacctgctataagatggatgaagtaaaagaagccagacacagaaggctacatattctatgattccatttatatgaaatgtccagaataggtaactctacagagacagaaagtagattagtgatggcctgcggctgggagtgagggtggagaatggggaatgactgctaatgggtacagaatttctttgtgggataatgaaaatgttctaaaattagatgtggtgatgattgcacaactctgtgactataactaaaaaccattgaattaagtgggtgaattctgtggtatgtgaattatatcacaataatacaatttcctaaagttagctatagataccaagaatcatagtttgaaatactggataaatgtttatcatacaacaaaaatattcttctttaatacggatgttcatgtggcacctatttaatgagaaactattaacatgccatggaaacaactcatttaatacatttttattatctttttgatgaaaaaaaactataccttttgactcagtaatgcctttgcataaggaaatcatcatggatatgtgaatagatttagttataaagatgtacattgcagtattgtctgtaacatcataaaacctgaaacaataatagccatcatttattaaatatttacaatttgtaatgcaccatactgttacaggaaaactttctcatttctttattacaacaatcctatggggaagctctcaatattgttatgttccttacagatgaagaaagtctcaaatcaaacagttgcaaatcagagctgggatttgtatccaagtctatcatatttcattgcctgcaggtgcccctaacctgtctataacattctccctaataacctaaaatcctaaatgtaattagcatgctggcattgaaaacaatcttgtaaataaataagtaatgatacagaatgatatcgacaatggattgttaggtgaaaaagataggctcaaaaacaatatgctgtatagatttcctgaatatatgtttacacacacacacacacacacacacacacacacacacacacacacacacacacggaagagacatattggaggctaatagcatttaacagtggttttctttgattgggaggattatgtgtaattttaattttctttgtttcgttcacttgttttgtctatttggggactgctatttttgctttaaaaattgcagagggctttctgtttcccctttaaataagctaaggtcgcactgatggatgtagagcagtatatgacagcctttttctagagtatgaaaaggattgcatttgtgcctatctgtgaagacagcaaggcttattgctggacctcttatctcagccagaaccacctccttcctccctcggggtgtgaggggactcatttctctcccacctcttattgtccctgcaaaggttttctaaatggacttggccatgtcacttgtccactgatgtgcttacacaataagttataatgactgtttccattttgacaaggatcagtcatattttagtgtggaattcatcttttaaatgtaatttaaattttttctaattaaaaatgtaacattaattcattggagacaagttagaatagtctaaaaagtataaaaagccaatagaactcctccatcattcactcaccttgaattgttagaaggctctgtggattgatcaagtcagactattcaaataaacccagtggggccaggcagcaggaggtaccctgggactggatgcctgtgaatgtcacgtgacctcctccagctgttgagacagcacggaatcatgggaaatgaaaacctggggccagaaaacctgggtcttaacctctttcacctgctactggcaggattttaaacttcttagactctctttcttgagtgtaccgcaaattcttcttggaatgaagtgggccgtacacagaagaatgattaagaaagtagcggtttcaataatattggttcttcctacttcctaggatggtagtgggagtttaaaggagccaatagaggcgagagctctgtcttaagcagaatgcagcacggttgtacatgtgaatcaaagcaacttgggatagactctcccttgtctcacaaggccttttcagtctgcagacataacatggtgtgtttttgagccctatggcattcctgtgatggaggagccaggctcccctcctgctcctcctcctcctcctcctcctcttgctgtcccagccacccttgcaaaaaccttgctgatgagtggccatccaccagccgctcatgagtggaatggaaaataagggtctgtgatgtgcttgctgttttctcgggtaggtagcacagtgtggggggaacaatgaaacctttataattctagccctgctactgatcagttctatgaccttggaaaaattacctacccactccaagcctcagtctctctatctgtaaaatagggattctaatattacacttagagggttgttttggagatcatgagagaaaatgtgaataaatgatgtggcccttagaaggtgccttataaatgtttaattcttttctgctttcctttaagtaaacacacacgcactttttatacaaaaaagaaggaatagcattcactaggccttcttcaaatcctacatttcagattgtctcctagatcatgtctataccaacaggtagttttgatgccttttttcctatgccctaagactgggatttcaagacgaattgtattaattactgtccctgtgatggaagttttgccaaaactgaagtgttacaaataagagtaaaactcaggcttttagggatcaagaaaacaagatgattttagtgtagaaaacatgcaagagaatacaaatattaacttggatgtttaaaaaaagtccatctgtgctttagcttccagagctctcttcctaagctgtcctggctgctcaatagcatgccacaattcagctggcccacgacaccttggtggcaccttccaggtgtgggtgagttcccaggagaggtcggtgcgagggtggagacatggcactctgggtcacacactacccctttatccttagaccttacaagtcaccgatgggctccctgactcagatgctccccactccagtccatcccacagtcaactagccgagccaccatcctgacattcatttccagttctcttctgttccgcatatggtgttccacaccttgtgctgggctttggggatagaggaataactacctcccaacccctgccatcagaagctcacattcaggaggtattgatgctccatcctttactgagggcctgctgagcactaccaaccattttcagcactgagaatgcaaagacaaaggacccagtgacaggaaattcccaagccctttctgtaataccccatttaaaagcctttatggattcctcattgcccgttgcctaaaggatacctgctctgtgtcccagggttggtgccttctaaatcacatctcttacttagtctgggatttaatgacctctgaagtttacttctcactacacttctatggaaattcttctcttcatttagaagtcactggtccatctgcctgccattcattcatttgttcactccctcactcatacagtcattcactcactcatgcaatacatattttgagttccaggccctgtcctggggctgtcggattacttaggacccagctcctgtctataactcccttgggtaatcagcctctgaccccactgccatccctgcccactccccctcggaatggtcacccaccctgttcctcccatttatttcctcccatggaaacccactcaagtcctgatgattctctgcagcttcttctgggccaccctagtgcccagaaatccctccctcccctgaattcccaaagtgcaagaattcttggcttactcctgctgattactggacagagctcatctggaggtcaccagtacatatgtcctgctggatatagtacacatttttaaaaagcatccgcctaaatggggcttgagacttatgcttctttgtgactcactttgcctggaataaaatagagtcaaaagaaatacaaggttgataactctcaggtaatatttggcaattgatttcaataagccagcattcaataagccagctagagatagtcacgtttctagaggcccagtggtctggtgagggcttagaagtcacacatctggtttctcccaggagaagcagagagaagccctgggtttggagttggaacacctgggttcaggttctgtgcagcagagaatttctccctgaaaagacatagtccttcctacctgatttaacttcatagtgctgtggcaggacataaatcaagagagtgagcaaaaaagcaccttggcccgtgtgtggtaccacagggaagcgaagcaagttggcagccccacagctgctttgcatgtagaggcactttcccccaagtcagacagcgcaagggacttgctccccatcagcctaggttgtaacgaggagtttcatcaagttacattgtaggcattaaatcatggataataacattcctaatgatgaatacaaccaactttgagtgcaaattacacatcaggtattttccctccattgtctcctttaatctgcacatcagctctgtgaacgctgatcataatatctccattttacaggttaggaactggaagctcagaaagacaaaggaaattggcaaaatggccatgggcagagctggaattaaaaccccagtctatctggaacaagagccatgagctttttactttgctttggcctcaccccgcaccccccgggaacagaaaggaactgtctgccacaagcacgagatgacacactggttagaacatggagctctggcacctgcagcctaggctcaaatcctggctctgtcacccccagctctgagactctagggaagtggcttcaactctaccctggagccccctctaaagttgaaataatactgttgttacccagctcctgggattgctctgagaggtaggtgagcttctacacgtacagcccacattcaatgccaggcacacaggatgtgctacttgaatgtttgtcctcgtcttcattgttgtgtctgtgctgggcactgctgcaagggctttgtaggaattaactcctcgattccacgaagtgcctgatggataaggagctcactgagcacctgcttactgggcttcccatccttcccctctccatgtgaggtagacaccactgtagatgaggattcacattccagggtgggactgagaagtgcaaggcgtgccaggagggaggcggagtccatccagaggaccctctgacacatggatgccccagggcagagctgccagacctcctgcttgtccgggtagctgcccaccccgcttcttgttgctttgcttcttggagctgctctggggaggctgcctgagggattcctcccgggaaatgctgcagggtccatttcaacaagggcagctttgtgtgtgtgtttgtgtgtatgtgtctgagtgtgtgagtctatctgtaggtgtctgggtgtgtctatgtgtgtgtatctttgagtatgtgtctatgactgtgcgtgtgtgtctctgtgactgtgtgtgtttgtgtgtccttctgcacttatgtgagtgtgtgtctatgtgtgtgggtgtatatttctttctgtagctggatgtttctgtgactgtgtgtgtttctaagtgtgggtctccctgtgtccatgagtgtatgcctgtgagttttatgtgaccatgagtgtctgtgtgtgtaagtgtgtatctctgtgtgagtgtgtctctatctatgactgtgtgtctccatctgtggctacgtctgtgtgtgtgtgtgtttccatctgtggctgtgtgtctgtgcacgtaagcatatgtctctgtcagtgtctgtgtgtgtccttaacccacttagacaaactccaagtctcctggtgctgctttaaaacaaagcaagtctcctgtgttgtgtgatttccagccagtggctcactctgatctccaggatttttaaaagagaaagagaatcctaactcccaggatcctctgagaagtggtaccaataaactccttgattgcgtgagtgtgtctccatctgtggttgtgtgtgtggatatgtgtgcttggccaggcgcaggccctgactccgaagcaactacagtgactaactgaggtcaaggcaccttaccatgttcggaggcccgaggaacaaaaagcagtggtcagcaattgtggttttgacctgaactatttttaaagttaaaaaaacaacagccagtggaaactcctcgccattgaatagctaggtcagatttagataaagccggagcccagggctgtggacctacaggcatggctgggtggactgagaagacctgatccctttacatcctgtggggtcccgtgaatgtcactgcactaaccacagtgcagccacagctcccactgtgcagaggacacgcttcttcacctacctggcctcatgcatctttgcagcaaccctataacgtatggttgattgttctcatcacagatggtcacttgcccaagcccacttcatcagggagtgacacagctggggttcaaaccgagcccttctgccccaatcccatgctctctacacacctctgcacagcaactcccctcctgcccccgagtgctttgtctctaatcaagtgctttaaaatgaaggctgagtcaaccgttggcttgcgtaaacaccaattttccacggtgaaaaaggtttccttcagaaagatcaatttaaacaaaatactttaagagaaagaaacattctcttagccatcttgcaatatcagtgtgacccacgcctttaaccacttcctcaccatatcaggatccctggctttttatagccgaaggaaatattgaaaccgtcagtgggggccccatcctgacattcacatctcctctctgcctgcctgtgggcccttctgctgtttgctattcagaacacggagttttgagcttgaatattttgagtgtgtgtgtgtgtgttttcttttcttttcttttcttttttttttttaatttaaagtacatccaatggttcttaaaaaaagctgccctgctcattgttggaaaaataaacctgagggcacaagaactcaacaataggctaaatcatattgacgcttgttccttgggtcattgaattccaggccttggcctggctgagtagtttacttttattgctgctgcttatcagaggatcctgggagttaggattcttctctctcttttaaaaatgctgagagcagagtgagccactggctggagatcacgtagcccaggagccttgctttgttttaaagcaggaccaggagactcggagtttgtctaagcggttaaggacagaaaatcacgtgtatctcccagccctttctggagtctatggacctagttgccaggcatgttctgagaagcccagagccattacaaaagttcctctggcaccaggtctcacagcggccgtgtccaggatcccccaattccatgcacttgtgtttttccttgccactggctgagattctgactggccttgcctctgaccctagccacatgtcccttcttgagcttgacaataaacagagatcatcgtaacaacagtgccaccacctttcatcaggaacctaccaggtgtatgaaaggccacttcacagtggctcagtgtttggccgctggggtcagatcccagccctgcctcctaacataactgttacatgggacagtaagagcaaccgacttatacaattgctgtgagggtctgatgagctgaaatagggaacctcttgagtgagtttgtcggagccctcaatccacagtggttgctattatttccatcagtggcagtagcaggggtaagagcagtggcactggtatcaccaccactgcctcccctggttacccatgactcttcagtgggcagccagtgtctgagctacggggagccccatagcggatgcaccctggaactgcacactggtcaggaccccactcagctcatttgttcctcccaggcggatgacccaattctaccaaaagtccgggcagagatgaacttcctggaacccagctcctaccactttcattattagaaagaagaaacctgtcgttttcttttttttttttttttttgatggagtcttgctctgtttcccaggctggagtgcagaggtgcgatctcggtccactgcaagctccgcctcccgggttcacgccattctcctacctcagcctcccaagtagcagggactacaggcgcccgtcaccacgcctggctagttttttgtatttttagtagagatggggtttcactgtgttagccaggatggtctcgatctcctgaccttgtgatccgcccacctcagcctcccaaagtgagaaaccagtcattttaacagagagtaccctgattttgatgaagcaatttacccttacaaagactgtgttttcgtcacctcctaggtgggcttccattttaaagtccagctccatcttaatgcagcttgctagttaaggagccccccaggaggtgctggtgggagatggttctatctttgcagagttctcttcccagaggactttgccacaatctccgatcctcttaaagaaccatcagccctttgcctctatatacaaattcatctgcacagccaagactgaaggttcccttgtgcagcaccctcacttcacaggttaggaaactgaggcctagagagacatcttcagtatcacactgcatgctgatatgctgttgaccaatccttatcttcccattgtgtgcagccccagaatgggtcctgggactcccaagcttggaggaaggatgcagaaccctgatgtggcactgaggactccaggtgagcaggggctgaagatgatctgaaccatctgccctgagcctgctttctcttccagggaggctccgcactctccccggccgccgtcatcagccatgagagggctcagcagcaggcaattgctttggcaaaggaggtcagttgccccatgtcatccagccaagaagtggtgtcctgcctccgccagaagcctgccaatgtcctcaatgatgcccagaccaaggtgagcacttaagtgcaagttgggaagggacattctctggtcttttacaaatagaaaatgaagacctaggaaggaggtgtcacccaccccagccataccacacatgaggctgatgaccaactggagctggaactcacattccctagcccctagagctgtgcatgcgccacagcctgcaacagtccaaacatgggcactgagggtagacagatgcctctgcaatttgtctttcttatttataacatgggaatagttatacagaccttatagagtaggaggagaaaatgaagtcacacatgtgaaggatttggcctcactccaggaccgtggtgggcaggggaccaaacccttaacaggtcacagctagatgtgttgagtattgcagacatggcttcacagatggcagtgtatttgagtcacttcactcccttatatgggatagctgtgtgttccctttatagcatgcaaagttcttgcttgcagaccaaatctctggctggccttcacattaatgaaggggacattagcaggaataattgtcatggcaattgatggcctgatcgccttagcaatgagtctggactcacagaattggagcaggtcttattctcagctcccctaagtgcaggctaatttgatcatagctggagctggtgaatttcacctgtcagagtcactgcctcctcttcaaccactgtctcctcctgccttcctcacccacctacaggctcaggctttcccatccctacctggggatctgctgttacctctgggatgctcccctggagaccatcattgctgagagtgagattcattcaccctccagcccctgactttgtcacatggtgtcctgcctgccagttgtcctggtcactttttctcagtagagtcatagatggataaccagtattggcattcagtatggttaagacctctttatgcaaagcagtgcaactgattattccaggacaactgattattgttgcatccaatgcagctcctggccgtgagtggccctttccactactggggtcctgtgatcgatggccacttcctccgtgagcctccagccagagcactgaagaggtctttatgggtagaggtcgatctgctcattgggagttctcaggacgacgggctcatcaacagagcaaaggctgtgaaggtaagcagggagggggcctcggatgtctccagctgggcatttcctaagggctctggacctcaatgtctgacttgatcaagagatattgaccaattgctgagtaactactgtgtgcaatgcctatgtgagtttaggaggtggtaatggggggatttagaaattagacacttgcagggtagtgagcaacacaggcacatccacaaattacagctgtgaatgaatcgctgtggaaaactggagctgacccagaagctctgcagctcagggctgcaagttagaatacccacattctggaccatgccacccatatttcatggaggatgcttgttgtactgagaactgagagatgatgaggcagggagatgaagggactcttgttaaatcatcaccctttcccaatcctgaaaaagacactgaagcaccaggcttccaagttaaatttcctagtaaagagagcacgcacaatgcacctggcaaacacgcagctttgtgtggcttgctggaggcacagtgaagtgggagtgagctgggaggtcttcagtctgcttgaatgcacagttcctgctctcgccagaagttacagccactcactaggatgtggctaaccctggaagaggctgagcacatgctcctctgcccaccccaccctgccttggacaagctactcttggccaaagccttgtaggtggtcaagcctacagggaagcccagtgtgcataaagcacaaagagaggacaactctgggcgtgggtggagtgcaccttcccctgcacatgcatgacatgggtctctgttggctctgttgaatataaggcagtctaaccggaattttattaaatcatgaaagcaaccaaacaggatcctgagttcctttggataatcctgtttcctttgggtaatatatttcaccttggggactctatcctacagcaataaaagctccagttttacatgatatatatacaagagtatttattgcattgcattgtttattgattgattgtggcattgattattgtggcaaaaaattggaagcaactcaaatgtccattaacagggaaatggttgactaaattaagatacaaacaagctattaaatattatgcagatattaaaaagaatgagctagatttatctctactggcttaagtgatgcctctgacacattgtaaaatgacaaaaaacatgtagaggaatgtgaaattaagatagcattcatatttttaaaaaccaacctgtatatatctttatatttgtaagtgtgtatatttgtatgtttttctgcatagaaggataactgagtaaaaagattcacaacatgcaattaacattggctacctctggagatgtagagatgtgagaaagaatattatgcattattactattgctgtatatatatacacacatgcataatgtgttacatattatatatatttatgtgtgcgtgtgtatgtagagagagagaaagaagcagggctggtgaggtttgcatgtgaagttgatttctgaaggttcctatctggaaggtgggtgtggcatgtgagcagcgatagagttctctctgagggtgtatgagtgagtgtgtgtgtgttgcaagggggggtgtcaagtaaaacttagtcaccctcagcttgcatctagctaactcacagccagggcaaaataccttttgtacctgatccatttcaacattttttctgccaagcactcacatacagcatagcccttaccctgaggggctgagattttattattggacaagacaaccattcaggaatcactggaaatgtgccactctcctccactgcctcagagtttgtagtctctaaaacagggatcctcaagttgcttctgatcaagcccctcatcagttaagaaatagtaagtttagttatttaagtataaattatatacatgtgtactcttgtactaataccctgaattattataaaccctttattgaatcaaaagaatgttaaagcaagagaaagaaatggaagttctagtcttagtattctcttgctgcccctaaacactgtccgccctggagacagtactctgaggcatgggcagactgggatggagctggccattgaccagggacaatttcccactcacctccttatttgataccctcctacaggggatgcaaaatctctgtgcacaagacaccatgtcctcacagctctggttctttggaccatgtactgaaaacttttcatggccatcttcgacttttgaaagagaggaagaactaattttatattcccaggagccttgggatcagcctagaaagggctgatggggctagggaggagggcggccctgtggttagttcccagacctctcccaactcagtggaaatgccatccatcagggagggtgagggggttgttcttgttggcagatctgggaccatggtgttcagagggtagcccaggctcatgttttctgattatgcccgttcattgtgagagggatgactgtgggctcatggctgccttgggcttccctggttcaagcacggtcccaggagtgtctagaagtttcctaactttgtcctgaattccttaaccagtccagccagagacctgaatccagaggactgggatctctactcaaggatgcatttgcattcttctcattgagcttccctctaaggtttttaaggaaagcttactttgtttacttgcaaagaaagatggggccaccagcaggaggctcactgccaaacaggggcctggctggagaagccagcattgaagttgggcacccccaaatagagaagcctctctaagggcacagcagagcagctgctagccctgctccatggcggtcatcccagacaccaatcacagggcagtgttcccccagcacatttgttcattggttagaccgttcgtttctggcttcgcttcttcattcattcccttgggacacgcattagtgaagccactgagcagcttttgtgagcctgcatcctgccaagaactcatctaggtgctaattgatgaggaggactacctgcagcaggagagtagtgacggtgggactggaagccagctcacagctcagtgccactgcatgcaatcatctcctaaacatgtgtctgcacacagatttattcctcctggacttttcccttgaactctgaactggtttagccaatggcccacttgacatcttcacttacatgtctcatagtgtctcatccataacacacccaaagtggactgccgattccacctctgctcccatccccaaccagcatgttcttctgtagtcttcaccatctcagtaaacaactcagcaactaaacaactcatccttctgtactcaggctcaaaaccaaaagtcattcctgacactgctctctcataccctaccagcattctatcagaaaatccagctggctgtattttccaaatgtatcccaaatccaaaccctgctcccctacctcttctgctatcaccctgatccagccactttatttgagatttttgtgctagcccccaactctctctctgcacctgccttgcctcttataatctatgagaagcacagtagccagagcaatccctttataagtcagaccattttactcctctgctccaagccttctctccagtggcctcctctcatgcagaggaaaattccagtcttctatgaactgccagagcctatttgatgtgacctctgttagctctctgaccttaactcctgctgttccctcttggctcactggtttatccctttagagtttctcaaataggctgagcacatcccatatcagggtcctggtacttgctgttttttcttctggaatgttcttcccagacaactcactgccttactcccttcagggtctgcttatcagaaagaccttgcttgaccacttggattcagagggaagccatatccccagccttctctatccctacatcctacaccctaccccagcactcaaacctcctgccatattatgtatttgtctgttgtctttcttccccaactagaatgtttgaaactgctatatctctggtgcctagaaatgtttctagttctgctagacaaattgcacacagcaggcacacaatagacattcactaggatgaatgaatgaaattatgaagaactgactatgtgctgggccctaacctggaagtcttcaatgaaataattcaccctcacaactattaccctatgaggtggggattattattactatttttcagagagaaaccagaattaaaacccagttctatctgcctccaaatatcctcttcccatgacgtcactctgggaaaagccaggctttcctctgagagccttccatctaccatcaacggtatgctgggtactgaaatgtacacaaacccagctagaataaaggctactatgtgcaaagggctttccaattctacccacattcttttttttctgtagtcatttattgatttatttataattttaaaatttcaatagccttaggggttagcctaagtgaagtaactcatgctcttactttacgttatctcaactgtatggctgtgaggtagggaaccatgaaccagtatttaacacgattttttttctgggaaagaaaggcttagtgaggtttaccgggtgtctctaggtcagctaactagtcctttggaaagccaagtctccactgcaggtctctgaccccaattgcagggcaggagtggggagggtggcgggtggcaggctctacccattaccctatctgtgataaacactaggtcagggatgcgctatcaccaccttacccccaccatacgcaagcatcacctagagagatcctcaggattctaccccacacagaactgcaagagggcacagtggacaaccaagtggaaactgagttatgagctatgctcccaccctcccaacagtgaggaaactcctctggacttcaacccaatgtgcccttgtattgccctcccttgcctcagcccactcccaacctgaatttagagttgggcttgtgcatttctctgtttgccccaagaaggctccatggcacctgggtccaaccaccatcagccaaggaggacctgaagatggcaggttctggagggcctcaatctcagccatgccttttactccatcctctgtcctttgatacccacccagcccctcctgccccatctggggctgagaaacaggacatatcaattgcagtaaattgccacatccacctaaacagggtgtccagcatgtttttgtaacaccaacacctgtttgtttagtcatgctgggccaggtgtttcagcataaaatacaaattgaattcctcccctcagaagggcttgcagtcagatgataacagacaaggcaaacaactgaaacaccattgatacatactatatggagagatggacatctattccaagacctcaggaggtggagatcaggtgccattgggccccatagcagcactgtcagctggagtgacacaatggccaggaactgaccaggaccccgctcccttggtcatgtgtcaacacagcagggagagtgtcctgggtgtccttggattgcaatcacgagcatccaagttacccagagtctgagcctcagtttccctatctgtgaagttgggagatgattagtaaatatcctcataaagatgttcaaaaattcaaatacacaacaatatctggaaaatagtttggcttcaataaatgttcgttcttttcccttaattttttaattttaatattaagattagtgtccaaagctgttatcccttcttcagataattatacacagaaagcaggaatacaaagaacgtccaatctctgaaccacctcagctgacctgagaccaattttccaaattgtagtaaacacaaatgcatgctctctactcatgccaacgctgcataagtatcagctggatcccagtccacaaacacatgcagtgcagcttcccagggaagtcacggagggacaggagtggagcctcttaccccaagtcctgccccctggagctactcaccaccagcagagacccacccattttcttcagaccaaagacggagggtgggtacaggatccatcaagtccctctgaagaccctcccccacataccaccccaggccacctatggcccacccagggggtcccaatgacagcaaagttagcaacctaccggtggagcatcagggctgcctgagatgttctccattcgcagcaaatgatcttattttctgaagtagcagctttctattgaaattcttcatcagtcgctgtcatggggaatttctcccccttttctctttctttctaactggtgaaattgacagtctgcctacattatccaggcattcatttgcatgatcaaaagcagatttgttccaagatgcaatgttctgccttcccttccaagcacaggcatctccaaggaaggcgagaaaaatcagaaacagagcgcctccgctgtgcccctaagcttggccaggagttggcctcgtctgggagcaggtggagtgggggccctgtgggtagcagtagggggagggcagcccatgtgggagttggaaagcagcacctggcagcccgaggcgctggcacgagccccagcacaggaatatccagtctttggtgacagattatagtaagaggagtatgcaggagtttccagtgtgtgtgtgatttcctgaaaggaggcactgctgccttaaatccccagcactcagggacgggagggtgttagggtctgaacccagggcatcgcggggacctggattcagaaaaatgggtcacaattcttagctttagccacacgatgtaggagagttgctgaactggtctgagctgcagtttctttagccttcaaatggacacagtgagagccaccctgtctgtctcttgcagtgttataagaagcgaaagaggtatctcccaacacccagagagccctgtaggtctcatggctctaggatgcccttgcacactgtaaaccctccaccctggagctatagccccacattacccctcacagctgacgcttacacgtcacgttgtctaattctccccaggggccctgtgagctgggattatggttcagagaaagctgaggatcagaaggactgacttgtcccccccaaaatattaaaatattgtatttcatgactgcattgttataaggatgaatgtaaaccaggctggattcattattacattttcattattattatattttttcttctgattttaaaagaaattagaaagaaaagacttttgtgagttcctaaaagtgcagtgagcccttggccctgagcaagctgtgcttgatggagaagtaagtccttgtcccttaacaccataaggagcagtgaagtcaggagtcattcaagcattaacccatgcagcatctctccaacatagattattcagaggcttctgtgcgctggactctctctaggctttagagggcacagttgtaacctaaacagataaagcttctgactcggagagttcatgttctcatgaaaggacacagatgatgtaagtaaataaagaatttcagatcttagaaatgccctgaagaacactgaagtggggccattgcagaggaggcgatggaatggggcaattactttaggggcagtcagagaaggcttttcggaggaggtgacttctggactgaggcctgagcaatggggagccagcgatggggattgaggtacagagtgggtgcaaaggccctggggcaggagtggtcctggctgtttgggggtcacagggaggtcagtgctaggagatccagtggccagtggagggactgggaggagaggaagtcagagggatgaagaagaccagttatgagatctttcaggccatcagaaaagtgactttattctccttgcagtgggcagttactggaatgtttcaagctaataatagaaggtgattatattgatccactgttttaaaaaggaacatttctggcagctatatggaaaattgactaaggagatgtgtgacccaggaagtagagatcagattgggctctattgtggaaatccaggggttgagctagtaacttaaattagggttgcagacatggtcacagtaaaaaatgatcagatttgggatatatctcgcgttggcagctgactatatgagttgggaattcagtagagaggtcagggctgtagatacagctttggaagaaaaccaagaaaatgcggtatcacaatagccaagaaaagaaagcatttccaaaaggaagcaaaagtcaaatgtcacagagtcaagagagatgagggcagagattgggctcttgtaggtcatgggagaccttgatgagggccatttcagtggagtaacgggaaggaaaggctgattggaataggctgggggaagaggggaagtgaggacatggtcacattgcttcccaaacccaccctgtctccactgaatgatgctctccactggatgcaaacggccacccaggattcacagagcactttgctcattcaccagctgaccccactgacttcaccaagctctgctccatgacaggaattgtgtcatgtccatttggaatcctcagttcctactaggttggtcttcaattcatgtccctctaatgaacaaaggagtgttgtgtctccatctacctcagagctctagagaattctggagcatttgtgtattcattcactcatccattcatataatcttgcaagaagcaggtgaactctggtaggcttcctacttttctggtggggattctgctctgtgtctccttcttccccaacctgtgatgttacaaccatttttcaaaaattggagcattatcaatgagcaaaaattgactacaggctgtctgtgtacaaaccattcctcccctaagcccctgccaagagcaacatctctgcttctgccccagtgtggtagaggagatgtgctgtgaactaggacagcagtaggggtggaccggaggtgggggcaggtgtcactcaggatgaagatcgtaggcacaggctacagcaaaatgtaggggaagaggggaatgattttaggagcaatcaggaaatacctgtgttttaatcaggtaattgagggctggtcttagtcactaaggatagggaaatagcaggggaagaaggttctaggggtgaggaagaacacatatggatgacgaagataaattgtgcctaggttgagtttgaggggcctgagagatttccaggtgatgtgaggcatttatatgaaggtatgaggttcaagctggagagagatttgggaatcattagcttaataggtcattcttcaagcaaggagaggaaatggccccaccccacaagcattcgtggacagaatgggaggaaaaggggacagggtggcagctgggagccttggctttcaagagtagtcagagacagcagaacgaggttccagaaattaggctgaggcagagctgactgggaggaggagatggagaggtgggggatggggcgtctactggtggacctctgcaaggttatcagtgaccttgatggaggttggggtagccagatggccatatggtaaagaggctataggacagttggagcccaccatgtagacatgctcttggagtgcacatctagctgagagcacctggatgaagcagatggaggagaccctcctgttggggactgccaggcaggcactttagctctaggtgggggtgggactcatggagagctgcacactgaaggtctgaaagagccagtgggggggtttgcccagcgaggggctccagggctgtgggcagcaaagactgagcctcagagagatggagggccctcagtccaagaggaggaagggccattccctgaggagagggcagtgtggcctgcagagtgcgctggccttggggtttgcagcaggaggcagggccagggggaagcagcgctgaggggccagtcggctccttactgaggctctgcagtgcctggggccaatgcaaggacacccagcctggcctgctctgtgttccatgctctctggcaggtcacatttgcaaaccaggatggggaagctcttctcccaggtcccgcctgaagcaaaaaagcaaaaggtagggtgaggctctcccagccacccagccctctgttctttctggcttctcccctgctcctctgccctcatcactccactgaccccgtggacctcgctgctccccctcacccagctgtccgcatgtctgaaccctaccctctcttgtctggactcaaccatcctccacgctgcctaacccagctccctagggcacaactgggaccctcactgcccagcacccccgtcccctttccggcttcctgttctatgcacgaatcttgttccttatcaccccaggacagtccatatcacatagatgtgctgtatattgtcagcctgtctcacagaactagaagccccatgcaggcagagaacagcccgattgttcgctgatgtgtcccaaatgcctcgagctgctcctggcatactcaggcactccgagcatagttgttgaagggacggtaggatgaacagcaagggcctgcagccatgtgttctcatcgtgtctctcagacaccactcggcgtgaactaaagggcatttctcacctgccttgctgattttctttttaatcatttactaactagagggaagagagaagtcatatttattgtctcccatgtgtcagcctctttataatcattaatgcatttcgttctaacatcaaccccattttattgacctgaaatgaaggcacagacaggcatatccactgaacacatttgttcattggaggtgaatcttctgaggccacagaatagagctagatttgaacctgagtctctcaaatgccaaatttcacattcaatccactgggccccaagacattcaggttgatgctgaggccctgctcagtccctcggtgtttccaagggctcttacttttcattaggatgtgttaatggcagtcctttaaaagcacacaccaaggagtggccagttcatgacagccctttgtgtaattcctgcctgtaacaaatctactgtctaaggcagaccccgcctgtaattacagcttgtggaagtcagcacatgcagtcacacggtggcccccactcccgcctgctgactctctaattaaactggcaatggcatctgtgctcggggcctcgccaatcatgaaggaatgtgtgtcccaggtcttgctgaaaatgtgccccttcacattcccttgcaccccagtggggcttgggaatttatctcccactatttgggagacaacttttgggtcatctccaaaatattgaccagtcatcaaggctgcacccaattagtgtgtcagatccccataaaatgtggaactctaatctcagtctcatgggagcataaactgggcctcatccctccagctacctggctgtgaaggtgttctagatcattttttgcaagagagacttatttttgcaatgcccagggcttggtgtcctagcactcctaaaagctcatcttagaaggagtttccgcagaacccatgaaggaggctccatccatgattggggccagtcctttttcttttcttttcttctttttttttttttttttttgagacagagtctcactgtcacccaggctggagtgcagtggtgtgatcgtggctcactgcaagctctgtctgccagtttcaccccattctcctacctcagcctcccaagtagctgggactacaggtgtgtgccaccacacctggctatttttttttttcgtatttttagtagagatggggtttcactgtgttaaccaggatggtctcgatctcctgaccttgtgatctgcctgcctcagcctcccaaagtgctaggattacaggtgtgagccaccacgcccggcctggggaccactcctttatctagcaggggtttggaaaaagggttccaagtgtttgggctcaagctcagtggggacaaagctctgctcaggcctctctctctaagacatggactttccctggcctgtctgaatggggctcaaggctgagtctacaaatatctaacaacaaagacaatagacacagtgctaagcactttgtaggtttcatctcatctaacttcatgacagttttatgatgagggtaatttgttgtgcccattttacagatgaggaaatagacatagagcgattatataactttcccaagttcatacagctaagaagtcgcacagttaccctccaagcccagacctttccaactctgggatttgaaacccaagaggtttgactttagcatcctactttcagcctctaacctgtattatctctacagaggtcgttcattcaatgcatatttacctatgacatgcctgtcaccatactgagcactggggctatggacacaatccctgccccctttgccatgtagtactctggaacaataggcaaataaactaacatcacagcacctgggtcctgagggccatgggggcccctggtttagcccgggacaggttaataatcatcactcaaggttgttgaccatgtgccaactactgtgctaaacacttttaatgcatgtttcgttgggatctgttaataattcatgcaataggcatttttcattatccaccttgtctaaagaaggaaactgagctacagagagaggcagcaatttactcggggtcctggaactacaaggtagttctgccctttcaaccattatctctagagcctgacctttcaaccattatctgtcctgtttcctggaggaggtgagccctgagcaaaacctggattttctattataatctgattgctgactgtgaagttcccaggccaacggcatcagcatcacctgggagcttgttaaaatgcacgttcctgggctccactctggacctgctgagtcagaatctgtattttatcaagatttcagtctactttaacgcttattggattaaaaagcatgtgtctagttcaatagctgttatccaggcaaactagggaaaggtgtttaggcaggaggaacagcaggcgcaaaggcttaaaagtacgagagaacatttggtgttgaggaaacagcactcctcacgtggcctgggcattttggtaatatttcagcagcctagttctcaggagtcacagaaattgaaggccaagtggcagctcgtctgggtggcaagggcaaagcacagctgggtttgttccccacctgtgtgacttactcagctgtgtaagacagcacttagcctctctgagccagtttccttgtccaccccctcaggatggttatgggagcaaatgagaagagggtgcaccagggacccagcacagcatctgacacgcaatgggtgcttggtgcgtggcacttgtgctgacctcggctactccctttgccgacatgactcaggcagcatcattctcaccccttggcagtctcctctaagttccagcaaatggcattgcacagggaggagacagtttatgaacttgttttactcctctgcagcccaggaggcattggtatcttggctagggctctcactatgaccccctcatgttatgtatgagaaaatggtgcccagagagagaaagccactctctcaagtttgtacagtgattgccagatagcgggtgctgggacttggagatcctggtgcccagacctcagtatagctccctcatgttaagatttgaaggcagattatgcctgccacgtagcaaagcagcctggggagaacccactttagtgccactgcaccgttgtccttgtaccctcctgggctcccagaactgagttctccccacttccgctccagcccggggcattagacccacccaatatctgaggtgggggcatcatggattccttctttataaagcatctgtgagcagtacttggccctcgaatttggcaccttctgccttccccacctgccttcactcatcgcccaatctccttgttcacagctcagagctgagcaaacaggctgcagcattgagacagccactggaacgaactattatattttcttgcacagtttttcaaatattcatattatttatatgaaggaattagcatagaaataaaagcaagagagccttcttccatgaagatagatacacatagcattttttaaatgctttcttcatctaataaagcggtttggggccctgtgttaatgcttcagttttctaattgaaaccaattaaacccatgatggatacaagtaggtctctttgattaagggcgtatgccagactttgagtgaggtgcttcaaaacgttatttctaattctcaaaacaacgctgtgaaatagattttacttaactccattttgcctatgagaagcctgaggattagagaggctaagtgacttgcccaaagccacacagctgggaaatgcaagagctggaacccaaatctgggttgccagctccaggccattgcaccttgcactgagacttcctagctcttcttagcccgcacccacgaacaaccagccacgactaggagtgggatccttagcaggcgactgctttgttcacttcatcttcacaggagacaaaaacagggcccatatgaatacacacaatacattcacatttggaagatgtctggctcagagagaggaaaaaatatattttccaagatccccccaaatttggcagttagcacttgaaccctaagttttgactccaaactcaatgctcttttcactgctctgggccaggcacttcatgggcaaaaaccacccatccttccatgggccgaggtcccagtgtccacagctctgatgtggggtcctgcttaagttataactgggggaacgagcctgtctcttaccagcagtaagacctggggttaaatctcacctcatgcatcctgtctgtgtgaccctaaacaagctaggcaggttctctcagcctcagaattatggttcataaaatgggataacatcgtgcccaattcaccttgttattttgatgcttcctcgaaacatatgtgtgaaatgtttagcacaaaatttagaaatagtaagaggggtgccagtgggttactaatatcatttttgtaatgaaatattccaggcagaaaaggacagagaatataatgcagttttttccctaaactattagcaggttgtagagtccacaaaatagattgtaggtgagtattttttgaacagactagactagactagggtagaatagaatggaaactctcagatgcgttgtagatggtaagagtatggagtgtgaacattattcgtgagtgctatttcaggtctgtgtctgtgtatgtccatgtgtgttctgttatgtataagataactttcttacatgatcatggtcaaaatatttaaaagtcgctgatatgatgaatattcacagattcaccattcagatctcccaatttcatatttgctccagacttttttccccaataatcaaaatgttattgatagaatgagaacaaagccctctttgcatgccctcctggcttcggtcatcctgaaggatcagttagtccacagggtggttcagccttgcttctcgttcagccgggtggagagtcagccatcccaccagaaggggctgtgttcacccaggagtggctacgttcacccaggaggggctgttcccacccaggaggggctgttcccacccaagagtggctgtgttcacccaggagtggttgtgttcacccaggagtggctgtgcccacccaggagtggctgtgcccacccaggaggggctgttcccacccaggagggactgtgcttacccaggagggattgctcattgatggaattctaatcacattgatggaattctaatcacaggtcctgtgtgcttgtaaatgtttggagaagcaatttaaacacaccagagtgtgctgataagcacgttgcaccgtttacataaggtcctagaaatatgtaaacacatagcacaggactgtgctggggcccaggaggctgggcctcacaccaggggctgcatcccagactttcccctgcccattgtcttcagaaaggaggaaactgggtcctgggggaaggcagtgaatggccccagactcccacagtgcagacagcagcaacaccagaacaaggaaggaacagagagaggggggaatttcagagagaaatagagagagaaggagagagaaggggagagaaggggaggggaagagaaggtgagggaagggagagaaaaggggaagcatgaaggaaggaaagagaaagacagagaaaagaaaatagaaaaagttgcgcccatctggacacacatcccccagagaactgcgtgcctttcctggccatcctatataaaatagccccagccccagcattccatatccttcgtatatggccttatatttctttgtagcacctgttccctgatataccatacatttatttgctcattttccacctctgccactagaacgtgagccccaagagacagggagcttgatcggcatgtttgtggctgtttctccaagcctggggcactgctggccctggtgaagcgtaactatctgtatgaaagtgtgcatgaagcattcatatgatgagtgactgagtccatgaatgaaactgaatttagctctcctaacatgaccagaccacagttactcatgagttggctgagcaaggagcccgggaaagcaagtgaaactcgggggtttgacctgttctcagactgcaacaatggttaaccttaacagagcacttattaagtgccaggtaccattgtaactacttgccataatcctatgtggcaggcactcccattttcagatggggaaggcaggcacagagagggatagccatttgcttaaggacacacagctagaaggaggcagagctgggattcgaactcagacagtctggcttccacttgtgtttaatgccatgccccactgcttcccagagagaaaattctagagcaagggtttgagggacactgacttggacctttcagaatccaactgaggaatttcgtatctttttttttttctagcaatttgaggaaagtcgaggccggaccagtagcaaaacagccttttaccaggcactgcagaattctctgggtggcgaggactcagatgcccgcgtcgaggctgctgctacatggtattactctctggagcactccacggatgactatgcctccttctcccgggctctggagaatgccacccggtaagctaagctgcaggagggtgcagattcctactgctatgttttggagcagactcagttggtgttcaggtcatgaatgagaaataaaggcacgtggctttgtgcttgaggtttcctctgcatcattcattcagcctacagcatggggagtgtccctgctgaggggaaaccctggaggacatgtatggtggaccctgctgccaggaaaccccaagccaatgagagaaatgagggggtgactctggctcttcctgggccatgagggagctgtcggagggcagagacgaagcacttgccagaagtgcctggtgcacgctccacctgaagcagccgctcagcaaatgctcaggacaaccttccacgctcctggccttgcattcactgagcccagtgcccccagtcttggctgcccatcaggcacacgtgagcgcatttaaagggtaggtgacacacagggcccatagtggggcagcattttccaaagctccctcagctgattccaccttgcagtccaggcccacccggcacgtgggaagcagaggcctggaggcagggaggttttgtggctgataccactccccacataggaacagcccaagctctgacagccctgcgccctctctctggggcccgctgtttcttgtatccactgcttacatgccttgtccccattcaagctcaagcttctctcacttggggaaggctgccaaacccccaccccaagatggctaaaggctgcagcccccaggccctgctgtccccagggtccctctcttgcagcacgcccccggccccaggggttgtcgggacagacctgcctccctctcctagtactgcatgagctcactgaggctgagaacttttacagaaatgcacagcagatgcacaagaaatgatttttgaatagaaataagaaaatagccagggctccagtcctttcttccttctgagctccttaggatgagaccacagtggggactgcagctctcaggtcacctttgagtcccctcacaggtgacgcatcttggttttctgagggctctccagtcccagtgggaagaatgggtgggatgcgagtgctttttacattctgtgcctccttttctctctccttctgggaggcccatttgcttgttgtccctggggacagagccaatgtcaaggctcagcatcctttggtaaactggagcctgttgggaagggatgggctggaaggtgttagagacccactgccctgcttggtctctccactcaggagcctgtggtttccaactggagggtcactggctcagaataaaactgtaccacccacttggatcttgcggactaaaaggctttaattttccctctagtggagatctccactttagattaaacagccaacagctattttgggaggccttgccctgggctggaccataagaactctcagatgtccagtccctgaccctgagaggcttataatcaagtcaggactgggctagatcacattgcagagagagctcagggctagagatcaaaaaacctaggttcttgccttaattttgccttatctgaccttaaggacaacctgcgtgctggggtgagagctgagactgagggaaggcaatatcaccaagggaggcctcactcagaagacggactccagctcaaccttagctcaggccttccttctctctggcacagactcaggacctggccccatctccctggcagtttcctgggcagtgtcccacccgaggcctgccagtgcgtgatgcttcccataggtttgatcctgtccctgtcctgctcacaatgcctcagggtgcatggggggaaactcagttggcttcatctgccctcaagatgcccacagtgccccacccaacttcagagcctcacctgggaagactcaagcacccagcagactcaccaaaggcttttatcccaatgaccaggaaaggaagacgggcaccccttttgctgagggactcccatgggtgttattaaacttgggcattacaaaacctcttccaggtagggacctttggccccacttctcagctgggaagacagagattcaaggagataaaagaactgctgagtatctcacctttactctgcaatgcagatgggattgaaaacctggtgggcccagggtcagccagggtctgtctgactcttggcctggctggggccgcctctctaagcacatagcctgtgcgtcagcacacgcagggccccactcttgtaagctgctgcttctgaaatcgattcatgctaccctcaaaggcagagcaaatatataacttagggagatttctcggcttcctcatctggacattttggactggatctttttttcttatgtggctcccttttccactgtaggatgttcagcagcatcctgacccccacacactagatgccagtacaatcctttctcttcccagttgtgacaaccaggaatgtctccaagcattgccaaagggttctctaggggaggtagagatggggtggcaaaatctcgcctgctgagagcccctgggctgagctgagggtaccacatgcttgagctatctttgcgggctctgacgtcttctaaaatgcacaatgattttatgttccattccacagtatattgtatttaactccactgtatattgcatttacgttactataaaatgttttgcttccatgtctttaagtgaaattgatgtcctgggaagatgtttatttcacaggttttttgatgcctaaaatacatcagcatggacgccagttttcgagcccaccacctaccagagggaactgtgtacctaccataccctggctttcccatcaatgtggcagtggaggcacttggagagcattgctggggaatgggaagaaggtgttcttgtaggcctggcaggggtgggttgggggcccagggggccccttgctgggagaagccctttccaggcaccatggcccatagagccatgtttaaccagactccccccatgttctcttttcaccagggactactttatcatctgccctataatcgacatggccagtgcctgggcaaagagggcccgaggaaacgtcttcatgtaccatgctcctgaaaactacggccatggcaggtaagacgctgcagggaagcagagaaaggaaggtaaaaccgaatgataagtcccagttcgatgacatgggacacaccacttaacccctctaagcctcagtttcctcatctgagaaatagaaataattgtagtagccacttcatctcactgtcttgcaggcggggaaagttaaaaaaaaaaatggtgtgaaaggctttgcaaatgatgatgacacactttagaactgcaatgttagttattaattgattaatttgacttgagagaggaggctttttcatttactctctatattgattcctccagagactgagcactagcttaagacattgactttccaaagtataaaaaggcttttcttttcagccaaatgaaagttgtattcatgcttgatttatatatcattcttacttccagaataggttccagctcccttagaataaagtatcaggtgcaatgaagtcatcaaaatgagaaagagaaataaggtgcaagtgaaaggaaaccaaccataaaggaagggccaagcaatgagcatagaatttagccttgagtttcccagaagctggggaaaatattttaaaaagaagaagaaaagaaagatttgggtttcatagctctaatagctgaacaaaggaagcagagagactgagtgacagggacgcacgtgatctcagcttcagagtgaaagaacaatgcaaagagggtatctggggacttggatgaccggcgctttgaatggaggactatggggctatctgttctactgccccatgagcttacagttctgagccattcatccatgtgggaaaaccccagaacccttcccactgaggcagtgacttcgtgcattaaaccacatcagatcatagtgaggtgcctttggcaagacaatctactcctctagagggaagacagtagtggtgtccttgtgctcagcctccaataagcattcacaggtaacagatcatcagggaacacatgtctccaaaagatgcaagagcattattgttttacttcatataagaataggagcaaggcctgccatctggggtcaagaacattcatcactcacatccatggtctattttatgggcaacagggagctgggtgaaaggactgcagctttagaggtgggggtccagccacaccatatacccgctgtgccatcataggtagttttctttgtctctctgatcttcaatatccttacctacaaaataagactaaagtttttcctcttagggttggcattgacagtacctggaccataagttgtccaacccataacagggctttaccctgtgttacttagcaaggcaagggaactcttataaacatgcatcatttatctttacaattagcaacgcccctaaagtaggctgaataatggccacctcaagatagactccttcccatgtcctcctttcaccagggactactttattacctgccctataattgacatggccagtgatttggccaccttcctgccattccccaataatgctctccaggtgacctcactgccactacgggaaagaaagggcattctcatttctcctaagcactcattagttacctgattcccccaaacagattcttccttttttttttttttttttttttttgacggggtctccctctgttgcccaggctgcagtccagtggtgcaatctcggctcactgcaacctccacctcccggattcaagcaattctcccgcctcagcctccccagtagctggaattacaggcatgcgccatgattcccagctaattttcgtatttttagtagagatggggtttcaccatgttggccaggctggtctcgaattcttgacctcaagtgatcgatctgcctcggcttctcagagtgctgggattacaggcgtgagccactgtacctggccctgactcttgcatttttatagcactccacaaaaaaagttcagagcccaattttgcagggttgaaatggccacctctgttttacagaggaagtgtgtctcacagtctattcgagctgccgtagtaaaataccttagctgaatagtggcccccgaaagatatcaggacccaatccctggaacctggaacattaccttataaggaaacagaacctgggcagttgtgatttagttaaggatcttggcgtggggagataatcctggattatcccgtgagggccctgaatgcaatcttaagtatccttatagatgagagccagagggagaagtgctgtctacagaagagagaaggcaatgtgatcacagagactggagtgatgtggccacaaggaaggaatgccagtagcagccagaaactgggagagcacggggagggagtgtggccctgctgtcaccttggttttggctcaaactggttttgggcttctggtcttcagaactatgagagaaaaaagtttcaatggttttaaaccagtaagtttatggtgatttgctacagcagctgcaggaaactcatgcagtccccaaagtgctctcatttccccggagcacccattattcatccgctttctccaaacagactcttctgtttttatagcacgccacaaaaaaatgtccagaatccttgtgagctctgcagggttgaaatggttacctctgttttacagatatgaagtgtgtctcagtctattcagcctgccatagtaaatatatcttagcctggataatttataaacaacgtaaacttattgctcacagttctggaggctggaagtccaagatcaaggcatgggaagatttggtgtctagtagggagctcgctgactgcttcacaggtggcaccttctttctgcattctctcatggcaaaggggacaaacattttccctaaggcctcttttatgagagcactaactccattcataaggctccaccctcatgacctagttactccccaaaggccctgtctcttaatacaaacacactggggattccatttccgcctatgaattctggagggacgtaaatattcagagcatagcagagtctgaggttcaaggagttcaacatgattccctcgaggacaagcagctggttagttagcagtaacccacccgcggcttctctgagcctcagaactctttccactctaacacgcggtctctctgcatagaactataatttcagcctgaactacagattcaagcaactgcctccaggttgtaagaagaaaaataagtggcaggccaggattctgggaaggaggcattgagggagagaaggaatgatgacaagagccatgtggtttgggtggagatgaaggtgccctcctaatccagtggtctatggccacccatggcaagggaggcccagcatgggaaatgttcctagaatcagccttggcagtgtcctcctcgccaaggctctcaggaatccaccctcaatccactgactcttttgtctggttttctgccttcctcacatgtaaggtagagattacaatgaaaggtgtaactctctcacagcaagttcattaaaagccttacaaatatgcacataccgttggaccccagaatttacagtggcaaaataaaaaagaaatgagtcttctacatgagggtgaaaacaatcaaagcaaaacaaaatgaaagcattcatatcattgctgtgagaatcaatagtgcttgggccctacctggatcactttcataggctgctgtaacaaagtgccaccaaaactgggcagcttagagcaatagaaatgtattgtctcaagttctggaagccacaaggatgaattcaaattgtcaacaggagcatgctccccctgtaggtgctagggaaggatgcgttccggcctctctcttagcccctggtggcctaaggcgattcttggctcatagatatctgtgttcttcgtccggtatttctttacgtcgtctttcttcgtgcacgtcagtctctggatccaaggtccccatcacccatattggttagggcccacactaatgacctcagttttacttgatgacctctataaagattctatctctaaataaggtcccattctggggtactaggggtaaggaccccaacatatctttttgagggagacacagttcaacccataacactgcctttctctaaaataactgagcctgtcaagcaggctcttgaatggcaatggcccaaagtggtctattttggaccttggattggggtggtcctcagaggagcaatcctaacagagtggaatcacaacctcagactcccatggccagtgtgggtttctctgttgctgagtagtgtcctcatgtccctagagacagggttccactgcggcaacccagggaacctcccatgaaaccaagccatgttcatgcagaggccctcataactacctcccgtggctccgtggctctctgcacctcagagcccagtgaccctcctggcacagatgaagacttagtaggtgctcaggaaatcataccgaaggatagatggtcaggaatgagtcctttctactttagtttttaggctctatggggctcagttttgccacccgtgaagtgggagtagggaggccggagaggtctgaagcaccgattcttcactgggttctaggcagcgtggatcctgagcctctttgaggagggggcaggtctgagcctcccagcccctttctccctatgtcacagactgagctttgagtaacatttccaggttattcagtttagaaagtatgaaaaactactggacccagtcacctaaagaaatcgtttagttctcagttctatcatttttagaggaaagagacacgcagatccacggaaacattttatagtagcggtattgctattcttatggaggcaaaataatgccctggtcaaaagcagagatgctggcatctactagtttggtgaaaaacatatccttgagtcttatcagctcagtgacctaaggcaagtcatgtaacctctttggtgactcaatttcttcatctggcaaatgggtataataataggacccatctcaaaggttgtgacgatcattaattttgcataaaacagagacaggcaaatagtgctaagagtattctgttcttcttggccatcagaatgcattcttgacaaccccctgtgaagacgtctcctctctccatcaccatcacatatggtgccatctatgtagcagataattgaatcaatgaatgactcacagaaactaactcatttgatttttggcaagtttatcttattgtcccaaaaagacatctctctttctctctctctctctctgccccggagctgtcacatctctcattttatttctggctcaaatctacatacttaaaatatatgtgtgttacattttcagccatctgtctcgtacctccatttctgttagcatatattagctttcctggcaacaactagtgaaaaaaaatacaacgaattattgctttcttatagactattgtaaactgatcacagaatagtgtggttttcttactgtgcacctggattatagatgagattttcattcctgaaattgagggcaaacttctatggggaaagaataggcataacagatggagaggagagagggaaatcaaaatctctagtgtgagaagaaggttctagtttcagattcagattcaaagaatcatagaatatagaagatgagaccgtctagctccttcattttacatgtaaagaaacaaaagcccagggatgtgagcagattacttccccgtccctgagccagtgagtagcagtctggagccatgccctgttccctgccctctctccagctttctttcaattgctccaacgttatcctaaaccctattgagtgcctacaatggccaagtccacttactatctgtgtggccttgggcaagtcacttaacctctcttagcctccatgtagcctcacctacatctgcagagagtaacaggtcctgttccatagggctgtgggagggtttgggggacactgcctgcatggtgtttagctcagagccggcatctgggttgtgtgaatgtctctgcgtgtgagtgtatgcatgtatgtgtatctgtatgtacaatacctggcagctttgatttccaaggctactgatgagagaaaaaaactcaccagctttctcctgttcatctctgcccactgaagaaactttgagccagtttctcccacggtctgtctctggagccctctgttttaggaagtgggatttccagcgcggcctgtaatccagggcttctcaacttgggcactgttgacatttgagaccggataaccctttgttgtgggaggctgtgctgtgcattgaaggatgtttagaagcacccctgccttctacccacctgatgccagcagccccagtccccctaagctgtgccaaccacaaatgcctccagacattgtcacgtgttccctggggacacaatccttgctggttgagaaccactgctggaatctattagaactgaagttattactaacagtacctgaaaggaagtagcaacccctctcccagacactgcccctgaatcaaggtaggatgtcccctgccaagatgctgtccctggccccttggaaccccctcaagcagatggagtgtgccagagaaacagaggggtggtttcagtgcttctttgtgacaaagctgatctggaaggccaacaggccttcaggttcacatgcagaggggctctggcctgctgtctctcccgggtctgaggccctgggcattctgtctaatgcctcctgtgttctctctaatgcctcctgtcacttgcccaggtacctttcaaggcaccacctgcttattctgctgggatccttccctccctgcccgtctctggtatttccatctctttgactcaccggtgatgtcctcctctctaaacagcccctttcaaaggacacactggcctttaaaggtccaggtatcattcccaggaagagccccatctgtgtcctctgctgctcatgaacaaaggactcagaccctgtggccaggtttggggaccgcacccccagccctggtctgtgctctgggccccagcaagtgtagaagagagcaccggtttgttctctgctgtttcctgtctttcaagggctctgccactttctatgtgcctctttaagagttggttttctcatctgtgcagtggagctagtaatagcacttatgcttactatgaagtgtgtcaggattaaagaagacaaggcacacagacagcctcgcctgtgggcctaactgcctggcagagagtgaacactgattaggtgagcattactaatgctgcttcgtgtattatgctggaagaatccaaattggagatcaacaggtccttagaagaaagcaaacacaagtgaagtggtttctggtaccagacattgcatgaggagctgtagccacttcagagaggacatggaagcctctcatcttaaaatgcctgggggctgggccagctgtggagttcatggtttccatggaaattcatcatgagactgagtgtgtgctatggcacttgaattgtgtgctgcatctgggtctttcttctgaaggccttggcctccagggtgctgggatgtcattcctacatcccgatggtgtggaagatgtttcaacaagaccacatttaacttttctttgaatggaagagtgggggctggggtatggctcttgggattaaacatctactcacgccccatagaggatgttagactggtctttcattttggcagagacagcccaatctagtgaaacagcacatcctttgagactaaatcaactagagttttaatcccatatctaccatttattagctgtttgcatttaaacaaaaccctttacctcaatttcctcacctttaaaataggtatagctatatctacttcgtagtatgaatattcaagatcatgtccattaaacatctggctcattgcagatgttcaatgttaggtagctagggttattttccttttaggaaaactgaggctctgagagagaaaaacaaaacattcaaaatgactaaagaggcaataatgttcctccttgataagttgtcccaaccctggaaaacaaagctgtaaattctagactcaaggcattttgtacaccactacacttgcgttctagacactactgtgcattccagaggcttttaacattccagattcaaaatattatctttttagttgactgtcttggtgagtttgttggaattaacaaaccaaagaaaatacgaagtggatagattattgaactgaatccatcagcctggctacatcctgtgggattatttcccagtgtagatgaaaataaatcattttctgaaactgatcactccaactccttgacataatagggtttgcactatatatcttcttcaacattgatttgacagagatttacctaacgccgtctatgctgcagatccccttccaggtcctagaaatgagaaacctgcaaggcagagaagagctgccttcttgggacaaagactatagttgcaggtggggctgatgggtatctaggaatagtgtgtaaagaatagacaatacacacatcaatatgcagcatatgttcggataacagtactaggaaggaggtccactagggtgccatggtcagtaataagaaaagaaccttgtgtaaaggtgacatttgagctgagaaccaagaaataagaagatgtgtgatcctcatgtagaagtgggaaatcccaaaagaaagatcatcaaaggccaaggccctaagtgggaaagggcttggcatatttgaggataaagaaggccagggaactggagcattactaatgctgcttcgtgtattaagctggaagaatccaatttggagatcagcaggtctttggaagaaagcaaccacaactgaaatggtttctggtaccagacattgcatgaggagctgtagccacttcagagaggacgtggaagcctctcatcttaagatgcctgggggatgggccagctgtggagttcatagtttccatggaaattcatcatgaggctgagtgcgcgctaggacacttgaattgtggcacttgaattggagcctgttgaagaggaggggagtggttgaaggtgcagagggaaaaaaatgagtcttgtagttcacataggagtttgtaagctgtggctagcagagagatagtattttatttgagtgtgatgagaaggcattgcagattttatagaaaatatatataatgcacaatggtcttttcattcatatccaggacggctcactgaaacatcagttatctttttaaaaaataataaaatgtagaatatcaacactgttatcaaatgcgatggtcagttagtcagaaaagtcaattaagaagagaacttgtgaaaaatgagtaagataggtgtgatgccttaaatattttattttaactttaaacacataaatctgcatcacctggccattcttttggtgcaggatcagagggttaagctggaaaatgctgtttggagttctgcctttgaacttcttgcaaaaccataaacatagtgcatgatctattatttccagtctgggatccatgaaaatggagtatctgcatggtattcaataaattcaattagatgtaaaatcacaatgacaaatacaatgacttaaacagttgggccttggtaagcacacaacacagttattgaggatgcatgtttagggcctgcaaagttcatttttttctggacagccgttatcatactttatggagggaataaaatgttcaggttaatctagcaagatagttgaaagttttgagtctactgtgaaacaatatatcatacagctctgctgagctttaggaagttaggggactacagcaaatatctcctctggggccgggggtgggactgcactatttagcgtacatcagggagcttatttttaaaggattgcatagcaaattctcttgtaaaacacaagccatttggaaagcaaataattacttcctgattaattcacatgcagaatctgaacttttgcatattagatttgcccaaagagaggcacgcttataagcttctagtcataagttatttaatacttcctcagcttctaaaaaaaaaaacaaaaaaacaaaacaaaacaaaagcctgggaagcaaagggactttcattcctccccgttccctaatttcctttggaggaagctatggagaaagatgctggctggggataaaaaaaagggagtatattttatggggatgaggtcaacagacttcctgcagacagacggaagagcagggactgaaatccctgcaagcacaggctctcaaatcagtccattcagatgggccggaatgcccatctgtgctgtgccatctccagcacagtcctcttcacaccattatcagcagaatggcttccccatgcaaaacagtgtcttatttctgtcaagaaagatccttcctcacaccctcacctcatcataaggggaacccaggctcaacccacctccccagctccatccactgccaggtgcatctctttgaatggatgtacctccatcatcctgtttgctgataagcccaaacttttgtggattatgactcctgatcctggaagctgagaacttgtgcaatggatcatctctgaaatgaggcttttggctcgctggggtgcaggcttagcctccctgcaggtcctcagcagcaccagcaggattaatgatgagcagtgtggcagagaggtaagcttggagacattatgtgaaaaggttctgtctttcctggacagttgcagcgaccctaggatttctcagttctagtctttcttcccacacacctctagtaatccttccaaaagaaatgcaacttacaactcatttgctaagaaacctccagagttcccagcccttttaaaacatgaccgtcaattcttctggtctaggccgtcacacctttcgaagaattagattccagtagaccttagtaagcatgcagtttagtggtttttcagactttggatttttctggactagaaaaagttccaattgcacttcttagcaggacctgtgaggccagcgccttggggactgttttctgccagctgcaccagcccccacctgccctggctctccttgtgctcagccataccccttgtcattccttgctccatacagagcacaaagcccactccgtgatggcccaagtgctgagtcgctacccacatgcccttcctcgcctcatccactcactaaccctactcatctgtccaagcacaagtccaccgcggcctcctctctctcggtttccataaactcctttccattttcttgcctggaataaatggtatttcatttctctctcttcttatggtagttggtaagtaattctatcacttgatagatacctacctatctatcgtacaactcacaacattttatttttgaaaagcagtggttgatcgcactttcttgttagaacgtgagctcctcagcagaacggccaccttttgagcctcagcatccatccagaggacagtgcacagcaggcattcggcaactgtgggcggagcagggtcttagtcccaacaccccttttctaatttgccaccgtcctcactggacggcattcaaatcctgaaactgaaacaaaaggcgtgcacacacacacacacacacacacacacacacacacacacacacacagtcatccgcagagctctgtggctggtcagttctttctacagtctggttaaatgtaagtttatcaacttcagcaaccttaactcttccttgagtggcaacttacagtttttaaaggaatttacacccactcgatctatgagcatccgatataccatatgggaggctgaacggagatgatcagacccattttactgacaggaaaaccaaggcttagagattcagcagtggaagtgggacttgcacagagcttgcccatcttgggcaggtagctttcccaagcccaaagtctgcctttccatgtgacaaggagaagattcagatctggccctgggcgtaggatgagcagctgtcagatgaggggcaagttccactgcaatgtgattaccaaaaacagcagatgacaagtaaaagctaaatgcctccaggctgaccatatactgacacagctgccacgggtctggacctatgatttatcagtgatcagacacagcgcagggcaatgaagccacatgagcacacgtgaactgcctaccccaagtctgcgagcaccagggccactcagttgagtcttttcttttaccttgtcagaccccggcatgttcttctgggtcttcctctgctgctgctgctgaatccaaatccccttttcttcctccagagggtcctggaactcccagccagtgcccagattcaccgaggacttggtcctcgactcccagattccctcttcagaggctccactctttgtgcctcctccagatgtcccttaaactgctcaaaataactcctgcatcctgatagagatcagctctgctaaggaaaaaacaaagcagaaatcctcatacacaacaggctctcaaattaaacagatgggatgggctggaatgccaggactttcccccaaagcagtgctctgtggcctttctaaggtcgcagacagtggtggcctggagctgcctcatacaagttcacgagagctggtggtacacattgcttcccagcaccatgctcagtgatatcactttgaaattggctaaggtgggagtatttacactgtaaaaattggcaagtattacaaataggatttcctttcccccagagagtcaattattaaacttttttctttttttgagacagagtatcactttgtcacccaggttggagtgcagtggtacaatcgtggctcactgcagcctcgaacctcctgggctcaagtgatcctcctgcctcacccctccaagtagctgggactataggcacacggcaccacacccagctaatttttgtattttttgtagagatgggattttgtcatgttgcccaggctggttttgaactcctgagctcaagcaatccacctgccttggcctcccaaagtcctgggattatagccatgagccatcacgcccagctgattatttatcaggtcatgaccttcttgagaatgtgatggaggatatgaaacatctctcaagagagatccacctatacacttaacagcattttatgtgtaattttagggaacttgtggctctccaaaaccctgcaatgggacctccccaacctcccacaagttaaggactcccactcttaagctttcagatgtctctctcagttaatcaaaaaggaaataagtatatgagccagaaactgggtcagagagattaaaaatattttattgctaaacctcgttcagcatctgaaataagcataattgtgtcaccattttacagaggaggacactcagacccagagacattagacagcttgtccaagattgcacactagtcagtgactgagctggggtttcaacagagcactctggcctttaaagtttatttctgttcactagaatacttggaatgcagcttcctctggaggaaacagtagaccaggctattgtagtaacagttatacccccgcaaaatgtccaagtcctaaaccctgaaacctgtgactgtgttaccttccatggcaaaagaactttgcaggtgtgactaaggttcaagaccttgagatgggagcttatcctggtaagctcaatttaatcacatgagtgctctaagcaggggagtgttccaaagaaatgcagcatcagaaggacttggccactgaggatggaggaaggcagttctgatcggcagcctctagtgactgggaatggccctcagtttgtagccagcaggaaaacgggggcctgggtcctctacctcaaggaacggaatcctttcacaactttgaatggtcaagagaagtattctccccagggctttcagaaggaacgcagaccactcaccctttgatttcagtccactaagatcgatcctggatttctgaactccagacattgtcagatagtaatttgtgttgttttaagccactgagtttgtggtaatttcttagggcagcaatagagaattaatacagccagttttccagaagcgcctcccgagaaacaggctgttgaacctttcatcccactgtgaggagaaggactaatccccagtggggagaaagtcggccagacatcactggaggaagaaagaggaggggggcccctattaaccctgggcctcctggcttctctgtcgccaccgcagagggagtgtggtgattgagaaacaagacagcttcaacaagaccggcagtggggtatgactcaccttccagaagccaaaggcaaagtccagacctctctttgggcaaagcccgattttttactatgcagtggtgaaatccatcctggcttttccactctaccactctccctggttcccagtgctcactccatggcccatgtaccaggctcctcagcaccagctccagcccaggccattcacaccactggactggcttccaagtcattattcccaccaggatgctgcttcctagatatttaatccagtctagcatgtatttattgaataactcctatttgccaggtactgtgctgcggtgggcttcatggataaatgtcttccttgaaaagtcataagagtgtgagttgtatatgaacacaggctagtgcggagaatgggctcaaatacaagctactttcattattgctttttcagtgactagaagaacaccaatatccagtgataccataagtatcgtggttagaatatgacccaaaaatcattgtgttgggaggtttctcgcaggcattatttccagagacttcagtgttccgtgttggtctcactttagcaacagacatgccatggatctccccgcaaggggccactgcactaaatttaggccaagccaaatctccattcaactgggccctaaacaggatacttggatatgatataaagaagggaaagtcttggttttggaagaaatatttttgtttgtgtgtttgtgtttttgagtagtttactttctcttgaccttttgctgctgcttttcctctgttttctcagcctggagctgctggcggatgttcagtttgccttggggcttcccttctacccagcctacgaggggcagttttctctggaggagaagagcctgtcgctgaaaatcatgcagtacttttcccacttcatcagatcagggtaattttggaccacttgttcagaattctgtcactgtgcttttcctcccgcttccttcaagcagaacgcaaaggcccaatttgcatcgatagactcatcctttcctccgtagacactataatcaccagccactggcctccctgtctcagtcaccccctcctagccaaaactgcttttgcatacattaatcttcatgaagaaaagctctaattataccagctgcatttgatgactctagatcggggtttctcaaccttagtgccattgacatcgggggctggataaatcttggctgtgtcctgtgcattgtaggatgtttaacagcatccttggcctctagatgtccaccagatgccagtggtgcccacctcggcccagttttgagaaccaagcatgtcgaatgtcccctggagggaaaaccacttggaggagagccactgtctctccacagaggggaataccagtgccttgggttttcagcttaagttgaaatgctcagggccctcctttattcaccttgaggctcttcctctccttgcctgcctgtactccagtccaatgaagtatactcgctgtccccacctgcagaattggttcctgctctttcctcttcatggtagtttacctgtttccttttatctttttgcctgatgtgagttgattacctagaactgtgctaggttccctggaaagataaaaaggtgcaaaagtcatgacccagctaccagctactaatagtctgaaaacacaaaaatgaaccataattcaaagcaggagaaaataaagctttatgcagtttgttatgggagttgagcagaaaaacacatttcttgtaattagggttttagaaaatatttcactgaggaagtcacagttaagctgggccttgggggataaatagaatatttatataagcaaagaagaagaagacacttccaggaaaggaggtctgggcaaatgcagcagggatgagaggacacaccttatctgggaaacgtcaggtggctgcagggctggtgtttgggctacatggcagggcatgccggaagacgggcctgggcagcaagtttgggaaggagcctttatcccaacaggtctgacatcccctttatggggcagctggcctacagattcaccctcctgcccgggccttggacaagcaaggacattccaaaggctagctatggtgtctagatctgaggacatcaagaaagagaagagcacagtgatctcctgaccattcacaaagacagaagggcagcgctaggtcctgggtaatgctaccaggtcatgaccttaacacctttcctcacccagaaatggcctagctttgcagtgctagctttgcagtgcagtcaagatcacaaccccagaagccagatttagggagttcacatgcagccttgacacctacagatacatgaattgtccctcagataccgagtgcaagtgggaagtgattcaggtgatgaaaggaaagacaaatttccctcatggatatttctttcttctcatttgcccagaaatcccaactacccttatgagttctcacggaaagtacccacatttgcaaccccctggcctgactttgtaccccgtgctggtggagagaactacaaggagttcagtgagctgctccccaatcgacagggcctgaagaaagccgactgctccttctggtccaagtacatctcgtctctgaagacatctgcaggtagcaaagccctgggacaagtggagggagctgggtgttgatctcagcatctgctgtgctcgctgcatgagacctgtgctgcgcgcgcattggagccaaggggtcaccagtgccaatggcacagccccttcctgtgagttgttcatggtctggggagctccatgttgccaagggcctcctgttctgatgtagggctggaaggaaaagaaagagaggcacaggaagagggcagtggggtgactaggagagaaggtctatggggggtagaatgctgaaccaacatcagggcttccagcctagaacgttggtatgggaagagaagggagtgtcttgaacctcatcctcacagtccttgaagtcctagatagaaaatcttggagaggtaactctagccaggggaaaagtgggcatttctacctcttcctgttgcagaggtgttaaggagagaaaagaaattataatgaaggcactgggaatagagagtaaacacaatgcccttaggaagctttggaataacgggtgtgagtgacacaacccaggggatggccctcagctttcctggagccatgatggaagcctgtgtctgagtgagcaggagcccagaggaaggaggactcactcctccctggaggctctaggaagggtccccaggagaggtgatgctgggctgtggtttttagaatgacaggagtttttcagatacagagaaatgggagtagtccgttaaacagggaagggatcttgtccagctatagtttagattttcaactctgcttttagcttccaaggctgagtgtctgtctgctgacaacaaatccaagtaccattgtacccttagcatgtccctatagccaggagacccatctggcacctcagccagtggaaaattccctctaaagggcattagcaagaaatgtccactggaggctggggtctctttgggacaaaaggaagggaccagagaagagaagtcctaatctggcttggaccaaccttccttgcccctctgtttcagatggagccaagggcgggcagtcagcagagagtgaagaggaggagttgacggctggatctgggctaagagaagatctcctaagcctccaggaaccaggctctaagacctacagcaagtgaccagcccttgagctccccaaaaacctcacccgaggctgcccactatggtcatctttttctctaaaatagccacttaccttcaataaagtatctacatgcggtgaagcattgttgactctaatgtgtgaatccaaggcaattcgttggtaacaccaactatatcttaataatctttctaaggtttgaatcccaggctgctgtttccattcaacaaatgtttatgagcatctgttatgcaccaggccctgtgctgggtgctggagaaacaaggactttgctcctccagaaggagagaatgctgggcaaacagtgacacaaaaaatggggatccatcaagagcaggccccaggtggcatagtcccacctgagtggtagaaaagactcactcacaaaggttccagagtggaggtagaagaccaactggaatgggtgcaatggtccagtgagaagcaatgcactctgaagcaagacaatgaggatggagctggggcaagaaacagagccacaggccctggaggaagtagaactgatggaacttgattaaatgtgagagggggttggtgcaaggtgatagaattgccccaactttgggatgatttggattcccggataagcaatgttcaccctcctaagggacacacgtttaaggcaaatattctggttaaaacgttctgtctctccaccccctttcacacacacatggacacacacttcacccaaagtaaaagcaagtggagctggttaacagtcttgttcacttagatggcatgccatcaaatgcattcatacccatcatgttatttgagttcagagtaaattagtgatgatttgtaggctgagatttttgtcctatcttgcaaatgtggaaggtgaggctcagaaagacttacactatacctgaattcacatggtgaagaggaggagaatcagagtccaactcaggttttcccatttctctgtttccatgcactgtatggactataaaatataggcctagggtcacgttgtgtgtcctacaaaacctactgatagcactgaaagccctgactagcctccaacctgcattataggctctgttaggatggttcagcgaaagcacttaaatactgaactaaaaggccttaaccaaaggaaactcgataggtagatggtcccagggttggtcagtgtctcagtgatgtcattaaggacccagactctttccaaccatcctctttgccatcttcagcgcatgaatggtgtttcaattcactgacatattatggctgccacagctccagacatcacacataatccccaacagcatctcatgctggaggcaaatggggaaggagctaaagggctttcccctccagtgcttctttctttttttggaggaaaagttttttcccagaggttctcagcagaattccccttacatctttttggctagaactaagtcatgtgctcctttttttttttttttttttttttttgatggagtttcactcttgtcgcccaggctggagtgcaatggcacaatcttgactcaccacaacctctgcctcccgggttcaaggattctccggcttcaaggaatcccaagtagctgggattacaagcatg

SEQ ID NO: 616 - DNA, 26650 bp, Homo sapiens
  source 1..26650: mol_type = genomic DNA
tgatgtgtagaataggggggctgacttcagacccctgtccgtatttgtgtctgctgcctaacctacaagtagagctctgaagaaaaagaccatttggaattgcaccacgttctgttttctttggaataatccaggaaatgtatctagctgccttggttcattaggatgaaccacaggccaatgttttagcaatgtgctgtgaagttggataaaagggggtttcatctggggccaaaaaaattatttcccttttctatattgaagcctcaagtaaggacgagtgatgtcgggtgtaatgcaccacttctcaaaatgtgttaatagttttgaggcaacctggaccctactgcagtcctaaaggtacctctagagctgcagcctgaaactgtacattttaaataaacccttgggggttatcatgcccagtgaatttgagaatggccctcaggtgaatagactgatgctgggacagcagcagcccgtggctgatgtgctgagcttactgcatcccctctctgtgcccccgggctccctggagcaagatggagtataatcccgccagccaggattttaggacagggacatagccctccgaacgatggtggaagtcagtgggtgccacatgggatgaagactgagagggaaacccttagaattggctgggcgtggacaaagcggggaaaaaagtactgaccaaactcacttcagtcttggagaactcaaggaacaagggacacacatacgtacacacacacacaggcatgaacacatcagacacatccttcagcctgcatactttagcttcagatagacttttcttttactagaggcaaagtgatctcactagaagaatgtgtttctcaggagctgctagatggcctgtcgctctgtgcccgctcactgtggacggctgccccacgtggatgtccataccacagtgggatccacggcctcactcaaaagagagctatggttcccagatccctgacaagagggccacaatctgaaaaggggttcctggttagctcttttaggcttagcctgagaacagaattagcctcatatttttaggccatttgccatacacattttctctcattctcaactgatacgggtggggggagattttcgaaaacagtgatgttggtaatttatagttagtaaataaaccatgtttccatatgcaaggattcacaccaggggatcctgcccacaggtatctggaggtcaaattcgtatgtgctttctgccaatctgagccactgcctctgtgtctctgagaataatatactctgcaagaaggaaagacgcacaagcaatagtgcagtcttcttagcaggcggaagtcagcacggtgtgccccctgtgtaaggggagttgcgctaagcaatgtgtttggtgattgacagattctctgccccagattctggttacctctgattagtagatgcggacatggaattaagggtaattgaaggatatttatcgagtcagacatacaccttagaataaggcttttactgttctagaaacaatattccagaagatgaaatcatccaggatgccccaaaaatatttatttatacaaagattttgagagtaatattcatacttgtctttatacctcagtctatgcgtctggggccaagtcactgtgtggcacatgtgcagcttccccgaatgcctcacatgttgtagcacctgcttccaggaacaccaaatgaacacagggtcttggaggggaagtgggggaagaacccataatgccccaaggctgcatggaaccacaatccagaaatgtgcatcctgacctggaaggcgtctaaccaagtgtccaaggggaaatatgatcgagggagaggtgagaggagggacccagagggcagacaggagagggttgatttccaccctttcttctgcgttcagcatatccaaaaggcccaatacagttgatgggccaggaactgcatgacctggattttctccctgtagtgacccacgatgttaattgatgtagaggacagtttgcaaaagtaatagatttgcccttaatcccagacagtatgagatacaattctgggactttgtcttcgtaacctgtctttaaaaaaaaaaaaaaaatgcttgccttgtataacataatccagattccctagagcagatgtggtacagcaatgagcaaatccaacctcagatctgaagtgtcttccagtctggccctgacccagccattctctgcccttccttctccctttagggtagcccaaatcccattgccacacaacatctcaacttaccatccctttcctctatccccatcccctctgtctgcgtcacagaaagtctgtgtgttctgaagagttcagccttcctctaaccaaacccacactttctttaccaccgtgattctcagagccagcaagaaagaaatgttccaaaaggaaacctccatctcagccatttgcccggagccgaaggttgtgggctccaggcctctcagtgaggtttgttgcttgtgtgtttcccgaggagcgggcagtcaggcagtggtggttctctctcccctctctctgtcgcacgtggggtctcagctacatttacaagacttcaccaccatgttggagagctgctccactttgggggtcctcccaacatagtacaggatggtcaggggctccaggtcctggggcacgcagcaaggcgaggcagatgcttcagggttcagagtgttgtacagtcccagcacctgggaagggacatgtcagtgagaggttggaaggccaagtctcaggcctggaacccaggaagtcgcccagttccaggggcagtcccagaagctgagcaagtgctagaatggccacgggtgctctttaagaggaactgttgggggccgggtgcagtggctcacagctgtagtcccaggacttgggaggcagaggcaggcagatcacttcaggtcaggagtttgagaccagcctggccagcatggtgaaaccccatctctactaaaaatacaaaaaaattagctggctgtggtggcaggcgcctgtaatcccagctacttgggaggctgaggtgggaggatcacctgaatccaggaagcagaggttgcagtaagcagaaatagtgccaccgcactccagcctgagccacagagtgagtctgtctcaaaaaaaagaaaaaaaaaaaaactgttggaacctggtttgggtgagtgagtagttgtgtagttgctgttcatccacaatgacagaagcagaacaactgcacttgtttggggtgatgagttgaagcatatgacagttactacactgataacgaattatcttggctttttttttttttttttttttttttttttgagtcagagtctcactctttcacccaggctgaagtgcagtggtgcaatcttggctcactgcaacttccgcctcctgggttcaagcgattctcctgcctcagcctcccaagtagctgggattacaagcgcgtgccaccacacccggctaattttttacatttttggtagagacagggtttcaccatgttggccaggctggtctcgaactcctgaccttgtgatccacccgccttggcctcccagagtgctgggattacaggcgtgagccaccgtgcccggcctatcttggcttttaagaaaacacttacattgctcttcctagctggaactgatcacttcggtgagaaatgttctcacaaaacattgccttgagccatttagtaagtgcagcgtgcagggccccagacaggatgcagaaacaatgagctagaaggaaacatgcttcacaaattactgccctatttttgattcccctcaagggaaagacagactagtttcaggggttgtggactctcggctatctcactttctgttcctagcatttcaaattagcttcttgtccatccttgttgttgtctttcagagtaagttttctacattcgagaggctggaatgatcagagttctgatagaagcctttctacttcagtgttccttgccagccacatgcacatatctctgacatagggtaacacgtggcagttaattaatttctacggtacagagagctttggacaaagcaaattaaaaagctggttgaaactatggtaggaatttaaaagggcagaatgtgactgagtagaactgagtcagggtgccaagatcagaaccttcaccagaggaattttactcaccccagaccatcatttgctcactcaacattcaatccttcactcattctttttaacaagtggtctggtcggtcagccccagtgcctcagatggcatgagcctgctccataccgtgctgtgggttgtgtctgcactgcggaggtatgggcaagggcctgagcagaagttggcatagtagcccttaggttcatggacccacttccagcccagatcctgtcggaagtcaatgtagagggggcgcacacagcagttctcctccaagttgctacaacaaaaaacatttatagaaaatcaacttaaaaccaccaataaaagaaacttcatgaatgctctcatattctcccttggagtcctttcatgccatcataggtggctctgatcaatggaatcccaggttcaagggcatggggcagaagaaaccagaaaggcacattcatgtgttaaagaccaggatcccaaggatgtaagaaacagagataaatgctgcatgaggaagagtaaagaggcaaaggtggccctgcacccttttctatcacaatacaaagcagtgctatgaagcgctccacataaaaccaagcactgaatgttattagccaactcagctttgttgaggttggttttatttttaccctcctaatgtgcacccagacagaaatcaattctaagtttatgcagcttgactactatagtaggtgactgctgagactcaatccaaaggccatttagccaaataaggcatatccttctattagaaccgtggttcaacagatcacccaaatgtgattatcaggccccttcaattctgttgcctacagagatcatttggcaataataccgcttgccaagtggacagctagcctctgctttaatatctgctgagacttagaacttgctacttccaaaggcagctattagccaaaatctggcttcttgtgggttccaagggtgaaccatggcagacaccattggttatctattcaataaccattcctaactcccttctcccttgtgacatcccattacagagtcgaaaacaccagatgctccttttcctgtcctcccttgagagtagcggtggtcatgtgacccagtaatgacccatcagacaaggagaagtatgcagggggtaagggcaagttctggcaaagatattcgattatttataaaagtgacagatggaagaagaaagcttctggctcttccccttccctcattccttcttgtcttaaatgtggacaaggtgcctgaagccctagcaatcacttgtgaccataaggaaaaggatgaaaagccaacatactaagcatggcagactggaaagagagaaagcctgagtcttcggtggcatcattaagcagccagcccaccctaaccctgctgctacaggcctcttgtgaacaagaaatcactatgattaaagtcactggccaagatcattcgttcctaactgattcgttcctaactgataactgattcgttcctaactgatttgttcctaactgatggaataaataaatctacatgccagcctttgtggcaactaccttgcctctcctataccttgctgttgagctgttcccccaactgaacatccctagtttcccaagcccaaccatcctcataagacatggtttccagatctaaatatttcccaattcgttctccccagcttcatttcggcatcctctgaggccagatggactcactcactcatgctccttcctttacctgcagtgcttcccctcctggatcccttcatccccaaacctcatccttgaagcctctgctcaaattccacacccttctgaagcctttcctgtgtccataggtgaactcattgctcccagttaaagcacttaatccttcggaccctctcatgggcgtgatcatcttctcccttttagtagttggcatgcatactttatcctccctttataaatgagcagtgaaactgctcctgagtaagagaagctgggtcttttctatctctctattgtggctacccagtaatttctgaattcatttgttaatttctctagctccaactttccgttcaaatggagaccattctatttgcctccatccagtagcatccttggacccttcatagggaactaactgagcacttctttaatggaaactcctacattaatctcacacatacactctacaagtgcttaaaacatggaaatcatggagaggctttgaccaagcctctccaatccaaactattttagcaacactcctcctcacagagttttcctcatttacttcagccagctccttccagagttagcctatggaaaaacagtgggactcccaggaaaacagaaagagatttcacagagaaaatctctgtgagagattttcagtcttcttcctggagatgtttgtgaatagcatcagggaccctctgttgagtgtggcttggctctggggcctgacctagccattgggcagtaggcaggcagtagatgttggttcccatgtgggcccagtctcaccggaagcagtaattggtgtccaaagcccgcttcttcctctgacccccctggcccgggttgtcgagccggtgtgggggaatcatcatgaggattagatgagggttgtggtgatccttctgcttcttgaggcgccccagatctccacggccatggtcatcctcattgtccacgcctgaagaagggaaggaaagtgacaatctcctgtctgaagagagcagagcccttggaggctgcctcctccacacgccccatcactgcccaggaggaggggcagtgcagtctgcgagggaggtgtgggggacaagtgcagcttaattctgatgtccaggtgcagaaaggggaagagcagatggagaagccagtatcaaaagaactcattattattgtaaggatgcccactgaaagatgccccgtgttcagatccccatacccttgtatagaaatcttccaaggggcagaaagcccttgctgagattcctaggaatcttcatggacctatgaagcatccctgttactaagtgggtacctaacacatatctccgggttgtcggcttgtttatttgtttgtttgtttgttttgagacagagtctcgctctgttggccaggctggagtgcagtggccccatcttggctcactgcaacctctgcctccggggttcaagagattctcctgcctcagcctcccaagtagctgggattacaggtgcatgccaccatgcccagctatttttgtatttttagtagagacagggtttcaccatgttggccaggctggtctcgaactcctgacctcaagtgatccgcccacctcggcctcccagagtgctaagattacaggtgtgagccactgcacccagccctggattgtcactttagattctagacttagaatcttggggtgtgagtttcctcttaaaatgtgaatggaccaagataacgcagaagtcctaccaaaaatttaaggtgtcacaacttaagatagcctgaatgggagccaaagaaacaagactgtataattgttaacattcacattgcacttagagtctttgaagtgttttcactataaaattcagatgagataatgaagcatatgataaatagcaaataagctctggaaagaaaatctaaattcatcaacccgtttcatctgaaaaaaaaggaaaagactggagactgacttagaaagagtctcaactaaatggagatcgattttgcgaaggacagctgccaactgttgtccatcctcactgaggacaggaacatgaggaattaatttacatagctacaggagtggctcgggtctcaggaaggggcaccagatctgtaagataaatgagagacctggatcacaaatccctttttctgaaaatctttatgaacaagataagtattcactgaaatgggaaggtttcatcctaagctggcctgtaggtaaggactccaaaggtcctctgggctctaaggttctgtggttacagtgtcaaatctttggctttaagaaaaggctgtaaaatagagcccatgtggggtaagatcactgtccagcgctgagccaaaagaggcctgcaccttttcccagacaagcctctgacctcaggcgttccgcagttacccaaaatgggaatatgaaaggaaaagagaacttccctgaactccagagatcatcaaggctgagttccttgcaaacataatggaaaaccagaaatgactctcaacgacttcgccatctctacccaaacaccccggggacaaacaccctgaggctcgaagcaatcatccaaacccagaggacccctgggcaaggtcaggtaggccctgcacatctggaaagctcagttgtctgggcactcatgttcaggacagccaaacttaatttcttttagggaggaggaagacaagtcctatctgttgagcatttctggcactgtgttccttattcattatctcatttaattgcctgacaacactgtgaaagaggaactctcatcccatttcactaggaccagaggctagatggcttgcctacacagtttcaccacttaccagtacgtgttgtcttccagaggctaatgcattctctaagctataaactgaaagttacactcattgcttttggggcaaagcagaattactcaagtacaaaatagtcggctatctctctgaaggagcttggtttcttttcttgaggtctggtaagggtctcctgcactatcctgtcccattaacttcccccccactcacccatcctaccatacacattcattttgttacctttgaatttgatttccatcacctcgtgaatgttttccaggatatctccattgggctgaaaggtgtgacatggacagtgaatgctgatttctagacctaagttggactctgcaaaataagacagaattagtgagaaaagcacctctgtgtgatggggaagtgtgcccaccacccatgcaagggtgagccagggcctctgctcctatagggactcataggaactgagttctattgagggtcacaggagacagaaagtgcctccagagctcagagtggaccttcaagcgcacgttgccacattccaggtattcctgttgtattatgaatcaccaaatgggggcatacactagtggccatcatgaaacagaagtggaataatcattccctttgaaaggatggtattaagagaaaattgtcacctacctacttggaggcaaaagtacacagatacagtaaggaaagcaaaaactcatgccatctacatggtttttgggagaggggatcgttgagccaatctactgcagaaggatcagggcaagaggcagagggactggaagagactacggacagggagtaactaaagagtctccgagcacagagactgtgattcaaaaggccacaaattcaaaaagccacaggatgtaatgctggcaaaaagattcaagtcaggaaccaatgctagaggcaaggtcacttgcaaacaggaagcagaatccgtctcagtggaagatgcaagcatttctaccagggccatgactgtgggcctagacaaagtggcagattctagaagagataagatgaagatcacggttacactgggccatatttttcctaaggaacaaggacacaacgaggtaaaaattacttggacatttcttctttgggaatccttgttcaccatgatgggaagttggaatgtggattgctcaccaagatgaacagcttgggaagacagttgtgaacttagaaaacagcacagaggagatgatagagaactatggctgagggtccagatgacttgagcacggagacagtgagcatgatgaagcctggaggtgccagggtttggtgcctgacattctggtgcgtgaagggcaactccagcccattcgcctagtagttgtgggatcacatgttttggcaaccaaaatcaaggaagcaggaactcagtaaatgaggttgagtgaagtgaaggaaaaagaaagaaaatgaaaagtctgcactgagacaagtagttttacacagaaaaccaggtaggatctggtatcatgtcaattctggtgggtaagacttaatttgggaagctctgttgatcctgggatagcagccagttgtggccaggtgtaggagaggtcatgggggatggacctctctggattcagggtcagcctctcgatgagttgattgatttgctgctccctgaggccacacaccatgtgtgtgagcatctggccttggagacaacctggagtcttcctgaaattgtgccatcagggcaaaccccaaaaagtccaacctggcccagcaaccttctcatagacagaaggatacaagcctacaagactggagattcccatcaacattaggttggcttggacatcccagtcctactggttaaaacccagctcctttcttccataaactccagagcctaaccagatctgctctaccctaagtcagggcaacctctgaggcacactgcgcctgctgagcttgaagatctctgttccagcaggttcgctcagtgagggaaggcagaccaataaaacaaggcagctgagacccagctggaggagaagtgaatggagagggaggtatgaggattgccctctccctgggttaaggcagctggaaggaggagccaaagtagctgaaatgggctacctaacaacacagtgtacctcctggtcaagctggttcaaggcaggctggaagagacctggagtgagtgagttccatgattctgtgagttagaaagtcaaggtgcagacagctgtgttggggagagtgagggtccaggatgtaagcacaagagggtggcctggcttggccaacaggctgtatccagatagaggacttagagatgatgacaacaatcactaacttattctatctctataataatcccatagagcaagaactattatcccccattgtacagataagaacactgaggcttagggagattaaacagcttgcccaagatatccaaccagtggatagtagtgccaggattcaagcactgacagcttgatgccagatcccaaactcttgttagagacaaggaggggtaaagagggggcaacagagaccaccaaggaagatgcccacacattcaccaacatgcaagatggttgtttcccagtgtcccacctttcctgagccatgatgctgagaggctccctccccagcctactaggggaggcctggccctgcctagctaggtgctgcagactatatgagcaatagcacaagggtatgagacctgggtccccagcggcccttgtggactccaacccactctgcgacccagaatgcagcctgggtacctggtgcacaagggctctcagatgtttgctgaatgaatccaagaccacatgtgtgactcagttttctcatcaatctacaccgccaactgctccaatttggagtcctttgttgcctggtttgaagccatgaactctgaagagactcatgggctctctgtaagtacaaacctgtgtgatgattcccctgtgggaaaggtgggcagtatctgcctaagtgtgaactgaaggttccaatgaagaactaacctcagaattggcagctgtgggggtggtgggtgggggacccataggttttattacgaaattatctttttgatgtctcaggaggatggaaatcattctcaatgcaaacttctcattgagttctgcagctgtgaaaataagaactccttcaagtgcccagggcttcaaagaaatccaggtggagctgatcaaaatcagacagggaagttaagagattaatttccccagcccctcctttctgtagccgtctgagtcagaattcccaacagagctgctgtcggcagatccacgtgggttctcctaggctcttgccttcatgctcagtaggagggacaggatgaaattcctgggtacccttgggactggggcaggatcttcagcccaccatctgccaactcagccactggataattccccttggatggggaattttctcatttatgtgacttgcctgggctccgtggcatcaagcaatgcaaactcgatggctaccgagcccaggcaggtcacgtaagtgagaaaatcgagccagcacatgatgctaaacaggaactgccagcctcactcttggggaacaatagggaatggtgggggctgcggggactgaggatgcataccccatctcaaggggtggccggtactcatctctgacggatggttatcaggaaatctttcgatttttcaaaaacagcaagaagtccaggttttatgtgaaatctcctgacttaaaacacccaaaactgttgatgactagtcaaatcgaaaacaatgtgcaggccaaatagtttgtaagctctgcctttgagctttaactcttagttgcctaaaacaccaaggacttagaaggatccacctgcctcagggactctgggcatcaatatgtggatggtctgtggctttatagcagctgatgacaggagaaaaccttgcccaagaggaagagaaggaacagatgggactgccatctgtgaccccaacccactgagcatcagaccaggcagtaccagccaagaaaagggaaagaaacacagaggatggtgtcatgagacaccaaagttctaatccagactggacgacctcggtcaagtcacttaacttctctcggcctgtttccttatctaaaataagaaaagcttactcttgtaaaacatggtaaaaaccatgaagttctctcaaatacatttgatccttaaaacagctctgtgaggcatacatagaggaggaaccattgcctgattttccaggtgaaggcagtgtgtgggtaagatatttgggacatgtgaagtttgatatgcctccaggatagctctacttgcatgacgacccggccttttaaacttaactgggcagaacagaacctgttcttctcctaggccccctatttcaataagtgataccacctggatgtcgaaaaaatttagaagttatctggaatgctcttgtgtcctcacatcccatacctaatcagcctgtgctactggctaccttcaaaatacagaacaaatccatctgatcgtcatatccactgctaccgccctagtctcggcctagatattgctctcatctgggctgccgccgtggctcctaactcattttcctgcctcttcccttgacctcctggaaactagagggatcttttaaagatgtcaatcaaatcacctcacccagcccctcctccctgtagctgtctgagtcagaattcccaacagagctgccgttggcagatccacgtgggttctcctaggctcttgacttcacacccagtagagggacaggaaggaattcctgggtatcttgagtatccccagctctggttatagcactcccacacttctcatcacacctggaataagtcctgaaacctcgccatgacctgatgatgttctaaattaaattggctgggcatgctggctcacatctataatcccagcacttttggaagccaaagtgggcggatcacttgaggtcaggagttcgagaccagcctggccaacatggtgaaaccccatctttactaaaaatacaaaaaaattagccaggtgtggcagcgtgcacctgtagtcccagctattcaggagactgagacgtgagaatcgcttgaacccagatggtggaggtgcagtgagcagagatcgcaccactgcactccagcttaggcaacagagcgagactcagtctcaagaaataataataataataataataataataataataataataataatagtaataataaattatatggccccagcaacctccctgaccacctcccctcctcttcccctccccagctcaccatgctccagccacaccgatctgtttgctgctgctgctagaacaaatcaagcttatttccacttgagggcctgggcctccctgttgcctttgcttagcacatcccttattctgatcttcatgggctaaatccttatcattcagatgtcaatgcatgaatttcttcatcatagagaccttccctgttggactccacccactcattgtcacattgccctctttctatttctcatagttcctatccctgtggctgcatccccagggcctgtcttacagtgagcatttaataaacattagttgagtgaatgaatggaggatactcagtggcaaagctagggtttgaacccagatctctgactcccttaattctgtcctcttccctccatttcatggaggactaagggacctgaggttcattctgaaatgcttatctgaagggtccacctacctcttctcaacagccactcacgcacagtgtcagtgacatcaaaggacagccactcggcagtgccccgtgtgggcagattcttgccaccgatatagcgctgtttggcaatgtgctcatctggccgaaggatctacagggcagagaaaggagtgagtacccgagaccaggacagagtgccccagaagatgtcacaatgcagagcacaggtgagggagcgataggaaaccagtggttcctgaatgccatggccctcgagcaccttagctaactcttaagtgttttaatgacagacacagatacggaaacgaaggctcagagaagccaggattcaaacccaggtctgccaaacgctgcacccagtggtgccctgatatggcaaaggaaccagctttcccgtcggtgtggtttctgctctgagagaggagttacctggaagagctcgatcctctgctcattccgcttagagctggggttgggcacccgcaagacccggaattctgctcggaataggttggttctatttttctccactgaggacacattgaagcggaaaaccttggaggtaattcctttagggcagacagccagttcgtctaggagataaagcagagcagagggcacagcatgagcgagacatgcaggaacagtgtgctgccaacggacaggcaccaagtggccaccgtcccgcctgccacctccctagaggcttgaggcctcagaccgcaaggtggagatacgaggaagattcttggtggccctagaatcacacacagtcctgagcaaggagcagtgtggcctcagagctccacaacatggcactagactggccagtcaaatctaattgccccctcctcccactgccttgacatctcagttctggtaagttttccaacccgtttttcctactttttgagaaaatactgattctagaaagatatcagcacctagtagtttacatatcttacagctagttgatttattcgtgtgtttgttcatctgggcattcattcatttatcaaagatgtattgagcagctactatatgccaagcatagtgctaaccttgggaagcaaaacatgagtagacacaacccctgccttcaaggggattaaaacccatttatgcctggtgttccattattggaacgctaagcatgtaagagttatttatatcctgctgctcaaggtcaaggccaaggtctgatttcaaaattcaaaaaagtgcagcctcaggcttatgggttaatatctaagggggggtattaatacatgggcccaaataacaggactagagagaaataataggacagagtgccccggaagatgtcacaatgcaggagcacaggtgaggggagcgacaggaaaccagtggttttcagagaagtccaggagttgctgcaggaaatcaaaggagggaaatggcaaggagcacttcacggaaggggtgaaaattgagaggatttgaggatggggaggaaagaaatgttacatggagtgactgctggaagcaaaggcagggaggggaggaaatgcaaatgagtaagaggggcccgaaacagcaggtgggagccaggtgagaaagggcaagatgatagattggggtccacctgtcagactaaaaggttaaattttaacccattaacagtagggagtcactgaaagtgtttgagcagtgcagtgacatctcaaccttgtgttttagacccaataaagcagggcttatatagcaaagagcccacatcatgagcctggcagaaacacagatgcttcctctgaccaagctggtgtgtcaccattggctcctttctctttccttgacagcacgtgctatgccagacgctgtcacctgctggcctcttcatccctgtccacaagatgtgggcagcgaatgctctttcccacccctctgagccagagaaagagaaagagcctgtcttttctctgctcctgtacacttgacagcctcaaggtctgagcagtattaacacccagagaaaaactttctgcacaaatggtaacaatagcccgaagttgaaattcaagctcatagacccagattccacacataatggacatggctggaatgagcttataatcaccccgaggggttgttgaggaagtcacagacaaggcaggaaggatcagaggcctggaaacaagcaaatgcgctactgatcttcaggaaaggatgagtgagtgtttctggaaattgccatctggtgggcctgacgctggttcttagaaaattaatggaacagatgttaggaaaacaaatgtgtgaatgctgtctaatgaagccctgattaataattggctttgaaagaacagatactgccaacgattccctaaaccatttcagatagaaccaaggagagaaatcagtgatagttaagtaatgtgtaagtttacaagtttgtaatactctgaatgtggataagctacttgcattggcaaccctatcaaggacaacagagctgggttttgaaggagctgttattgatatggcttcagttacaatagcacctgctgggaggatcacttgagctcgggaggtccagattgcagtgagccaggattgtgccactgcactccagcctgggcaacagagggagactctgtttcaagtaaataaataaattaataaagtaaataaataacacagctccagtgactacaagaggaataaagggtaagtcagtgcaacatgcaccttgctgtaaaaagaagggagatggggccgggcacggtggctcacgcctgtaatcccagcacttcgggaagccgaggtgggcagatcacgacatcaggagtttgagaccagcctgaccaacatggtgaaaccctgtctctactaaaaatatgaaaattagccaggcctggtggtgcgtgcctgtaatcccagctactgaggaggttgaggcaggagaatcgcttgaacccaggaggcagaggttgcaatgagctgaggtggtgccattgcactccaacctgggcaacagagtgagactccatctcagaaaaaaaagaagggagatggaaaatggcacttgctggtgagacagtcagagtgggtcaaggcagtgggaagccaggagatggggaaagttatgagctaagagagttctcaggacaccctagtggccgtcctctttggtttcttccagcctatcaatcataatctgctccccaggatgaacacatcctggggagaattttaaggtttcaagaaagaggtgggaaaggtcatttttctattactgggatatatagatttcccatgattagaagggacatcaggagtcatgtggcgcaaccctcttcagaggaagaaatggctgtctagagggtcttggccagagtcactcagaagttagctgacacaagcaacttgacactagcaagcaaagcttaggacacaattgctagtgattaaaaaagaattggcacctgggcaacaaggtgaaaccccgtctctactaaaaatacaaaaattagccaggcatgatggtgcatgcttgtaatcctagctattcaggaggctgaggcaggagagtcacttgaacctgggaggtcgaggttgcagtgagctgagattgtgtcactgcactccagcctgggcaacagagtgagactccatctcaaaaaaaaaaaaaaaaagaagaagaagaagaagaattggcagccaggcatggtggctcacgcctgtaatcccagccagcaccttgggaggctgaggtgggtggattgcttgagctcaggtgtttgagaccagcctggccaacatggtgaaaccccatctctataaaaaatacgaaaattagctgggcatggtagcacatgtctgttatttcagctactcgggaggctgaggcgggaggattgcttgagcccaggagttcaagatcagcctggacaacatagggaggacctatccctattatttaaaattaaaaattttaaaggccgagaacagtggctcatgcctgtaatcccagcactttgggaggccgaggcaggtggatcactggaggtcaggagttcgagaccagcctggccaacatggcaaaaccccatctctactccaaatacaaaaattagctgggtgtggtggtgggcacctgtaaccccagctactcgggaggctgaggcatgagaatcacttgaacccagaaggcagaagctacagtgagccgagattgcaccagtgcactccaggctgggtgacagagtgagactctgtcaaaaaaattaaaattaaaattaattaaaaaaaagaattgcctgggagatcaaagaaaatgtacatacaatcttcttgacaatcaaattcactgaataatgatgttttaagtaatctgtggaatgaatcatcgtatacataaataagcaaaatgtaatagcaccaccttgttttgtcgagtttttattacttcatgtgaccttctaacaacccctgagaagaatgaaaacatgtaaaatttatcacttgacaaatgagaaaactgagcctcaaaaagttaaatgtctttcccaaggtcacataactagaaggtggtggaggtggggtttgaacccaggtcttctgaacatacctcatttattgaagcagagactcttcaagctgggagggatctgggagatcatctggtgaagatggtttcatcaacaaaatatggcaagattccactaaatgggcctagagtgtcaacctatgcctcagacaatgacccactgcaaacgagtttgtggttcttaagccatgcctcacagaacactagtattattgagagctggactagggggtcccacctttacaaattaaatcttgagcaactttttccattgcacagaaaaaatatatattggtgaatgccattttctctattttgtttaacggggcaaaacataagcaaagaatattcatgtacagtatgcatggaaaaaccaggaaatagctgaccatgtttagttaactgccttttaaaatgtgttcagacacctgggtggctaggtgtgcctttgcttgtatatatcatttctgctggttctagtgaagggactatatttatcagtgtggctgtacttctctaccctggctgcacattagaatcacctggaaagctttaaaaacaaatgattcctggacccattccccagcagttctgactacactggagtgagtggggtccacggcatatttttttcaagatctccagatgattctaacgtgcagccagggttgagaaccacagattataatgtgttgcaaagggcaccatggcttctagatgttctggaagtttgagaaaccactgctttaatggtgtgagctttctattgattaaccgttaaatgaattagacatgttgtttcgctgatggaacacctttaaaaattttgagttagaagcccataaacattttaagcccatgttaaaaattggaacacttcacagaaagatccagattttctgcttttctgggacacgggaagaactaatcaagctggacccacagtcctcaatgcaaaacccagcaagaactgaggctggctgctgctttggctgggcacgtgggctccaggtcccctccctctccctgtctcacacaccctactttcttcttgaccccaagaccaagtgtcctggtgcagtttatcatgacgccgtggcttttcttccagatcatttgcatttcctgccgggtctctgtaggcacttgtgtttgccatccctctaagaaaagtttcgccctagttcactgactcttaagcttcaatgtgcttaagaatccataaggagcttgtcgaaaatacaggttccccaagactccaccccctcaagattctgattctataagggtgggtgggaccagggaatctacatttacctccagcttcctctggaccacacttggagaagtgctgacctctactgtgcagagggcattggcccttggagcaaatgattttcagaataattctcagaataaacaaaatctacacttagcagctagagaacaaagactaaaatatagagttttctctttgctgagaaactctgggtttgctggttgtcttagcgctgcccttggctgaaaacaacaagtctccgaacagagacagataattacaagccagaagataaaatgacacctacattggtgatacctttgtaagagggatgacaacggaagtaaaaaagctgtgtcctttcccatcacatggggtcagagaaactctctactccctcccgacagtaaaatcctggagaattagaaaaaggattacagagtcttgcccatactccccaatagaggctctgctgattcatcccagatggaattataaaattctttcagctgaaaaggagtttggaaatcatctctaactttacagctggggaaactgaggctcagagaggtcacttttacgtagctgcggttgcttaacctgcttgagactcttcattaaataaagaaaactccttcattaaattagggagaacatttgtggcagtatgaatctcccgggcaaaaaaaaaaaaaaaaaaatgcagagctaaggaagaacaaatccagttatcattgtgcaatctgccacctgggttactaagataataactctgacctctcctgcttggtccaacacatgattcatttatgttataaatcaaagttctactgaaccctaaaggttaaaggaggttaaaggtaacacttacaacgtgtattttacatataaatgagtgcttaactacatgcgtcctgcacacagaatgtctaggttagggtccctgctctttttggacaaattacttaagcaatccaggtctcagtttccttatctgtaaaacagggagaaaaggttatttaggaaaaggccttcctctctgctctcaccttggtgccctttctcctgcactactaaaaagtatttcctctttcattttcctctccagggacctctatctccttgccctggctcctactgtcactttcctttgaatgcatgttcactgggtcagggaagtggccagaagtgaggaaatatggaacagaacgtgatctcatgacctcccagcagaggctctggcattgagaccctgctgtgccccaccacagacctggtgtcacccctgtctgccctcatgagttaaagacaggcttccttcccccaccccgccccgccgccttgcaagcccctgatgatggctctctgctcctgctcagcacctgcccactgccttctttatagttagtgtgccttgtgtgtctgcctctctggggtgggctcagcacccgaccagctgcagggcgggcccaggtccgtctgctcagcctccaagtcacctccaacagctgcagagtctgcctgcttccggtttgtacctgtgagcctcatagcatcgcacgttggctcctccccagcatcctgaacagcatcctgctcactgtgctgggttgccccaggccagaccattgctccataaccccacatccacccatctgttgcagttgtaaggtcttggtactgcagcctggaagctgcccagcatctatggggccctgcccgggcttttcccaaggacatctgctatttgtgctttgagtctgcacaaaatcagtgtccacttgcacctgcatggccttgcctccacgtggctcattcattctcagctcaggattccgggatgggggggtcctggtgactcagaatgcttcctcccttggactcctcctgctgacccagaccatgaaggtctgagtcctgccctcttgccctggactctcctcacacctctcctgccggcctcagatttcgaccttcctctgatgcttgtggtcactatctcccgcgttggtgggttcccagggagttggagccttggccatcgagctgctaggtgcctctgggaactgtgggtctctgagccagccccacccagagaccctgggcagggagtagtagctctgcatcggcctccagcctccgccccacatggcagccacatcctgaagaaaggcgctccaggcagccacaggaagctggagcgggaacccctcgccagtaaccacaggctcctctgcctggcgtggagccgtgaacggggcctttgcacctccagccagagctggtccacccatcggtacccactcctgttccttctctccagccaggttcctttcaccccttgctgtgtgctctgctgaccaccctcccctgcctgccagctccatcccatgccctccaccccactccaggagctgcccacctcccaggtgggcctgggctgaggtagtcagggcggcgaggacacctgctggtaggaaaagcaaacagagctgctcccggagtctacggcccacgagtggctcacattcctctttcctgggctgtcagtttctcaacatctgccaaatttctctctcttgtattgaggtttttaaaatccccttcagtaaacacatatgacttccacacgtgtaccaacacacacagacatctcgcccagaagccgcccggctcctccatgcagacagagcctcctgggacggcaggctcccagacatatcccccccccccaccatgcacccactgccacccctccacccgctctcccgtgacacgcagacacaaagggcgccagcctcctctacgcatccacagccaaaacccgctctccccgtgcccaccggcctggagggcgcccattttgagcacatgaatctgtctactgcacaagactgcatgtcaccctaaagtacacggccctgggaacattcgtgcataccctcttccttccacacacacagctcacgtgggtctcgtgggtcacgtgggtggggtagaccaaagggcccaggcagcaagaagctgtctcctgcctgggcttcaaaaagcttgacagacattaatttggggcaggtattcttcttcccaagaactggaaaaactgaaacggagacgtgtcacaatgagttgtgaaaagcagggagaagatgaggtctccacactgagaaccgtaagggctcctgacagagccggccttcccctttatggcacccagatgcttacagttactgatacgatcgcatgtgcaagaatacatatgtttccctggacagcacaatgtaattccaaattaaaatcagtcaaggatgtgatgtgaattcagcaagccactcagctccagggctcctggcctcccagaagcgccggctcttaacagaatggctctatctccttccccacccacctccccagccccaacggaggagcatcgcacatcctgagccttggtgctggtgaatcctggggcaccctgctgtgtggccagcactaggcccccctctgcagagctcccagctccagttcagaccctccagagcagacaccccagcgagaatttggacttactgtgctccgccagcccctggatcatgtcgaatttatggatttctttggcatagtattccgactcggtgttttcctgggtgcagccttcctccctctccccatgcatctcctccagcagctcccgggtgctgttgtaaagggccaggacctgataggggacgtgggtcatcaccgttggctcaggggggctggtgagcctgagcttgctcaagatctgtcccctaatggcttccaccctcttcttcttgatgtggccgaagtccaaggtggtgcaagtggacagagagaggctgaccgtggcaaagttcagcagggccaggaccaccagagccctttgcaagtgcatcttcatgtgtgagctgggaagagaggccagggggacggcaaggcctggagaggaagagaccccagcagacgtgcagaaggagggaggaaaaccaggcggcctccccagatcccaaagactgaggcttggcaagaaggtgcatgaactcactgcactgcgagagcttcaggacttccaggaagcgctggcaaccctgaggacgaagaagcggactgtgtgccttgtagcgctgggattcttgtccatgtgtctaaacaggttttgctgggctctgactcccagcaggccaggtggagggcaagcagagggctgggaggggtggcaaggcagctgggagtgggaagggagctggagtttttccttaggtaaaaataaatagagtggatatctgatattgccaaacgccgcttggcgatggggagaaagtgggtattttaaagaagaagcagaaggaccatggctgggtcccaaaatcaaaatccttgccttgccttgaaagaaaataagaaaagagaatggaaaagaaaagggaaaaaaaagtaaaaaaaaaaagatcaccagtgagtaggtggggagaagcagggccgggcagttgctggcccagctaaaggtgggggcagtacaggacacacttgtctctcaggcactccattcatgctttctcttttgtttacacttcctcgggggctttctaaatgactttgttcacgctgcctctcgtcttcattggctggggtgtggggttatatgcattggaaggcagggaggcaggcctctgagcgcagcagccccaatcatccactcagacgcccagggtcaccagcacctcggcttgtcttctgcctcggccattgcttctgtcccctgcttctctttaaaaaataaaaaggagaaaaaaataaaataaaatagaagccagttcacggcacgcctgctccggaaagctgttattccttctctcgcacgcctcttcccctgtctctgcctctctcgctcattcccttggacttgactctctgcttccctccctttctctctctccctctccctctccctctcgctcctctccctctctctctcacacacacacacatgcacacacactgctttctctatttctctctgctgaaattttatacctccctcccatgacgtctctggcctggggtgggggagggagggaccagcgcacgcagcctcttttgctgcacgatgttaatgttttaaacaggcacaggaaaagccgagcccttttgaaaaatactttgcgagtcctctcgttcgacgtggtagctgaactttttttcccctcttggaatcactcctgccacacgttggctgtttttctggaaagttactccgatgagccccctccctccctttcccccagccccggcgccctctcgccagctgtcagtccgcgccgtccgcggcccgcgtctactctccctcctggtcccccggtcccggggccgcccgcgggccaggcccaacccggggcagggtccgcagagggcgcgggacccggtaggggcggccatgccagcctcgcagaggggactcccagcctgcgagccgggtcggagggtcggcgtccgctccgcggcgatcctggcccgattcttcattgacaagatcggagtcgggaggcgggcagaagcctggagacgctccaggggcagtgaaaaatggtggcgttttccggaagatcgagggtgccctctggcgaggcgaggccgccagtgaaggagctcggctggtcgggagccggggaggctcgggggctgggggctgcggggtgggggctgaggggcgggagaaggggctgcggtagagagcgagaaaaacaagacccaggccccgaggaatcgcctccctcccggcccgacgtgcgcacgagcgcacctctccctccccgaccgccgctccggagccgctctcgcagaaatgtcatccagatgttcagcctccctccccgccgaggtctccgcagggagctgcgccagcgagcgcgaagtcagcagttggcccgagcccatttcccagatgggtgaggggaagtcggctctgtgctttcgctcctcttctcggcccgaacctctaggccttttcccacgagcagccaagggagggtagggcacgtggctccccgcaccccgcaacacagggcttgcctctgaactgaactttcctgagagtgagtgccgctcccaccccatctcactccagccttcctggaccctttctgagaggtctggcttccaggccactaactgaaggggctgttctctgtatcccagcacagcggtgggtcactttacggatgaggaaactgaggcatagagttttttgtttttttttt

SEQ ID NO: 617 - DNA, 34957 bp, Homo sapiens
  source 1..34957: mol_type = genomic DNA
cggtggttcatgcctgtaatcccagcactttgggaggccaaggcaggaggagcacttgaggccaggagttcaagactagcctggccaacatggtgaaaccccttctctaccaaaaaaacaaaacaaaacaaagcaaaaaaacaaaaattagctgggcatgctagcacatgcctacaatccccgctacttgggaggctaggacatgaaaatcccttgaacccaggagacggaggttgcagtgagccaagattgtgccactgcactccagcctgggcaaaagagcaagaccctgtctcaaataataataataataataaattttaagaaggagaagatgggactggtaaacccttgtctttgagtgctccactctgcccctcaggaaaaaaaaaaagtggaacaggaggcacttcattttctatggctctgggtttaggatttcagaaagtcgtcaccacccaacattatagggccttgcatcaaagagagatatggtggggaaagccagaatggaagagagacaaaaccgtagcaccttcctcctccccctctggacaccatcactcctgccctgatccagattaccgctggccctccccactgcctcctagttctgcctttgtgatgcagagtataaatgtatctcatgcattgggattccctcccagctccttgagcagcccaatcccaagggactagttccatacagggtagagtacagaccctgagcactacatactgcagccttgctccccagggttccggccaaacctgatcaccgaggaggtggcatcgactggcagacagccaccctcagtgcacctcattccactcactgcactgactctgcacactgcagcctcctgccccacactgcagctgttgcttgtctcctgtgagcccagactgaacacaggttcgcttactgcatggaggctccgtacgctgcagcctcaattccccattacagctgccactgcacaccacaggctcccttcacccatggcatgccctcaacaccaccactgcactctgcacgccataggtttcatcccagctgctcttctcatctccatggttccagggaccccaagagaggtaccctcccctccgccaagcattacgaactccagtaccccctgtgaaagaagtggttccaacagcactgaggatgcaggtggctgagactaagacatgagcaagggcagcccaacttgggtaagctgtggctcagaatcccacactcgccaagtgactctgcccagtataaactgggcgattagccgagcagctccccctaacacacacacacttacacacacacacactcacacacacacccctccccaagagcagactatgtagccagggccccaccctgagagccgtgggaaggctgtggcccccgctggtaaaactgggctaatgacagcaggggaaccggcggggccaggggggtgctggggtaattagggctcggcctggcgctaggagatcctgagatgaaaggtgctctggcgtcactgggttggttttatgtccatgaatgcaggtgtgtggtgtgtgtatgtgtgtgctgggggtggggctggcatggtggagacctctcctttgggttgggttagggggtccatttgtatgcagcccaccgtcttccttagattgactctggtaccatttggatttttgtgggagcaaacatggggggaaataccaccacccgggagctaggaattgagggggtatggcagatcttgtcccctccccgagctcaggagagggagcagattgttgggggaaatggctggtgacagagaatagaaagagcctatatggagaagggtgacgttggaaaagggaggcagtggatcggtattgatgttagaaatgagaggggagggaggtaacagggaatgaacccccacaaggatgaaaaacgtaagatgattgaagttaaaaggacatcaggggtcacctgcccagccctcgcagctgaagcttgaggaagctctgcccccgacagcagtggcgatttgtcaaggtcacacagtgagttaccggcggagaagggacccgaactcccaaacaaactacacctgcaagcgtttggtgtttagactttctccccgatgtataaggtgcaggctgctcgtcgatacttcctcctccaccctcacggtgcacacccgaaaaccccccaattctcccggcaagcaaaggctattttttaatgacatcttttccaaaatatgtcaccaagtacccactcctgcgggagccgcccgggctggggagggcgagtccgagcggggcggggcagaggcggccgaggggcggccggacctctggcgggggtcccggggcgcggcagggggcggggggcgggggcgggcggcggcgaggcggcctgcagggagcagccgcgagccggccgggcgcgccgagcccgagccccagccggagcggggcgggggagggaggagccagagcggccgccgcctctgccggaggagccgcggggccgccacactcgccccccgccccccccgcgctcactcgcactcacacccgggcgcaggaggcgggcggcccgggccccaccggccccccatggacgcccccagcacggggcgctgagacccccgcgtcgctgcccagcccggtccggcgcgccacgccgaggtaaggaggagggagcgagggggcattaatatgcaaatgccttgcgattgattatgcaaagccgcggggctccgtggccagctcccaggcgggctaggggcgcccagggggtgcctgctgccagcctcagcctttcctggcgccccagtgaccctgtcacgagcccgggagcttgcaactgacgccctggggaagggaggtgttgctaggaggtcgctgggccccggggttcgcaggcggagatggcgtccgagcctccccctggagggcccgcccggcctctgtccggccagtctgctgcgcattcccgggccgggccccgttgccggccgccggagctcccccgcccgccgcgccgcggtttgtttacggtgcgccggaggcctgcccccccagcccccacccctagcctctgaggcccgagtggcctttgcaaagctgcctccagctgcggagggcagtatgagtgcggtggcgcgggtgggcttgcacgggtccggggagagggaagttcccccgcctcacccgcctcccggttgagcatggctgtctggttgcaacactgctaattgcaaaaacgcggttgttgggggggaatgtgtgtgtggaaggggtgtacttggtggtgcctagatgattaggagagttgctggctggggaggagagggagaaatggacctgtgtgtgtgtaccccaccttgtttccctccccttgcaacgtgtctctggtgccccttctccatctggggccctcccttgtccagcgtgaaagaaaggcctggggggatgacaggggcaattgaaagaaccaccgttccaggggtgggggtgggggacacagaaggaaagccagtgaggtgggagcctgcccctcagtgctggctttggctccaggagggggaggggatgaagggggctgttgtccaaaatgaggggggaagcaaaagtgacacgcagacacagagatatgtccacacagacagccacatgcacatccagggacacccaggcagactcaaggacaggagctactggacacacccacatggggacaagggaagagacaggctgctgctgcaccgtggagctctgaggggtgggatatacccatgggagaccaagagcatggggaccgatccatgcacatacccacgcacagggtcacacgtagatgctgtcacacactggggcaaggaggagttgctgtcacccacacataaaaagtcactgtcacatgcatgcatgcacacagagcaattgcacacagcagcacaattacaaaagaccctgtcactcacaggcacacacgtgctcgcatgagcccagtcacacagacatcattgcttgccgtgacagtcgctgtcactcagtcagatgcaaacacagttacacaccaacacatgtatacacaacttagcaacaagtattttcctggactctttactgtggagctctgaggttctgtaggcaacaaaacccttgctcccaagaatattaaatttggctgtatgaaaaagtgttcctgcgtaatggtgtaaagcatgcattcccaatgacatgttcttggtctctatcgcttgagataccaccctactagacagtgagctcttggagacctgggagaatcacttaaagagctctggatcccacgcagagcctagcacaagggctgctctgtaaatacttgttagttgattgactgtggaacctgcagacacaggtgcactcatttgcacatggtcccctgaactcaggtgcagaatgagttcacaaggcccaggtccccacagttgcaggtccacaccaacagtcgtgtccacacaaccccagatacacacaactgcagcctgtgcagccgagcacacacttagatgcacacaatcacaaatttttccccttcagcttcctcctcccctttttcctctaggctcagccactgtgcgggaatgggctgttttttttttctttctttcttttagagggacagagaaacaagagcaaagacagtgggttcaggggggttccagagggccgagtcatgggctcaaagcagtgtccagtgacttctagaagctaggattctcttgactgttggggaaggggagagctgctctcctccctaccctaaaagctcaggggtgtctaactgcccctgctctgagtcatttgcctgggtctttcctgggaacagtcagtcacttccagctgagttcctgcgccccaccttgagtctggccctttttcccacctgtaccctcctgtccaaacttggaagctttccttaagaggccatcggctggcgagtgtctgtgtgagtgatatgtacttttgacttggaatttctctctaactctgtctctctgttgctctgtcttgcagtgtctgattctccctctctctctccttgtttctctgccagtctgtaactctctctcaccctgttgctacccccgatctacccctgtccttgtctcagagctggggactggcagcaatgttcttcatacttttccagttgttaatacccaagctccgcccctctgccccccctgcgcagcctctggggtcagcttgaggttggggtggggggcggggggctcagctggctgctcaggacttcctgcacttccttagtgccgcagctgtggccagcaagttttaggggctgggaatgggggaagggggggggggtcagccactgcccatgctgacccctcgggcctgcatgtctggagacaccagttctgtgggcaccctcagggtgcaggctgcagccagctagcagctcttaaacaagccatgaagaggctccccccacactggcccaagctggaaaagaaccgcccccatgggcagtggcgggagctggcaggaccctgctgagttgggtccactgcagggctcacaatggcctttctccacacccctggcagctgaggcccacctcagagatgcccaacagctgtgtcctttttgcccagcctcagggcctggttctgagggcacagctgcctagactaagtatgtactaagcgaggccctcccacccgtgagtgcaggttccagcctagaaggggtacctcttctggagagggaatttgaggagggggaactcaggcaggagacatcgagcccgggggcaccaagcacttctcgctatgctcccctctagccttggactatttggaggtggaggcacttggcagagaacccacagggcagctacagaggggaaagactgaggcttggtctcagggaacacatagctggatgaaagaacaaggcattgggccgggcacagtggctcacacccgtaatcctagcacactgggaggcggaggcaggcagatcacctgaggtcaggagttcaagaccagtctgaccaagatggtgaaaccccatctctactaaaaatacaaaacttagctgggtgtggtggcggggtcctgtaatcccagctactcaggaggctgaggcaggagaatcgcttgaacccaggaggtggaggttgcagtgagctgagattgtaccactgcactacagactgggtgacagagcgagactccgtctcaaaaaaaaaaaaaaaaaaaaagaaaaacaaaaaagaacaaggcattatctatcaagcaggtgatataccatcacagctaagaacagagatgatggtgatgatcatgacggccatgattgacctggactgcctaggtctgaatcccagctctgtcacttgctggatgtgtgactttgagcaagcgatttaacttccccgttgcctcatctgtaaattggggatgatcatatctacctcatttagcttttttgaggaaaaatgtttttaaaagtgcctagttcataacaaactgtatatgtgagcggttgtgatgggtgaaggaagctgtgggcctggggtctcccagatttcttagagaagcttcgtggagaattgggtctcctagacatcagtgagactggggcctggggcagtgggtctccaatttccagccttctcaccgtcatgtaatcttttcctcccagacaaatttttgcagcctggaatgagtgtatgggaaagagcccaaggcaggcccctctgccccaccctcctttgaccctcgcccttcagcttacaaggagcccttggcccctcagcctgggacacaccccaccagctaggggcacctgcataaatctttgggcatcactgcatctctgttcagggtctgagctctgggggtgggagagagagaacaaggaaagccgtcccctctcttatgtgtgggctcaaagaggaggcagtgcccttcctccctcctgggagcccagcattggtcaaccaggacccagctctggctgataggcaccagattcccctgccctccatggagtggtacttagtgtgaaaggtggtggcagagagaaactgaagcactgagtaatgaccagtgtggtgggcacagcactttgagatccagcatctgtcctgggttgcctctttgcctttgtgagtctggtgatcaggatcccctctccaaaccccttttatttagccctgcccctcaaggtgaaggaaggacaatgggaggataccctgtaggggtgacgggaagcctttggagtgggaaccaatctcaactctagttctcggctgggcacagtggctcatgcctgtaatctcaatattttgggaggccaaggcgggaggatcacttgaggccagtagttcatgatcagcctggtcaacatagtgagaccccatctctaaaaacaactttaaaaagttagccaggtgtggtggcgcatgcctgtgttaccagctacttgggaggctgaggccggaggatcgcttaagcctggaaggtcgaggctgcggtgagctgtgattgtgccactgcactctagcctgaacaacagagtgagaccccccacacacacatcctctcaaaacagacagaaaacaaaacaaaaaacccaactctagttctcatggctgcaaaggtgtctaggggactttggagaactgttgtgtctcttggggagggaggcaagcatgaccgtggtgggaagatcactggctgggagttgggaggcctggctgttgacattcactagtcgtatgactttgggcctgggttttcattatctagagacaatggttcctgtctcactcaggttgagggcaaataacacaaggtgggatgacccctgtgttcaatccatgttgcatcctggcatggtgagcaatgcctgtggattctccttttttcccagggcctggcacatgccagggtggggcatacacatgctgcctggaaccagagacagttctcagtctctcactgaagtatctggggctggtgtgtggtgggggcacatgtggttccaccttggtgtcacttggcaggccaaagctggggtcatagggacctccctccggtatgccattgcgtgaggtggtccagagggagggtcagaagtttgctgggtagacaagggaagcaagatgggtgttactggtgcccaggaaatactatccttgcttcgctgttttgggggtgggcattaaaggttgataccaaagcctcagccatgcccctcagcagtggccaagagcagaatgattggaccaagcccctggcccacctcctcctcctcctcttttcctcttctaaagaagagatcggctcttggctcccagagccccagctgcctgtttctttttctcttttaccaggcatgggggtggggaaacaggggaaccgaggctttggtgtctttcggcatttttgtacacatcagtgagtgggtgtgttgtgcacgcatccatgtgagagtgtttttgtgcatgtgtgggctggggagggctctgaatatctcctggaacggtacccagagccctgtggctctgcgcatgcggggtgagtgtgtgtgtctgcacgtgtccgtgtgtgtgccggagactcagctgcattcacgcgcgcgctctctccctccctctctccctccctctctctctccctccctcccttcctcttccctctccctctctctctccccctccccctctctgtctctccctccttctctccctccctctctctctctcacacacacactctcaatctttctctcttccctcccccttcctccctccttcctattccctccctcctccctttctgtccctgtctctctgtctctgtctctgtctctctctctctgcctctgccagttctgcttggttaggggctagctccagcctctggggtgcctgggagaacatccctccctttctttccccctccaccattccctcccctcctaggccatgctcttcagggcttgcaggcaacttcttctactgccttagatgagggagtgaggagggaggaccccaagccttgtgcccatggtgccatctgcagcaagtgccttggccccgtgacattcatgcctccagcattcagctgccccagctcccagctccaattacccgctggctgctgggggagggtggggagaatgtgccgtgcccagcttgggggtgctcctgcttctgctttcttggctacttggatctcctgcctccattcctgaggggaattgggcagggggggcgtgaagttctgtgggctgataaggaggggctgagttctccagcatgggtgtgggcatgaccacccaccagtggtcatgggggatggatgtgacctgggaggagacctccagacctgggcacccaccttgatgcctggctggagctggcccgggcaggaggagggagaggagagcagcaggtgggtgaggctatgggggagccgagtgggaagcagtctttgatgttaatactgggcatctggcccaagtcaaggctgctgtttatgtctttctgtctctgacctgcagggggggtttcctgttatattcttttggggcggggtggggaggatcctttgtttaagtaaccaatctcccccttatgaggatccccaccccatctcccattctctagcctctaaggtcccacagtggctaggtgatgagtcactgccccccagctccagaacctgtctcctgggggcccagtgagagctcaccaaggggtgccgcctcccctcctcccgtctcccccatgcctgccaggctggggccctgagtctgtgtgtactcctctgccacatcacacctgccaaatagtaccttccttcccgccttcactcctcctctccttcctggcactaggataacagagagttgggtggggcagccctgctcaatccatacctgagaatagaacagggggtatgggaaaggacagggagtcccggtcctagagaggcctctgcccctcagcatgggggcacatgtcgctgctgcagcactgccaccaccacagactcccaggggcccttggtgtgggtggctgcctgtggtgcccgtgttggcatggggggcagtgctgcccatagacgcctgtgcccatgcatgcccatttatgtgtctgggccacggtggccgccccggcccctcagcatcgcccttcctggctcccatggtgggaggctgggtgatcaggagtgggtggtgggggagggatctccccccaccctagcagcaggcagaggggaaggggagagggaggtgtgaacctacccacagaactattaatagcccacatgccaggccaccaagaaccagctgtcaccgtggaaaccattcctacgcccccctccccccagcctgcatggggtgggacttagacagggtacgaagccccccacccatctttctttgttacctttctctctttgtctcccctccttcatgtgtctctcctccctttatctgtcctcctttctacctcaccccttctccccatcccccatctctggctcccctttcttcctctccctctactgccttgtcacccctagctctaccccagccctgtcccatttctttgttcttccccctcctcccttcttccctctttcccccaccagcctttttacccctcctcccatctttccacccttttctcagccgccccgcatgtacgtgtccctgtggctggcaaggagggctgggctttcttcagagcactaaggacaaagttcaggggccccagaaaggtggggccaaagcccagagcagatacgcaggagggttaatgcgggtagtattgggggttagatcctggggacagaaactcccctctggcagccccaggagtcctttgggggtgtcctcagatatacaggactgcagagtgggacggctcggcagtgggaacctggcggggcgcccgtggatgccgcattggccccgtgtccctgtccccccatggcagaagtacttaagcttaatgaaatgcttccccctccacgggcactttgcctacactgcctcccagcagctcttatctcacaaggagggagtgggtggccaggccagccgacaggtgggtcttgctgtcctgctgtccagcctgggcacagaaccccatagctccgccccctcggcctccttggggcagggcctccctcgcctctgcagaggaggtaccaggaaggagtttggggagttaagctggactctggaggaggggtgagaggctgcccttcagggtgggtacccctgccccatgccccttacccgctgacctttttctgtccgtggctaacacaggctcatgtggtatgtgtctccccacatgctgggccctctgcctcgcctctgtatcaccccaaaggcccaagtgtgtccctggagagatgccaaggagtccccaggggttccagcctctttctgggtacccagtgagggtgccctaggcagcaagggcagcaccttgctcctctgcccactaccaggggctgactgtagctgggctgcactgcccagcaccagggcaccattcagttcaaaagaggggtggggcagagagcgagtctgcccctccccccagtgggcacgtgcaggcccttggcagtacccagacacatttggagttaaggctgggcaggagagagggatggggaaataaacatggtggcttaggttggcactgctccaggtctgcaatgtagcaactggtaagtggcaggggcctgggggaggggaccctcaggagccctggcctggggcaggagctgcccatgccatgtggctgccactggtgttccccgcctggcccggcccacagcagccagtgctcattcctgcacacactggtcctcctcggctgcccccaggacctgctccccggggctgcccctctctcagcatgcccactcctgtgcttgcctcctcccctccctgggggcgcttgggcctccggctggcgagtggatttttccagcttctgtaaacaagtggtggcagtgtgccaggcgggcaggagacaggcgggggcagcaccacagccagggtgtgccaagcaccgaggcacagcctggggggcagacggagacacccagacccggagagagagacattcagacacagacagacagacagacatgcaggcagcctcgctggacgtggagtcagaagatcgtcctctattgtccagcccaacccccgtagcggccctcgccccctgcccctcactgtctggctgagagcattaggccccagtgcccagcccctgggcttccccacccactccttctcctccccaacctccaccccttagggctggctacgccattataaatttataacaggaatttctccacaagccaagaaaaacttgacctactttcttgatggctccctgggctaaggctccctgctcatgcccccccaccccagtctcctgtccagcccccagtgcccagtcctggtctggggtgggtatcagaggtagaacgggccacttttctgtgcaatgcccatgctctccacactaccagcttgcctgggtgcagaggccccgttctgctgctggccctgcccaatcccctgacttatctccctctctcttcccaccctggctgcttatcagctcctgggggtggggccagggggcctaggggtgaggtctcctatgcagcagccacgtgacagaggttgaggtcgtatgttggggagctgtaccctttgtccccctcctacccgccacacctgcctgtgtgcacacagacagtaagccacaggtctgcagcccagggtcagaggtgcaatgccgtaggaatggtgggcccggcttggcactgccctggactccaggtagcagaacaaggctagcattagggccaggctgtgaggcttatcccacagccacctgcttactagttgtgtgaacttgagtgaatgaccaagctttctgagactcagtttcctcatctgtgaagttctcgtgccctctttggagggtacagattctctctccagttaatatgtgttagtttcctttcctttcccccttgccatcctggtcgatagcagctcagctaaaccaactgagaagtctggtcctctgcctgggaagtgggattcgagaccttgcgtgggaagctctggagtccctgaggggccagagttggggatcataacttggctggcagcatgggaggtcagttccctacagctttcaacatctctctctattaaggcacaaagatgggcattcatgctcactgcgtgccgctctatgtcccatccttccttcacagataccctccctgcctatgctgaaaactgcttgtctctggtcccctcttgcccctataatacagatgagtttcaggaaagcttttctagaggggtggtaacaatagctagtgtttaatagttgctcattaagggccaggcatttgtctgaatatgaagactgagacatattacttagtacatgaatgatctcattctctccctccattccttcccatgtctggggcttaggaggtggatctccaatctcgcctgctgtacctgttatctaagggatcatcctggtcccctctctatgcctgcccttcctgccccctgctgtcttgttatgggatcccaaagccccaaatgttgccaccaaagggatcctacccaccttcctaccgtgacaccttcttacccctgcctctctcttctctccacagggatctctggacaggacaagactccgaagctactcccccagcacacagcccgggacccacaaacccagcttgcccccagccctcccacctgccactccctggcccctcccaccgcccgccccccttggggcgcagggcatggtgtgaaaggccaagtgctgaggcgggtatcatgggtgctgtgccctagggcctgggtggcagggggtgggtggcctgtgggtgtgccgggggggccagtgtgcccaccccagtctcttggcgtgctggagggcatcctggatggaattgaagtgaatggaacagaagccaagcaaggtggagtgtgggtcagacccagaggagaacaggtaatgggttcagcaactaggtcatgccaactcctaagcagcaggcatgggcacctggctgagctctcctttaggcaccgcctttaagcacctctgtgggatggacgtgaggccagcaagccttctgcctacctttgtctggcagatgaagtcatgttcagatgtgacaggcacttggattgagagatgctcattttgaagcggggagcgatacagagcaattacagggagcacataaggggctcttccctagacattgctgggcagtctcagatgcccccaacgtcccttccaccattgctgcccttaccttgagcatgtgggatccaaacagccttgccattttcttcctctccctaccagcccatttactatctgaccacaagtgtgttgtccacaagctgcggttcacgtaatacatttcagggcacatgcaccagtaactattggtcatagcccaagcttatattcggaatctattgggagccccacaagctcttccttgttcatggtcaagggcgggcactgcgatggggctcctcccagaaagtgcacgccaaccatgatggttttgcttccacatgggtgaggtgtcagccctgcacatacaccaagggatggttacctgtgatctgcattgcccttgaggagcccagagggtctctgtcttttctatcagctccaagtggcacagagctttgtcccagttggcacggtgccctgggagctgggtacagcctgtgcctatggccagggagagggtgggggtgggggtgctccggggagcagtgtggctgactgttgcctaggagatcagatcccgagccaggaagccagaggcctggccaggcaaagccctaaggcccacaactgggtccctggagggtagaggaagtagatggaactcacagctgggcagggcatggggtagctcccctcccccaaagcctcaccccaggaaggactctgaggacgatctggcctgtcgctgtgtggctgtcacttgcagcccctgtgtctcccagcttaggcttctgtgggtctggaagagtctgtgcttaatgtttggagaaaggcaggaatgccagttcccagtctcctaagactgcaacccctcccccatcaccttcccctcccccatgtctatgcgccaccttgtggctatctctaggactacactcagaggctgtgagtctggtggtaactgctgaagccgctagctcaactggggcctaggtgggctgagttcccctgcacccaaccctctgggaggcgtgagggagacctgacctttcagcctcataggaagtagaccggagtaatccccacggggcgtggagcatagggttgtctgtgactgtgaccctggccaaggtcactgtgtcagtgtgttgggagctgcatccggctccaggaggaaggggcctgcaacatgccacacgcagggtgggtgcgggaggttatacaatccttgcatgcatgtagagggcttatgtaacctgtgtgcaccgaggttatgcaacatgtatgtggagagcctggcaacatatatgtgcagtggctgagggttgctaataatacgctgcacagaggggctcagtcccggctctgactctagctcatggtgtcaccaggcacaagcagggtctcagtttgctgctctgttaaatggaggctgtgcagagggtgtagtgttttctattgctgtgggttatttagcatgtgtgtatgacctggagctcaagcaacacgtgcacactggagggatgagggtggttttatgaggtgcctgtgcagagtgttgtgtaacacatgggcatatcctagaggttgtatagcacatttaagaatgccctgaaaatttcacaggtatgttggccctggtgcatactcaccatccatgggtttatagtgaaggttgcatggttattcatctgtgccggtgttatgttgcatatgtatgtgtgtgttctaaaggctacatagctttaagcatatcctgagaattcttccagcgtattcgtcatgtactgaaagatgaggatgtcctgcagattatgggtgcttcaggtcttctggcgggtgaatgtgtgtgtgttggggctctagaatatgcttgtgccacagccaagccccttatctctctcccctgcaacttccagataactggacccttttaagcattgtcagctgaccctggggggtgggaggtagaatgaggacacaaaatggaaagaatcaggccttgggggattgcataagcctctcggatgagaaaggggctactcgaagactgctctgtgattctgcccactttgcctccatccagtgccaggtcaccagatggaaagcgaaaaagaaagaacggccaatgttccctgaaaaccagcatgtcaggtgaggctggctgtgcgtgccccttctccacgtccccaaccccaccaaacccagccagggctcctctggacctggatgtggaacagtaattcatgtgttccctggggggagcctcctagagggcttgggatggacttgtctgggggtgagaaaggtaatgtgggatgtgcccagcttttgagggtggattaggtcaggacggcctcttccctcttcccctaataccctcatctgaggccctaccagaatcagggcctgagctgaaggactgaggggctgtattatccccagtgagcagctgacgtttatttttccctctccaccatcctctgccttgtagatagatcaagaagaaagccctgaatgggcagtcagaagaactgagattcttcatactcttagggcagagatggacaggttcacctcgtgtctctctaggattctaccagggaggctgggctaggagaggggtcagaaacaaaaagttgagggatggggaaaagtgtgagagcctctctgctgggactccaagccatgcctgccttcctccatcctttccttcctcccagggtatatccctagttacctggacaaagacgagcagtgtgtcgtgtgtggggacaaggcaactggttatcactaccgctgtatcacttgtgagggctgcaaggtatggaagctacctcctgcccctcccctgccacctgagcccccatattactccctatgtcacctaaagcccgcctgttaggtcatcactttttttttttttctttgagacggagtctcactcttgtcccccaggctggagtgcagtggcgcgatcatggctcactgcaacctccgccttcaggttcaagtgattcccctacctcggcctcctgagtagctgggattacaggtatgcacctccacacccagctagtttttttgtatttttagtagagacggggtttcactatgtggccaggctggtctcgaactcctgacctcaggtgaccacccgtctcagcctcctgaagtgctgggattacaggcatacctgcctggttactttctcttctcttctcttattcattcatttactcattcataactcctcctctgccactcacaggaaaattgcctaacttcttcgagccttagtttcagtttcttcatctataaaatgaggataatcattctctctaccttatagcattgttgggagaattaaatatgttgggagatagttcacttgaagtgtttaaaacagtgccattgggtgctgtggctcatgcctaaaatcccagccctttgggagggaggccaaggcgggagcatcccttgatcccaggagtttgagaccagcctagctaacacagtgagacactgtctctacaaaattaaagaaattagctgggtgtggtgccacatgcctgtggtcccagctactcaggaggctgaggtgggagactgcttgaacccagaaggtcagggctgcattgaacggtggtggcgccactgcactccggcctgggtgacagagcaagattctgtctcaaagtaaaataataaaataaaataaaaaatagtgccatgtgcataagaagcatttgataaatgccagccatcacccattcattcagtgtattcttaggtgtgagagtgtagtacgtacctcgccttcaagctgctcacagcctgtcagagagagagacacaacttgaaacaaacatcagtgttattcaaaatgtggttcatggaccacctgtcctactagttaaaatgcagattcccagccttcatcttttttttttttttttttttttgagatggcatctcgctctgttgcccaggttggagtgcaatggtgtgatctcggctcactgcaaccttcgcctcccgggttcaagcgattctcctgcttcagcctcctgagtggctgggactacaggcacctgccaccacgcccagctaacttttatatttttaatagagacagggtttcaccatgttgaccaggatggtcttgatctcttgacctcgtgatccgcccgccttggcctcccaaagtgctggggttacaggtgtgagccactgcgcccagcctgcccaggcttcatcttaaccctgctcactcagagcccttttgtggagcccaggaatcttccttttaacagaatcccggagtgtttcccatgcacctgaaagagcgagagccagtactgggggggtagtgggagctgggagcacagaggagaagaggacagcaggttcttccaggcagaggggatgacaaggtcatagattttgggaggcctaattgttttgttttgttttttttgagatggagtctcgctctgttgcccagcctggagtgcagtggtgcaatcttggctcactgcaacctccacctctcgggttcaagcaattctccctgcttcagcattggtagctgggattacagacacctgccaccaagcctggctaatttttgtatttttagtagagatagggtttcaccatgttagccaggctggtctcgaactcctgacctcaggtgatctgcctgcctctgcatcccaaagtgcttaagaggcctaattagatttcactttgatcatttcagcctggatagcctttccaggatcacctcctaaaaatgcaaggccttccaagaaacagaattatttaaatcccagcactttgggagtccaaggcaggcagatcacctgaggttaccacacccggtggcactgttttaaacacttcaagtgaattgtctcatttaattctcccaacagtgctataaggtagataaaatgattatccccattttatagatgaagaaactgagactcagagaagttaggcaattttcttgtgagtgacagaggagggattatgaatgagcaaatgaacgaatgagtaaggtcaggaatttgagaccatcctggccaacatggtaaaagcctgtctctactaaaaataccaaaattggccaggtgtagtgatgtacgcctgtaatcccacctacttgggaggctgaggcaggagaatctcttgaacttgggagatggaggttacagtgagagtggagattaagtcagtgtactccagcctgggtgacagagcgacagagtgatactctgtctcaaaataaaaaaaaaaagaaacagaatgatttatatgttaaaggccaggtatagtagctcacgcctgtaatccaaacactttaggaggccaaggtgggaggattgcttgagcccaggagtttaagaacagcctgggcaacatagtgagaccctgtccatacaaaaaaatttttaaagtagccaggcatggtggtgcacacacacctgtggtcccagctactcaggcagctgaggtaggacgatcacttgaggctgggaggtcgaagctgctgtgagctgtgattaagccattgcactccagcctgggcgacagaacaagaccctgtcttaaaaacaaaaaacaaacaaaaaaaaaaaacggaaaaaaagtttaaggcttgaagtttctctctctttcttgatgtcaaccaaaccaagaccatgagggatttagagttccctagcagaagcaatacaatccttctggaagcaatacaaacagtgtagcatagagaaaggatcttttactctcacggacatctgagtcccagggaagcaccctgaaaagacagagatgccttggccccacccttggatagttttattttgtagttctggagtgaggcccaggaatctgtatctttggtaggtgcctttggtgacttttttttttttttttttttttcaagacggagtctcactctgtcacccaggctggagtgcagtggcgcgatcttggctcactgcaacctctgcctcccaggttcaagcacttgtcctgcctcagcctcctgagtagctgggattacaggtgcctgccacctcacctggctaattttttgtatttttagtagagacaaggtttcacgatgttggccacgttggtcttgaactcctgacctcgtgatccacccacctcagcctcccaaagagctgggattacaggcgtgagccaccgcactcggctgcctttggtgattttaatgcccctggaatctgagagctcagacgttggtgtcccatacctgaggcccagttctgactctgctgcccaccggccacatgactttgggcaaattgcttcatctcaccaagcttcagtttccttgtctgcaaagtggaggcagtaacagttcctacctcatagggttgtctggagggttcactgtgatgttccatgaaagacaaggcttatcttttgggtttttgtttttgtttgtaatggggtctctgtcacccaggttggagtgcagtggtgcgatcatagctcactgcagccttgacctcctggtctcaagcaatcctaagcaatcctcccacctcagcctccagagtagctgggattataggtgcacgccacaacccctggccaatttgtgtatttttagtagagatggggttttgctatgttggacaggctggtcttgatcttgaactcctggcctcaagtgatctgcctgcctcagcctcccagagtgctgggattacaggtgtgagtcattgcacctggccagcaaggcttatgtttactaagtgactgacacattgtaaacatgaaaaaatactaattcttcatattattgcaatcatcttgagttttgaggtgtttcctttaaaataaaggcgaggctgggtgcggtggctcacgcctgtaatcccagcactttgggaggccgaggtgggcagatcacctgaggtcaggagttcgagaccagcctggccaacatggtgaaaccccatctctataaaaatacaaaaattagccgggcgtaatggtgggcacctgtagtcccagctactcgggaggctgaggcaggagaattgcttgtacctgggaggtggaggttgcagtaagctgagatcacaccactgcactccagcctgggtgacagagtgaaacttcatctcaaaaagaaaaaaaaaattaaattaaaaaaataaaataaaggtgaatcccaatgtagagaattgaaatttttctcttcccctactagagttcatactcagtccctttccttgacttttttggttcccctgttttatgaattccacctgcatggacaacaggcaacatatatgagaatggtttttgggtcagtgttgtttttaaagtcatttagcaaaatggaaaatgaggttttacttggatttccttttttttttttttttttttttttgagacagagttttgctcttgttgcccagactagagtgcaatggcacaatcttggctcaccgcaacctctgcttcctgggttcaagcaattcttctgcctcagcctcccaagtagctgggattacaggcatgtgccaccattcccggctaattttttcttttttttttcttttttgagatgaagtctcactcttgtcacccaggctggagtgcaatgcgagctccacctcctgggttcaagcgattctcctgcctcagcctcccgagtagctgggattacaggggcaggcccagctaatttttatatttttagtagagatggggtttcaccatgttggccaggctggtcttgaactcctgacttcaggcagtctgcccgcctgggcctcccaaagtgctgggattacaggcatgagccaccgcgcccggccaaggggtggaccccgccgtggttccaccgcggctcaaacctaggaccttctgcatgtaaagcagatgtgataactgctacactatagaatcgcatgcttttttttttttttttttttttttttgagatggagtctcattctgtcacccaggctggaatgcagtggcgcgatcttggctcactgcaacctctgtgtcctgggttcaagcaattctctgcctcagcctcctgagtagctgggattacaggcgcccaccaccacgcccgggtaattttttttttttttatacggagtcttgctctgtcacccagcctggagtgcagtggcgcgatcttggctcgtggcaagctccacctcctgggttcacgccattctcctgcctcagcctcccgagtagctgggactacagcgcccaccaccatgcccggctattttttttgtatttttagtagagacagggtttcaccgtgttagccaggatggtctcgatctcctgaccttgtgatccgcctgcctcagcctcccaaagtgctgggattacaggcataagccaccgcgcccggcctacgcccaatttttatacttttagtagagacagggtttcaccatgttggccagggtgatcttgaactcctgacctcatgattcatccgccttggcctcccaaagttctgggattataggcatgagccactgcacccaacctcatgcccggctaattttctatttttagtagagacagggtttcttcatgttggtcaggctggtctcgaactcccgacctcagttgatctgcccacctcggcctcccaaagtgttgggattacatgcgtgcgccaccgcgcccggcgacttggatttccaaagctgctattccttaaggcctcacattatcccaggttcaaagctgcctgctctagacatcattcctgcctctgccacaaacactacccagacacccccaacccctcagcagcctgggggctgagggcatatatttctcaggtccttgagcctagtaatcttgggctcatggtgtcaggaggatgccaggtcccctcactgatcttgccttccttgctctccacccctgacccctagtaaactgcatggttggttcaggaaggggaagccatgtcatgatcacagcctgctccatctcccccaccccagggcttctttcgccgcacaatccagaagaacctccatcccacctattcctgcaaatatgacagctgctgtgtcattgacaagatcacccgcaatcagtgccagctgtgccgcttcaagaagtgcatcgccgtgggcatggccatggactgtaaggggcccaggtggagggaatagagccaggtggcctggggtggggatgagttctgggagggcagcttccttccagggtaccctcagagcccacagggcagagtggcaatccagtctaggtcagaatgttcagtgtcttggtccttgctgtcctccttcctgcgcaaaaggaaacaggatccctgtgtgggccccaatgcctacctgccttacaacactcgagggccttagagagggagtcgtttggtagaaagagctcctgggcacccactctagcacactgttcttgactcccagcgaaggcaccccacttctagatgagacagggcatcttccattggctggggattgggtggcaggatattcgagtaaccaccgtcaccataatccgttagaccagaacatgatattcatctggatcagcccaaactgttgttgacatggtcccggggattaatcatgatccgggttgtgctgcccaactgctaggtgatttgggaagtcatttagcctccatggccctcggtttctccaacctgtactctaggaagagtagtttccgggagcattatggaaaggggatggagggtgccatgcgttagaccttgtgcctctctgttcacagtggttctagatgactcgaagcgggtggccaagcgtaagctgattgagcagaaccgggagcggcggcggaaggaggagatgatccgatcactgcagcagcgaccagagcccactcctgaagagtgggatctgatccacattgccacagaggcccatcgcagcaccaatgcccagggcagccattggaaacagaggcggaaattcctggtaaggagaaagggggcatggggagagcagtagccaggtggcagggagaagagagtgagctcggagtcttgcctcctccaggaagtcttcttagtgtaatccaacccaaaatacatactcttcacacttttgctgtccagattttatacacttgtgtttgtgtccttgctgtctggactgtctactccatccaactgggagctcaatgaggacagggccttgccttcctcatcgaatttccagggagcgggagcgacctttcttctttttcctgcccttagtgactgggaggagagggtaaggatacagttatgtcacagtatttttgagcacctgctgggtgccaggcattatgttaggccctggtcaagctagttgctaagtaaatgatgagtttgggaccaggtgcagtggctcatgcctgtaatcccagcaatttgtgagaccaaggtgggaggatcgcttgagcccaggagtttgagaccagtctgggtaacatacagagatcccacctctatgaataattttttttttttttgatacggagtctcactctcacccaggctagagtgcagtggcacgatctcggctcaccgcaacctccgcctcctgggttcaagcgattctcccgcctccgtctcccgagtagttgggattacaggcactggccaccatgcctggctaatttttgtgtttttagtagagacagggtttcaccatgttgaccaggctggtctcgaactcctgacctcaagtgatccacccgcctcggcctcccaaagtgctgtgattacaagatgtgagccaccatgcccaccctctatgaataatttttttttttttttgagttggagtttcgctcttgttgtccaggctggagtgcagtggcacagtcttggctcaccgcaacctctacctcccggcttcaagcgattctcctgcctcagcttcccaaatagctgggattacaggcgtgcgccaccacgcccggctaattttgtatttttagtagagacggtgtttctccatgttggtcaggcttgtctgaactcgcaacctcaggtgatctgcctgccttggcctcccaaagtgctgggattacaggtgtgagctactgctcccggcctctctacgaataattttaaaattagctgggcatgggggtgtgtgcctgtggtcccagctactcgggaggctgaggcaggaggatcccctaagcctgggaggtcgaggctgcagtaagccatgattacaccgctgcactccagcccaggcaacagagcaagaccctctctcaaaaaatatgatcagtttgggaggagatggacagttggctatacgtggtgaaggaaggcagaaaaccagcacctggttcatggtggagcatgccggggggtggcacagtgcacactgttaagggcacgggctctgattccaagcagatgtgtaacagtcacgagtcagactgcccaagttcaaaccctggtcctaccacttgctggtcatatgactttaaccttattatttagctgccccatgcctcagtttccacatctgtgaaatggtgattattataattattccttttaggattatggtcaggatgaaataagacatgtaaaacatgtagcctgatgcctgatcatatattaagtattcagtcattatagctgctactactgttactaccgttgttattattagctgacttggagctctggttctggtctattctctgctcaagatgaaggaaaagctttgggcctgggactcaggcacgggcggcccctcttccccaagctgccttggagctccccctggtgggcagggagcctcagtgagaggctgaaaggggtctgcggccccagctgacccccgtctttctctctagcccgatgacattggccagtcacccattgtctccatgccggacggagacaaggtggacctggaagccttcagcgagtttaccaagatcatcaccccggccatcacccgtgtggtggactttgccaaaaaactgcccatgttctccgaggtgagtggcagaagtggggagagatgtgatgctgtgctggagggaaacctgctcccccggtcacccagtacaggctcatctgaggttctctggacaaggagcaattcctgtaggtcaacatacacagataacatacacagacacacacacacacatgcatacacatacacccagcacacaggcacacatgcagacacatacacggacacacacacacacctagcatacagatacgtacacagacacacatacacacacacatacacccagcacacagacacacacacacctagtacacaaacacacacacagatacatagaaacacacacagacatatacacccagcacacagacacacacacacacacagacacacacccagcacacaggcacacacacacacacacctagcacacagccacacagatacatagacacacacacacagatacagacacacacacacacacagacatatacacctagcacacagacacacagatacatagacacacacctagcacacagacacacacacacagacacacccagcacacaggcacacacacacacacacacctagcagacacacacatagatacatacagacacacacacaaacacacaggcacacacacacagcatacagacacacgccaaggtctggctgctctaagaaatcagccggctccaagtgctcccctccacagcccctcatccttcaagtctatgcggccacccaactccaggcagcctgaaagttctcattttccagagcactagtgctggagacaggctgccctactagccatgtgacctggggtaagttacctccatcccctgtgcctcagtgttcccatctggagtgggctggggataatgatgggtgctaactcacaggcataatttttttttcttttttgagacagattttcgttctgtcacccaggctggagtgcagtgacgcgatctgggctcactgcaacctccgcctcctgagttcaagcaattctcctgccttagcctcctgagtagctgggactacaggcatgtgccaccacgcccaactaattttgtatttttagtagagatgggtttcaccatgtatgttggccaggctggtctcgaactcctgacctcaagtgatccacccgccttggcctcccatagtgctggcattatagtcgtgagccactgcgccgggcctcacaggcataactgtgaggcttaaatggaatagggcatgcacatggcccaatacaaggtcagccgttcagagtccatgggggccttgcgggcctcacggctcccgtaggacactctaggggagactcaaggacgcggggaggggtatgctgagtgctcctgtggccctgccgctccacagctgccttgcgaagaccagatcatcctcctgaaggggtgctgcatggagatcatgtccctgcgggcggctgtccgctacgaccctgagagcgacaccctgacgctgagtggggagatggctgtcaagcgggagcagctcaagaatggcggcctgggcgtagtctccgacgccatctttgaactgggcaagtcactctctgcctttaacctggatgacacggaagtggctctgctgcaggctgtgctgctaatgtcaacaggtacctgctgattagtcgggagggctcagaagcttccaggggtcccagagattggctggaccctgggcctgttgctcaactccctcctgaatcttcttctgggctacctctctgtcacctgggccatcccctatcccctgttccttgctctgtcacacacttctcactcgttccccaggcccatcccttgcctccccatccctgctctgtgccttttcctgtctttgtctccttccttctcgctgccctgtccctctgtcactcacattcccctttgttccccactccccactttgttctcagccaccttccatcccctcatccctcctctgtctcccagtcccatctcttacccctcagtcccctccctaaccccatctgcaccccgcctctctgaccaccaacctcagtcctccccactccaaggctcctctctctcccccagcccccggcctgtccctctgtcctccttgcattgccccctccccccagtacccccctgcccctctccacttcccagctgcctccctctccctgtgcttctcctgtccacgtctctcagggggagcttctcccctcccctcccccagcctctctgcctctatctcccctctagtcctttcttcccacgtccccacacctcaccctccccatctccaggccttcggccagcccctcgcccctcacgcccctcttccctcacagaccgctcgggcctgctgtgtgtggacaagatcgagaagagtcaggaggcgtacctgctggcgttcgagcactacgtcaaccaccgcaaacacaacattccgcacttctggcccaagctgctgatgaaggtgactgacctccgcatgatcggggcctgccacgccagccgcttcctccacatgaaagtcgagtgccccaccgaactcttccccccactcttcctcgaggtctttgaggatcaggaagtctaaagcctcaggcggccagagggtgtgcggagctggtggggaggagcctggagagaaggggcagagctgggggctgagggagacccccccacaccccttctctccttcctctcgtccttggatagattcagctcccacacacacacccgcactgcccaggtccctcctcagacctccagccctgggacagggcaaacaactgaacttgctatggaaaggacagtgtgggaggctgggggagctgtgtcctgcagttcccaggaccccatcctctcagaaggtaggggaagggcgggaggattgagaagggacaagccaccttgaccgtaggggaaggaggaatgtgggctgggggaagatgccctcaactcaccccctacacacacatgagagagagcccccacccagttccttggcctaggtctcccctccaggctgagggcctctctacttccccagatgcctgggtgcaaagaacggcttggcttggctcctcctctggaggttaaaatttatagtcattctaactgcactttggaaaccaagcaaggggagaagacaaatgaagaaaaactagacagagagaaaaatacaaaaaagagagagcgagcgatagagagagatgatattaagttattaactgaggctgaccagaggggaggaccccccctttaccaccccatgcactttgcgagctgccccttcttcccccacatcagagagaaatgcccccacaccagagccccaagggtagggctgccgatcagagctgtgagttaacacaacagggtcctggccaccccccttgccataccccgccctctgtgcccctttggcaccccccaaccctagtatgtcctctgctttctgccactcgtgcccgctgagttccatctacctctcatgctggatgccagctggcccctcaccagcctgccctgctgcccacacagctcccctttaagtgcccagccctaggggcctctccccatccacctcctccttccacaccttggcacccacccaggaaaaaactgtggctccaactcctaccctccttatatcctgcagtattagctagaaaccggatgctgctgcattggttgggtcgggggtaggagggctgtgcgtgagcgtctcccagaaccctccacccctttagcactctgtttccctgtttcccatctgtcttctgggctctctctaacctctgccctcctccccagctcctactcactgcactaactctgggcgggcaggtaccagaatgggggtgtttagataagtgacacttagttggggccccaggggaggggtggtcggtgctcctttttctttaaagctcttttggccagctgcccctctgccccgggaccccttcccctcttcttttctctaattcagggactttggcttgagcccctctcgccctcctggtgagggtgctctgttggtctgcacttgggtgagctgtcctcctccccctccctgtggctgccgcccactcctcaggggagagagggagagaggaggtggtcctcccatgggagcaggaggtggggtgggacagagcagaccagagggtgctgggctcagggctgcatgtcggcagggatggatgggtggacacagatgcccccggaagccatggggattggggcagggggtggggggaggggtgccagggcttcctgcgctttgcactattggggcaaaaatgtcttaagcagtggggaacctgccaccccaccctgaccctcagcctgccacagccccctacacacacacacacacacacacacacacacacacacacacggacatgcacacacggacatgggaaggcaatgctatgctgcccgtcagggcactgtccttccccaatcgttcaggtgttccaacaggggtggagggcctggaggagcacccgctgtcacctgtgcatgtgcctgtcccaccctgctggggcctcgggctgcccgcgctgtctttgtctctatcctctctctctctcctggagtactgaatcctgtattactccagtcccatgggtaggccctcttgtaccttcctaccacgcctgggggcccagtggaattcctgacctgtctgctgtcttccccatccctccatccccaccccaacccctccatccccattctcagccatggacacggcagagaaaaggccttgaagagccttagcctcttataggcacttgggactcccccaccctccccaatcatatgagctgtgatcccatcctccccggacccctcccttccccctcggtgatgtggggtgtatgtgtgcgttcctctgcgtgaatgtgtgagtgagtacacatggtaggggaggagccagggcgactcaggagtgccacgcacctgctctagagcggcagctgtcccagtccctgctgtggaagtgggggacagggccctctcctgggggccattggtgctaatgagggggatggccttgatgtgggtgctcagcatgcctcccccagtattggcccggggcactagggcaggcagggtggagcagcaggtgcagtatcggtgggaggacgggttgctgggaataggacgagggggccaggccaggacaaggggttgccagagccatgaccactaccccgcccccaccacccgcctctccatctcagtattgcccctcccatcactcataacacacatacctcatccagcctcctccctgctcagacttggggagggtgggggaggagcccctaccccttctcctggtggcgggtctgcagggctgggagagggcagggcgttgtgagagagagaccgtccataaggaggacagtaactcctgccctgggaactcctgggcgggggggagggggacactgcccagaggcgctactgaatgtatgagaagctggtgctgggctggggggaggggggttgtggccagaaacagggaaggaggtaggtctcttccccagggaggggtgggaccggcaggggtgacttgaggggctcctactcctgccccacgttgacaatcagtatgtctgttatgtgcgatttttcaccccgttgtgttttgggtcaggattttaaagaaagatatttttatggtaattgttgctcgtctattttactatatatttatgtaataaatatatgatgaaaataacccccttgggcaccccccttagacttgtgtgctgtttccctatatcctcccatctgctggcagagtacccaccccacaaactgaccagatggagaggtggccccccccagccttggcagtatttccaccccaccccccaaacgagcacacaccacagaagccagctcagctgtgaactattggatttgagacaggaacagaacaaatcagagggccaggggagggttgtgggggagacagagtggtttaaataggggaggaggggaagttcggtgatgggggagggaggcaggtatttacaagaaggctcagggggccagaggctcatcttggaatattttataacaatataaataagattctggtttgcttttccttttcgtctcgtaaaggagagagaagtgcagagttcgattctgtacaagggggcagcggcagaaggccggccgggcgggtcactgggcgtccacccggaaggacagcagcttctcggaatgcatgttgttcagggtccgcaggtccggcagcttgagcagcagcttggtgaagcgggaagtctccaagggccggttcttcagcaccagagcccgaagagcccgcagcagcgtctcctggagctgctccaccgaagcggaattctccatgcccgagcggtctgtggggaagacgacagcagtgaggcggactccccgagctcctctgaggaggaaccggaggtctgcgaggacctggcaggcaatgcagcctctccctgaagccccccagaaggccgatggggaaggagaaggagtgccataccttctcccaggcctctgccccaagagcaggaggtgcctgaaagctgggagcgtgggctcagcagggctggtcacctcccatcccgtaagaccaccttcccttcctcagcaggccaaacatggccagactcccttgctttttgctgtgtagttccctctgcctgggatgcccttccccctttctctgcctggcaacatcttacttgtcctttgaggccccaactcaagtgtcacctccttccccagctcccccaggcagaaatagttgtctgtgcttccttggttcatgcttctactgtgacacttatctcactgttttataattagtcgggcatgagtctgtttcccaagctagactgtgtctgaatcatgtctgtatccccagtgcccggtgcagggcctggcatagagtaggtactccataaaaggtgtgttgaattgaactgcgtctgcctcctcccccgggtcaggcgagagcctgacctacctgcagagacaagcaccaccgcggtgaagaggcccagctcctcctcggtaagcgccagggagttgagcttctcgctgaagtcgaacatggcactgagcaggtctcccatgcccatggcaccaagctcctgcaggctgtaggtggtgcggcttaggaacatcactgtctggtccttcacgttgaacaacgaagcaaagcgcaccatcagcacctaggagggaaggggaacagtcatcctgggtgtggtgggaggagcactgaccaaatcgcccctgtagtttgccagagggtttagcggtgctgccttcgatttctcagtagagtgggggttgtttctgaatggccaatgagggagcccaggtggaaggatggctttgggatccaataagcctgaatctgagtgtcagctttgtcactacctgtgaccttgggcaaggcattcaccaaagttaatctgctcttgtctagaatgggggcagcagtgcacccaaggcattatttcagtgtaatgggttgtgattaaattccagctgagatgacagaagtcccagccatcaagaggaagcagcaggagccgctcagcccctttcaccaatcaggctataaggacaaagatactgggttccaaaacctttcagaggtcctgcccaccccagacagcagggctttctgttggatccttcccaaggtcaaaagcaggaagcgtctgggtgcaatggctcacgcctgtaatcccaatactttgggagtccaaggcgggcagatcacctggggtcaggagtttgagaccagcctggccaacatggcgaaaccctgtctctaataaaaatataaaaattagccaagcgtggtggcgggaacctgtaatcccagctacttggaaggctgaggtaggagaattgcttgaacccaggaggtggaggttgcagtgagtggagatcgcaccattgcactccagcctgggcgacaagcgaaactctgtctcaaaaaaaacaaaaaccagaagcataaacggtcactcacctcaaaggtgccagccttaagcagggtgacttggtcatgctgagaaaggtcacggaagcccgggatgtgtttggcaaactctaccacctcccgcacagcgggcgtgaagctcatggagaaatcctcccagatctcctgcaccgttcgcccactgcgtccatgcgggtacatgttcataggacatgcctgggggaggaaaagattgaaggaggggagtgtcagccaggctgggtcagatggacgccccgagcagagctggaccccagattctgcctgggctaggggctgtggccctgaaggatgggtctttcagataaagtagcaattaggtgccaggtggagattagggattcccaggcagagtccagactgcaaggcaagacattttctcctgggaagatgctatccccacactcagcctccaggaaccccc

SEQ ID NO: 618 - DNA, 380808 bp, Homo sapiens
  source 1..380808: mol_type = genomic DNA
tctcctcagggcccagggccacttgtttcaccccacttgccacctgatctgccaaccagtaaaggtggggtatgcccatctgtggaagtagagaccaagtttccccatgtgcgggattgctttagctcctgaagtgtgaagcaccacgggacctgctctttggccaggtacatataacctagacatggagggaagttagccctatttttgataatgtgagagccagtagataaattctttctttctttctttattttttttttttggagatggagtcttgctctgtcgcccaggctggagtgcagtggcatgatctcggctcactgcaacctccacctcctgggttcaagctattctcctgcctcagcctcccgtgtggctgggattacaggtgcgcaccaccatgcctggctaattttttcttgtatttttagtagagacagggtttcaccatattggtcaggctggtctcgaactcttgaccttgtgatccacccgccttggcctcccaaagtgctggggttacaagcgtgagccactgcaccagatcactttagttcatatggccccttagaagatggtcttacacaattgagtactcagttgtgtttgtttggtactaagtgtggccaacttagcaaagcactttatatttattctcttttcttctatgcctcattcacttttgcctccactccttccttgggtgctataatgcctaataaaattgcagcatgaactttgctttctggggaacctaggctaaggcaattctcttctcattttaatatagcctccaggcaatatcactgtatagatacagacttcatttatgatttcatcagtgtatggtgtaggtagattgtctttaaagagtataacatggcacttttcatcaagtagtcagtgaattctcttgagatacatgctcaaatggtatctgtaacattctgcatttcagtagttctactaagttttgctttggtttagacaccatttaatgtgtcagaatttgtgtacataaacctgatgacaattccccttatttacaaagctatggtgccctgagtgtctaaacataaaaaccagagtgagctgtcatcttgagggtggagaagcaaaccaactttgtcctctggcttctcttcatagattattagacttttccaggtttgtgacatgacaacagcttctggctttgcctgtgtaaaggggttaagaattgtacctagctggaatatatatgttccagctctccacaataaatgaatccagtaatttcttggaggagggaaatatgttcattaggaggaagttgggaggtacataatgtagacaagagataaatatataaaggttaatcttagtcatttgaatatagagtggaaaaactcagaaaatagtactctgaactgatctagcctagggaaataatgatgcttgccccatcttacctgaactggtgttttcacgaaccaggaagaatgcgatcaaacactttctttggaaggtgtttatttggttcatgtcctggccaaataaaaacttggagatgagcttcctctgtgtgaaggagaaccgcttgctgtactgaaatgggatgttgttttagatttacctttggtgtgggcactggttgcttttgcttgcccaccattctcttccacttatagcagcaagacttagaattttctttcaggaatcatcttgcctcaactctcagtccatagtttagatgaagctgactgtccctctttcccctcacccagttccaggattcctgaggataaggttggttatgcatctgttttcctcaccacagtgattggctcaggaatgggcacatgactgaacttgggccagtgagaattaggccagaattttcattagaattgttggagaaaagaaattctcctttcactatatttggagctgtaaagctcatcctggagctattggaggccaccgtaaggtgaaaggccatgtgaatgttaagtctacatgaatgacaaaaaaaggagcttcctgagaatactgagtaagtgcacccagatccagccatgcctgaagctttggtatgcaataccctagatcccagatattaaagtcaataattagctttctgcttaagccagtttgagttagctttttgttacttgtcatagaaagaatctcaattaacatgtgttcagggcaacagagattgagatatatgttggcagctgatgttaacataattccattagtaatattcctgaataatttgagatgagaagatgaatgttgtccttgagctgcaaaacttcacctctctcctcccttcatctttgtggccccttccaaagaggtaaccccccatcagcattttacttagtttcttctctccctccatagtttcttctcaagtaaatttgcttattctagtagatgtttatttatgaaataaatgtccttacatccgtggttccgtcttttggcagcagctgaagtgagaagagcaggcaactctttgcctatgtagaaaataataatatttaaagaaagagacaggaaaatatatctgttataagctttttcttttttagaatttaagcttatgagtttatctacgcccactatattcataattacagttttatatctgcatacaaaagctatgtaaaaatccatttttcccaaatatacaaattttttttggatagtttaaaacattttgatcacagatttcaacagagttttaggctgaaaaaaatatcaccatctagcaatatcacttaacactgtttgcaaaacacaaatcttccaatgactgtaaatctttttctattctgtagtatttttctgattctcagggcatgaaaacattatgggaaaaaaaaggattttctacgaagaaagcatggagaactaatttggctctatggtcaaattaaaaatgccaagttaataagggagaaccaaaagaaagaagtggcataatgtcacatcagctcattcatgccctgataatttctgtatcaacaatacatatgtaaagtgtctccttttgtcttacattgtgctccataatttacatgagtattatctgcatcctgaggaggacagatttatatttgattgtcttgtgcatagggtgggtcagctttaactgtgcaacagaaagccacaaacagcgttttacctgcacaatattgctcttgaaggcggcattaattaatgtggaaacacactataaatgcacacttttcgcatttgcaaacatttatacagcacagtaaaaattctgtgataaggccaaaccttttttcccccagtctggttttttttttttttttttttttttttttttgagtgtgtttttaatgcattttttttaaagattaaagtaaaatgtctcaattgtaaaaaatacacaccgggcaaatccttacctggataataaatatctacatcacagtacaataaaatttcttctctataaaatttaaatatggattatagtctatcactatcaaaagaaacactatgctaatatttccatattattaaaataacaggaaaaattacgagcttattttagaacctgatgccatagccgttggaaagggcaaagagattcaaatgtcgatcatcactctccatttgaggaggaactgtggcttggttattcacttaaattcagttcatgaaaaaggtttagccttacaaatgctggctacatttcaaaaactgtaagactgatttcataatttatgactcatgcagcaaaaggtcaatatgacacgaataggttagagttccatagaataaaaaggtatcactgacaatgacatgcttcaagggtgctcagcggttccttggaggctgagtctgtggggggcttagtgtcgaggaggggccagggcttgtacccctgttcatggaggagcaacaagaacggcgttgctggcacagagcgaaggcctggcagtccaccccaggcctgcactgcacactgaagagctgtcgcccggggcacaggtgaggggcttcgctgggctgaggcatcaacaggtcaagcgcgtcattgaggaccgaggctctagaaaaagctctgaggcggcacgtggtgttttgagcagaatcataaagaagaaaacatcttacttttttcattgtttctggaaatactgcacgtctaaattgagcaaagtacacttgagggtcacacacgcacgcgcatacactcacacgcacacacgccccacaccgctcatccctaaaagggaagtgatttataaatacaaatcccagcataatgggtgtgttctcctctactgagacgtctccctgccgagggggtgggagcgcaggtgtgaagggtatctccatcaggtccacactggatttgcaagtctggacaatagatgaaaaaatgtttagaaaaatctagagcaaatccctcacaaatgagttttatgagatggagtcttgagatgcactaagtacctctgtcagcttcagaaggaaggagtttagtttcagagtcattatcttttgagtcctatggcctttcctttcaacctgaaggtgggctaaggcttgtcctactccgcatgaagtattcagccttcaacgagatttccagaccagcagtttgcctattgaaggcaatcaatcatttaaggtgccaaggatcaaacgttcctttacttgcggctggctggatggctgtttatatgccatactatttggccaattctcgatcatggttagtccccaaagcattctgatttagcttgagatcaggctctgaacttatattcaaatctgggtgtctgatgtactgaggaccctgtcaaacaaaatgaggaaactttccccagaaggcctgacgctgcaggaccctgcctgcttgccttcctctcattccctttggaaagaaagcttgccccagacagcagagcttctcagggttaccctggagcacagaggtggctaagtgtttgtcttccaaagagcggttggttcctcaaggagtcaagagaggaagctgaaatattagcagagcaagcaattaaggagcctggccagaggctgcctagacaaaaccaaaccccaaaacaatctgtctgtagataaagcaggtaatctgccaatgaatttcgtgcttataattgtaaatcttttcacttcctttctctgggtaacaagttccatagcaatgttcttgtttcctttttcccagaagccagtacaattgctttcatgcattgaatatttaattccccgctcccagataatttccaatcatacttggaattttcagtgctgttcctcttctttttccaaggcctctaaatggttgactagtattgtgtcaaattattatttcgagccaataacaaatttacgttccttaactgttaagtgggccatacttcttgtctaataaagttaggaatttaagtgttaaaaaaaaataattaaaggaaccagattttttttttccccttgaaattcagacaatattaagggcaggaagggttttagagatcatgacttattcaccaggtaagaaaaccaagacctagaattacaaatctaccagttgacagagcacgaactagaactcaggcacccagacttctgggccagttatgctccaccaaacttacaaaaagcatctacttggtttccatagtgactttccttcctttgtttttaggtaaatctcactgatatggcttattttccccaatatttccaggataaggcagtaaaaggtaggcaaaggaatagtttatatctactatgccagtggagaatgagatacattcaattgcatgggtacattctatgcccattttctgacgctgaagagatgaagtgtcactgtttgttttctgggcacaagctattctagcatgggccgttggggaggcaggttgggcaggaaagttaagtgtgcacatggtctgcaggtgttttctattgagtatctgtcagggtatgctatgagagggacaggagggtcagtggcagggccagtctctgtttagagatagtcaagctatttagttcctcagagtcagagggaaaaaggggactaggagacatttgtcaatgaggcaaggagcttgaggatctaaccaggaggaagcgtcctccagccatcaggacacaaaggggccctcagaacactgcatttccttcaactcagaatgtagctgcactaatctcgcctcagcatttctccagaagaagactgaagtttcaccgtatctttccttgattagaatatttgatccatagagaaatctgttgtcagctcagcaaagatacaacctggataaagaacttcaggagcttgggagatgacagatcagatgccacagaaaaggggtgccaccctgtaaataggtttgatttctgtaaaagtgttctctgagcctaaatgggaaagaagccttcctactgtgaggtaatactatgtgaatttttggaaaccatgcagtcactgacattggtgaagatttctaatttctctgggctcactgaaaaaaaatattttccttgttggcctccatcagtcaatacctgcacatccttgagtcacacctttgtataacttgaattaaaccataacgttataaaaatgatattggaagggcagctgatttttttaggacacaaatattcctgtacattccaagttatgctcctaggagaccataaagagtgctgcaaacagcatgctcttgaatagatgaaaatttgttcgagtctttccctaaaaggctgaaagccacatctaactaaaggtggtctgtgctctgttaacttcagccctgcgaacatcaggattgggtggaggtggtcgtattatcttggttttaaggcttctttagtgtcctgtggcgccattttgctgactcaagtcttggaccagggacgggtgggagctggtgatgcttggtgctggtgagttaatgattgtcccccaccccacctccacaaccataaaaccttcagagcattcacatcacaggaccggagaacgaaatgcaatagtttcaagtacccgcattcaaggggcaatttcatccatgtctatgccaaggactacttcccttttccctcccaaataatccctcccaacacaaagaaacaaacaaaaaagagctaggcaatggaatgaaatgacacccagtagtgctgtaggaattatgagaatgaatccagtcagtctaatcctcgaacacttccaagaacaaaggggggaagagttctgtggggcattccaccttcatgtgcaggaagcggctggcatggcaggctcctatcatccgcagatctgtcaccttcatcaggagttttggccaaaagtgtgtcacgtggtgttttcggtaattgatatagtgttcaaaggccagcaggaaactatcttggtacttttctattctctcaacacaggcaagccccgggcgatctgcggggaagagagaagatggacattgattcagagatggaagggggaaggcttgctttgtccaattccaggcctttattggggggcgggcagatctagggtcttccctcttagccatgagcatggatgcagcgtgaactctggtgctccagggaccaggtaccaggggagtggcatcatttatatgaagagaggcagtactttgttcagataaatatctctgtttagacagtttagcttgagtgtgaattaccttcttgagtgtgaaaggtgatgcctccctcctagggtacagaaggagaagcctgacatagctgaaatattctgcaagatgaggggaacaattttgaattttcactggctgcctggcagagaggagaggatgagcgtggacatgcatagaagggggagatatatgaagggactggggacattgcagcaggcctgaggccaaaggaggaacgcggaatagtaagacatttccttgaggaccaagaaacaccatgtttaattttgtgttgtcttccaggctgcaatgaactggcctttcccttcccttatgcctttagtaaaattgctaccagtagcagccttgtattagtcatgattttggaattgaaatgaaaaggggaggggagctgtgccagagtcaccccatgcagagaagagaacagctatagtgggagctggagtgagaagacaccgggaccctggaaagcccagcaaatcttcccaagtcctgtgcagactactgggcttcccatagtatgtgggagaggctcaagtcagtttccaaaagtggcaaacaaaggggtgacacaaggaggctgggcaactggggaatagttgggctgcagacacttggctgacaaaaataatctataaacccggatgaattcctcaaatagctccaggaggcccaacgtgcccctgctaagttctcttcagtttgttctttgtggctctgatcaaatgaattcacacttcaaaggtccaattattgaggtgtctgtatcaataggaatcgaaacagggttctgcttcattggaaaggaaggatcagggctaatgtctcaattcacccttctgagtctaaacaaactaacaaaccatatgggcttttggaatcccctatttagcacaaatggcaattcgtgcatttttatcttgtgttttccttcatatttgatgaagctgctctgcagatttgctggttctccctctctccctttcccctatcttctctctttctttgagtgtgcaagaattttccacaggatcctttaatttttgacccaaatagaagatcaacatattattgctttggatgtgttctttcaaagggaaaaatataatgtgggttttgtggcatcaaagagataaagacgagatggccacgtaaatgacatagcgagtacaaattgacattttgatgatgcttgaatcacactgaacaggtttatgaagagagaaacattttaaagactgaagaccattttaactccttaagacaaaagttcttaaagaaatgtctttcagatcattttcattttttctctttgcactgtgggaccaaggaacttagaagtagtggctcttggaaaagtctttgaagaaaaagtctaagatattgtgtaaccgaaatggcacacaaaacatggggcttagaacatcaggccccatgatagaactggagacttggggccctgacacgcagctatcatttgccaaatgcacaatgtcttgtaatatttttctggtcctggcagtattaatgaagagggtccacatcactggggagggtggattgtgaaaagttattaagttgtcctgtagctgtcaggcagtgtcagcctcacaacatgagagaactgggaagaatcattcagtttggtgtttgatagtgtttggcatcacattcacagtttttgtcatctccacctacttttccttttatctaccttacttagattatttgcttaataatctgttaaactgacccactacagaggaaacatcttattattcagtaataaaaatccatttgacataaatcagaagataaccacaaaaatagatgcatggcaaaagcctttgttactttggagctgaaggttctggctgaacattgctcctgagatccactctctctttgttaaaaaagaaggtaagtgtcaagagaggtgttaaaggcagactagcaccacaccgaatctctctccttgccttatttggaaggagatataaccaggaagaaaaccgtcagagaaacagctttctcgtggtgtgattcaacattatttaaaactgtctttgtacctctaaaatctcagctaaaaaaattaccatgagtccctccagaaatataattcccgtgtatgtagcttaatttcttcattttaaaggtcactgaagtccagagaagctaggggtcacccaaagtcacacaaggagtccttggataagctataaattttatttctttgagactaattctcctgaacgactgtgggccccatttcttgctggctgtcactggagaccaccctcagccctagaggtcatctatagctcctgtcatgggaactttccccacatggcggtttacttcatgaagctggcacggagagtccctagagcaagtctgccagcaagagggaatcttagattatgtaatgtaatcacaaggggtgacatcaaatttgccatattctcttggctagaagcaaggtacaggtcctgcacacactgaaggacaggagattatccaaggtgtgaacattaggaggtggtggggagtgtaggaggccggtctggagtctgggtgccacagtgtacatgggagttcattatgctattctatctgcttacccttgaaattttccataataaaaagaattatttctttctttttttaaaagtctgccatatctaaatttcctatagtaaatacatttctagattagctttaaaaaaagaattctaggccaggcgtggtggctcatgcctataatcccagcactttaggaggctgaggtgagaagatcacttgagcccaggagttcaagaccagactgggcaacatagtgagacctgtttctctctacaaaacaataaaaaattagccaggggtggtggcgtgtgcttggagaggctgaggcaggagaatctcctaagcccagcaggtcaagcctgcgatgagctgtctttacaccactgcactccagcctgggcaacagagcaagaccgtgtctcaggttaaaaaaaaaaaatttcctactgagttaaccaggaagcagcaactctacaaagaattctcgatgtacttgtgaccgatattttatccacatattcagccatttatccaataagcatttcttgaattctattgcacactggcctaggtgctggatgtacagttagacacatctatgtcctcaaaaaaaagaagtccacagggacttacgtggacaagtgaagcaggtagttacagtgcagagtgacaagtgccaaagcacatctacacttgggtgccctgaaaatgcagaggactctgaaaccacttctatttaaaattatcttccctgaaagggtttgatgtgtagtggcttacagacggctgcccattctgtgctatcctcccatctacagggggaccgttgagtcctggctggcactcagacttgtttgggccaatccagtgtggatgaagggatcctgtgtgatttgagactgggcctcatgggatctgcaacttctgttttcgtgtgcttgggactctttctcttggaaatcaacagccaagtaagaagtctaccctgccggaggaaaggccgcatagagggaggcctgaaccagtgtttgatgtcccagctgaactccagccatcttggatgtttaagccactaagttttgggtcggtgtgctatttagcaacagataactaaaacttcagttgtagctaagccatgaacaaattctagcctgcatccgcggtttccacacacagaacttaacacacaatcgtgtggtcactcacatccatatctggcataccccaaaccagaaggaggcaggtttggccaaagactacgaagagggctgcacagtatccaccaaaggcggatcacttcgtagagtctttaagatggctcctttggcttctttctatcctgggacactgcaaaaagcatcagacatctgacgccccccctttaagttcccagtccactggcaaacctgcaatttcttactgaagaagagtgagctatgtttctgaagctaaagggggactgaaaactcaagtgattggaattagcgctagacaagcaaaagctctttggatgcccactaacgagtctaggcgtactcacctgaagacatcagcaggacggcctgaaggagggctacttcagtgtcatccaggttgaaagaagacagagacatgcccaggtcaaagatggcgtctgacaccaccccaagacccccatttttcagctggccccgtgtcactgccatttccccattcaaggttaaagtctcactttctgggtcatagcgcacagcagcgcgaagggacatgatctccatgcagcagcctttgaggaggatgatctggtcttcacatggcagctgaaaagaaccagttcatgtcagcaaagaacaaatgcaaaaatgccagtcaggaacaacatacagtatcttaaaagcaataggaataaccttctgtgattaacatttgtcctgcattctttgagcccatggttttcccttccctacttggctgcagactttcgacaaccatttttcatactcaaagttgactgtaatcttcaccaactttaacctcaggagtttgcattgcttttatgacagacacagttctccaactgctattacagtcgtgtgtgaaactgtgctaataacccctcagtttgggggtttgtattataacttcaactgataactgcttgagagcagggtttatgttaaactctccatttttgtttgtttggttttttgtcttgtagcttgaataggtaacagcttaccctactgtttagctggcaactgggcttccttttggtttttgaagcacgtttgctcttgtagcctcttggcacaaagctagagggttgttggcagagatacatgttgcccatgaggcccagagatataagcttcatctaaagtcacccagggacttgaaggcagaggggagagcagaattcagacctcctgactcccaaggttgtgttcttctcagcaccttagacacaggattactcaacacactgggtctttctgccagtgttgcaatctccttttaagctcatttggttaccctgttagttaagatttgtgagaatgtggcaacgttaataataaaaaatacctttgcttataggcaaaataagaattttattttctggaaggggagactatttaattaaatgccattatcaaaggagtttggaaagctattagtaaatgggtgtgtttgatgaattgggcatcatgcccagatttccatgcatcacctcatttaatcttcacagcagtacaatgaagtaaatattctaattccatattacttacagatgtggaaatccaggcactgagagggtaacaagctgggtgggggcgggggtggtcaaatgaatgtttcatgggtgaggctaggatttgaaactggatctgtcagaatccaatgccaagagaagaaggaaacataactcttttttttttttttttttttttttttaccatggatatgactaagtttccataaacaacaaatatgtgagttacacctaatatctgtctcttcattagagcagttacaaattccttttgggaaacgctcttggcaatactcaaccagtccaatttaggttattatataaaagtaatacaactgaattacatctaaaatactgggcattttatgttttttactagctcagcctagtcactttaccatttaatttcaaactgcttggctttttcttcagaataaaagtcattgcatatttgattctggaatccatacatatgaattctctccttccgctcattttttaaaaagcactgtgatttgcttttgtctaggttctgattgttaaacacagattgctgaccccaacctctgagtttctgcatttcccccaagttcccaggtaatgcttatgttgctggttcacagatcccactcttgagaaccactagcatagaacagcaacaagaagttactaatcagatcaaaccatttatttttaaaatgtgtcacaaagtatgcaaactggggcaggccccacttttgaaaccaattctgattatagatgaagtagaaattttcttttccaaatttctagtttaaataccaactgttgaagattagttcaaatttaaataaaagctgaataagtatttgcaaaggatcaccaatggtttaaaaactaggccagatgccttttcctttaagagggatttgtaggatcctggtgagatttgtttcaacacgtgggcaaataatctcttagacacctgccaaaatgctttcattgtgagaacactcaacaagggcctgacaggcagagatgcagggatactcccacaggttcttcctgcttccttaggagagcatcactcaggttgactggcaaagacgacagggccctgcactctaggagtggttttgcatgttgttttggcagctctgccggcgatgattttagatcttgtgaagcccctggtgtcatgccagtcttgtttggtgggttggcgtggatcttagaacaattatcatgaacacagtttgaatagcagatgtgataaactgcctctggcaagagacccctggctctcaagaccacctgagatctccagcccactccatgggtagctcacgaacctatacagttaattcacctcttttgggtttgagagagaatataaaaggctaaaggtcatcaggaggcctcaaagacagaaagtacatgcaaaggtgctttgctgtaaaggtgctcccaccatcccgccaccattgtcttttgtaattggcagaccacacgatatcagggtagaaggagagatggaatcaaaaatgaaacagcttggacttttagggaaacttggatagataagcttgccacaacccatgcttgaaaagttccacgttgacccctcgcccttgccgtggatgaaagtgcgcagtgtgtttgctcctggtggcggagatggctgctgcttctgttttcttccttcaactgaaatatctcttcagtggtttacatgagttttacactggaaaaaaaccatctcaggggctgggggggcggtggcattcaaagggtaccatatgactggcaggctggctagagttgtaggggtgacagactcagtagagttcctcctcagacccaagaactgggggcaaagggacacagccagagagaggaccaagagaggtccaggaaaacaaaaccatcccctcagacaaaagagaacgatgacagccagaactggcaagagtgaggggaaacaagcccttcggtgcagatgtgagagtgcacatactttctcgagggcactctggcaacacatatcaaaagcctgtatatctcggtccttaaattccatgtccaggctttacccttcagacatagtcagtgatgcgggcaggatatagttgccagaacattcacaggagcatatttttattagtgaaaaattggaaatgaactatagatccagtaaaaacagataacagaatttatggtagatgtattctttggaatactatgtggtcattggaaatcattttgtgaaaaaatatgtaaacgctatgtcctcccattgaaggtaaaaagttggtacagtgacaggtgctggtaacgatctgcttcttttggtgccgatcatgtgggtgggttcagtttgtaaaaatttattgagctgcactcttatgacatatccacattctttaataaaaagttaaaaataatttcatacacagtacattgtggtatgcattatattaaatatgttttatacttcatatatatgtatgtatgtgtatatgtgtgtgtgcacacacacaaatatttgaaaaaagactaaaataggtgccaaaatcttgtggtagtgttaccataaatcattacctttattatgttgtataaataaaccttcaatgaatacgtataatttttgtaatatcctctaaaatgttaatagatgtctacttctaaaaaaggcgtcaaaggcatgggaagctccatggccaacacagagatataagtcaaagtcccttcctcagtatctactgacttctttaggggtggggtatgagtcattgctactgcaaggctgtgggtactagcatatcaggtaccctggtgctatagactgaatgtctgtatcccttcaaaatccatatgttgcaacctaatccccagtgtgatggtattgaaggcggggcctttgggaggtgatgaggtcatgagagtggggccctaatgaatgggatttgtgcccttgtaaaagacatcccaaagatctcccttgtcctgtccatcatgaagggacacaatgagaagacagctgtctatgaatcaggaagcaggccctcaccagacagtgaatctgctggtaacttgatcgtgaacgtcccagcctccagaactgtaagacataaacttctattgtttttaagccactcagtctatggtattctgttgcagtggcctgaactaagacacctggcccccaccacagtgaagctggggctaagagggaggcaaacgtgctctctcaggtaggtctaggggcaagatatctgtttcccgaagcccactttcctgtccttctgggtatggcttctgtggaggctcagaaattggcaatgagaagtgtccccataatgtctgaggtctctgtgtccctctgattccagctaggctcccattattgcaaactcaaagacagaagagagctggaagccaaggcagcaggagtcattccaggtgaggaaacttagcttctttttaggtgagaccaggatcacttatcactcagcctgcttacctaagaggctcacagctgtccgtgaccctctctatttggtatctttctgggtcctcttgaaggtatacagagcaagagacaagaatcttacgaaatttttttaaagttttccagaaaacataaccccatttgattaaaaaagaagaaggttagaggcaggatggaaatgtaacagataaaataaaagcagtattagcagttaaactatggaatacttattataacccaggcactgtctaatcactttacaaatatattatcccacttaaaaaacctttcaacagctctaagaggtagacattattgtaatccccattttaaagatgagataagtgaagtttgaagacattgggtaacttgtttaggattcttgcccatgtagctgactgtagagactgtggcatcagccaccacagggcaggcctgataaagttcaagtgtcccaaagggaaagtcgaagaactccggtgggacagctctacagggtgccctgaagatgggacaagcaagagtgagcttataggaaaagacgaaagatttgtggggatattaagagcctggttctatgaggggcatttaacttattcttgaggattaagaaacgaccacacagtcatctcactgggatatgcactgagaagaatacagacctaggctctaaccatgatgtcacatttggataacttaatctctttgatcttgattgtccccgtctgaaaatggggttaatacaagcaaccctgcaaatcggttagaaggattagattgaatgtgggcaaacctgagcacctgagtgtggtaactaggacagcataggtgcagaataaatggaatctattgctatcattatttctcaatgcctggaatcagggggatgaataggatcttgatgggccttacacggacaagctaatgaatgatgactaaatacagaaagtgggaaatccaaatgaaatagaatgcattttcgttttgtactgacgttgctttcatatgattaagtccctactaattaacattaaattgtaaataatacccagtattcctggaaactgatgaaactataattaagaataatgcagaaggaaaaacaacatcctcacctcacaaaacataggcaactttttggcaaaatccaccactctggtaattgctggtgtgatgatttttgtaaaatggctgaaggcttccaagtcaacctttccaccttctggggcattgactattggtgcttgtccaatgtcttctggctaaggaggagaaaaaagaaagatttaaatgaagaagttgaagggagctttatttatcatagttcttatgtggcagaaaatctcttctgaactgatatcctgtacagtttccagttttcacatcatttgttaacaaactgtacagtttacacatctttgagtaaagatatatgttttggccattgctttaataggccctcagtgacaatgtttacaggactgttgctgcagaaagagagagagagagagagagagagagatcagagaaaggacaggaatttgggtcctgcttctgaatgcacaaagggtgtatacttaggtaaggtgacataaattccaggggctctgggatggcattttcagagcactgcacatgctggtgtgtgtctgtgtgtgggaggtgggcacaccgtgggcagtgatagagcagagcgatgggtgggccctagcaaacagcgccctgtggattcttgcttctgacccagctggggcttgaagctcccctctgccctacagactccagtttgaggtggtctcagctgagggttgagggggaagattgctaggctgtctacaggaaacttggcaaactttagggcagagtggtgaatttactagtatttaatgtccctagggcagttctctgctgtttacttgctcaagaacaatccatggccttgttgctcaaagcgtagtgcagcagcctgggtgtcaccaggggacttcttctcaggcccctctccagaccaggtggtacagaatcagcattttagcaagacctccaggtgacttatatgcttcccaacgtccacagtagccatctgactcctgagtttctcattcagtgacctccctgatgtgatctgtgtccatgtgtctcctgctgtcacccagtgcttccttcaggaagagtctgctccacttctcctccttgtctttgtgatgatcataaccaccatttatttgtggcctacaagtgagccagccactttgcacactaccctgtctcaagtagtcctcattcaaatcctgattcgcaggtgagcaaactagggatcagaaaggttaagagcaagctgctgaggccaggcctgcgatctgggtggccctgactccacacagcagtctccccggagctccacacctcctcacccctacttcaaggcttttactccctgtggaccttttgacactaatgaacagtatctctactcctctgaacaccctcctagccagcctctccagctgtctcccagaaagatgtgaatgtgaccaaggagatcacagactcaagccctacccagtggtggccacctttgcctagagccacagtgaatagacaagaacaagaccagttctcttttccgcacccaggggcttggagatgggggtaggaaagggggatgggaatgaggaactgacactgtgagtgagatgagcaaaatagaattcctcacttgcagagcagtgaggacactgccagtggtgagactagcctaacatagtggcccccaaacttcactgtgcgtcagtatcacttgatttctgggccccatccccagtgtatttgattcagcaggtcagggatggagcttgggaatctgcatttctaacaagttcccagggtgtgctgatgaagctgctctgggcccactctttgagaaccactgagttagcagtaaccaagtccagcttagagtaatccagttcccttgcctcctcccgcatatctcctgttactgctcacatcacatttttagcagaagaaaaagcaaaagatgattcttttactcttcttggtgccagagcaccagggtcaacaggagcagcccaggagtcatgcttacagcctcaggggaaggttttaaaaacatattattaatacataacaaatgctggcagcatttaactttttttgaccatccagcattgtcttctgtttattttttactttatttttttgtgtgtgttgctggcagtgagtggatgaaacctggtttctgtcgtgtttcacaatgattgagaatgttttggggcaactgttggcatagcaagcccagggaaggccactgttcggctggctctctgggagcaggcagaattgatgaaataatcacatgtacagcctccttctacttccctctttctcacctagattgtgctaaagtaaaaggtacctgtgttcctcctttggtaatgctgctccctgcagccttcagatatccctgctcttctttataatttcttctcattcctgaaactgaggctcatctcactgaccttgtctacttgacaagtcttttatgaagatcaactgataaaaggaatgtgggcacacattcaaaaaggcagagagtcatatatatatatatatatatatatataatacataaatatatattaattacatatctatataattatatatatgtaggatgaactttttaaaataaaaataaaattaagaagtgtaataacattgttttggcctggctgaatctaaacatctctcaatgaatactgatagagctgatctgatatatttaaatggcactgagtgtcctttgaaatgttggtgggttaatactgatgttaattttttcattcaatttgtgggtgtgtagattatttgaattccacttgtgacatgtgtaaagatttgaaaaaaggagagaaagtatgcaaggaaatatggcaattttaagtaaaactaaacccccaaatgtaacaagctcacaagttttctgatggaaatatatatcaaggtagaataaaaaattcacttttaagcctctggctatttaatggactacaaaattgctagaagtaaaactatgaacaaagtaaaaccctttgattttatcattaagatttttttccataatggatcttagataccagaacaacaaaaaagaatctatctatctgtttgtctatatccatgaattgacccgagttattatcaggttaatcaaggttgagcagtgaaaccctgtttgttacttccctgaagatttttcacctataacaaaaatacataattttctaaaatatttggaagatgttaaaaatagagtataaatatttcacattagttgaacccattagatatcttattatagctaatagcctcgtaaactactatatgaaatacatttgctcatatacacatatgtatttatgtgcccaagatcaagctccaatactgatgataagtctctagcttgcttgtagattcaccactgtagacctgtggggaaagcctgctttttgcctctgtggatccaactgcctgagctagctcatggtggtattttcaactctcattctgatatcctctctttgccctaaatggacttcctgagctagcccagctgtctgctctatgtctcccctacagcttgccttacattttcccatttcactgctgccttctctccagacttttgctttctccaaagcccccacttctgtctctcatctctgtcttttccaaatcctattttctcttcaagacccaactcaagttctatcttctcctagatgttttcccaggtgacctcagtttgaaatgacatttacctcattcaaacacacatggtggcccatgactatgagtcatatggtatttaggcatttattactatcactttttattatagttatgtaagtacacaccaaagatatgaacttaagggggtagagaataagtcttacttgtctttgcctactgtgtacaaggcattgggccaagttgtggaggacagaatgcttattggttgagtgagtgaatgaatgtatacttataccaatatttattgagcaggtactgtgggccaggcctagttttagatgctgaggttacagcaatgaacagtgtatcctcaaggaccttgcattgtagtgaggggagatagacaataaataagaaacatgtattcgtggaagaatttgtgataagtctggaggtgacatgataatacatggggaggcaggagaaaggaaggtcagccaaggcccctttgagaagcaatgtgtggactttgacttgaggaatgtcaaggaagtagctttccttagggccagaggaagaacactcaaggcagagaggaaagccagtgcaaagtcccaaagccagaaaggaggcccgtgtggttagagcccagtgatggcatgaaatgaggaagcagaggtaggcagggggatccgtgatgctaggcattgtagaccatagaaaggagatgggcttattctaaatgcaatggggcatctactgaagggctgtaaacagggcatagacatgacacgatggttactgcatggagaagatatgcggggagtcaaaggaaaaaacaggcaggaaacagctgtggtttgggcaggctgaagtgcactatggggatggcagtagagatggagaggcctagagaattacagttgtatattggcagctgaaaacaagggccaaaaatggactggctgtggggtaaggaatccagaatgacttcttggggtagtgggggtggagggtgcaaaaggagagattcaggtgtgtgttcaggggtgacctcagcccctgctcagcacgggtgaggctggtcttatgcaaatcgtggccaactggctttctgctttgactatttcattagtattgttcaaggtgagtaggaaacgctgccagctgacctctgctgagtccttggctcagagccaaggacttcttggcttgaaaaggtaactctctgacacatgcagaatggagtggggccagatgggactctcacttcttcacttgttcataggatgtcttcttgtacctttgccaggctagacaggaagacctgggcagataataattcaaggtccttgggccatgggatatgactacagcctcacccttttcctgggatgagcaggaataagatggtggcagtgcggggtgtgggggtggtaaggatagtgcatgtagtaaccacttacgtggttgctaacaatatgccaggcagtgttaacccacttgtatctattgctttatgccattcagcaagggcataaggcaactgagcctgaaataacttgcccaaagaagtcacacttaaaaaagcaacaaaggcaagcatggaaccttggctgtctggttccaatctccattcatgtaactactagattatcctgccttcttctgatgttattctaataacttggggtgatagatgccttcctgacgtgattgcacttgtactatgagctatgcacacagaccaaatatggcctcatcactcaccctgtctgacccttctgcttatgccccttgtctgaagctgccccaattgagtgtgtgaaatcagacagtatctctgccagggaaaaagtaggaaaggtctcctctgatcctaaaggtcacattttatacttgggtagacattcacccaaagctacaactttgcatgaaaattaagggagcagaataatgacacaatgtcagcagacaataataaatgatgtcaatagacaagattgttgctgtcaggggctgctactggaggtctagaagcgagctacccttggtggagtgacctgctttcccttgtttggcatcagatgctgcttgttctcttctcagcctgcttctgcttttcatccttactgtcatcacacatgaattgttggtggtgaaattaggcatttctgtagcctcagagatttgagtagattggagaaaactagaaaattatatgatttaaatgcttttgggagaagctttaaagagtggctttagatttattatgaaaatcttaatggcttttgcaaaagttcctcatttgccaaagactctaattttctcagacccaaatatagatttaaaatccagatcaaatcactgtctctgtttctttttctttctttctttctttttcttttctttcttttttttttttgagacatggttttactctgttgtccagtctggagtggagtggcataatcacagctcactgtagccttgacctcctgggcttaagtgatccatctacctcagcctcctgagtagtggggaaccacaggtgagtatcaccaagcctggctaaatttgtttattttttgtagagatggagtctcgctatgtttaccaggctggtctcacacttctgggctcaagcaatccacccaccttggcctcccaaagtgctgaaactgcaggcatgagccactgtggccagccctgtctctatttctgacttgagtgctggtcttaaagtgaaaatgggtcctggtcttagactgaaaactatgtcagtagctccttttagggaataatgcacttacccattccagataaatgaatactttcagctttaatgacaacatgtaatcccatatgacatatttttatactattgttaacatgataggcctcctcaaattcttttttggaacaaaatgggacatcaacacataaaaaataaataacacgtggcagtgttgcaagcacaggaaaaggggtgttagcacacaggagaggcaaattctaatgtgcaaaaaagcctgtttggtacatgatacctttcagtacatgaataccacttagcaaagctgtctttaagtaaagattcttaatgtccttgcaggactaattcactactcaaaagagtgaaattttcatcctgagcataaatactcagttggagtcacgtttctgcaaggagtatatgtaaatatgtaaactggctaagacacagggcttaactgtactatctccaaggatgggtgagtggaactgtatgttcagttcaacaaatatttatcgagttctgttctggttatttattgctgtataacaaactaaccccaaactttgtggtttaaaacaacaatttttaattttctttctgagttctggggattgattggcacagctagggggccctcatacagctgccatcaaatggcagtagaggctggtgtcatgtaaaggcttttttactcatatttctggtccctgggctgcttgggaatctctctttctgtgtggcctttttacatggctagcttgggattcctcactgcctggtggtctcagagtagttggacctttattattattttttattattcttattttttaatatatagtcaactgctatgagagaccaggtggcttccctcccccaaggtacccaagtggaagctgcaaggcttcttatgacccaaccttagaagtaacttaaatatcacttctgccaaaatgcactgtttaaaggcatcagataccagcctagattcaaggggagaggggaacagactctacctctcccagagagagaacgggctgtgtatacagagatgagaaataatttgatggcagccatcttggagaaaagctgccacaagtttccatcacacatagcatagatactcaagtgtggaggctgaatggaacattgttctcctgtgaagagatgcaggggttatcccaggcacagaaggggattggctgacagaaatgaagttcattgtagagacagacaggacagtggaagagtcctgatccttcccaataaccctctagggaaaaatggctcggagaagcagttatttacatttgaatcaagatggacaatttcttgagcagattaaagatctacaaaagatacatttcatgtcagccctacaaggagaataaaactctcttgtgcatgggtaatctcatggttctgacagaagcctaatggcaaatcattctgtgccatagattctttccatagatggtcaggctggtgaactgttaggagcctttaagtgaacagtgcagacctcaagactggttctaatgactagatattgtgaccacacagcacgaagatatttgattatattttgctttatagaggtggtttctctgcttccagacatagcacaacgtcatctcctcagagatgcttcttctgaccaccatgttcacagaaatgaagtctctccccacttccagttcacaaactcttcatcccatcacactgtttattgccttcattgcacttaccactacctgcatttattttgtttgtttatctcttattatctgcctcccactagaggaatgtgcctgacttatttactttctggcacatagtatccactcaataaatgtttcttaaataaaggaacaaatctttaaagtctggaaagaagcaccttatgactacttaaacaagtttagttggactagtatcccttctctatggggagtaaagacaataaaagtataaaattcccgggagaagtccaggatgaacttcaaatcttctaccttacttggaattcagcttggtcacgacttgaaatcaggagacagtgccaggcctggaagtggtttctacaatgtccatttatgggtgacacatttggggaaaggatggatttaagtttgcaattaggtaggactctgtcttgctatgccccaagtgtactgtgttagaatttgtctatcaatccagaattagtgcttttgaattttctggcagatataccagggtggggtgaagatgcaagatcaaggcactgagaggctgctcctccaaagagctgggatctttcagaggctttttgggtttgtgcaggtgccaagattgcatagggtagtggatagagacataaatcccggagctggctgcatccatcaccactgtttaccagttgtgggagctcaggcaagtttcctcaacttctgtgtcttacttctctcttctgtaaaatggagatattaaccacatctacctacaggattggtataggaagttaatgaatgaaaagcacttagaatagtacctggcatatggtaaaggccatctaggtatttgctgacattgctgttagtgaaagccatcaacaaagtgctggcactattgtttcattacaacgaaagtaattgtgtcagtacaggtgaattatgtataagccttttctttccaaaacttcctttaaggttgttgttatgttgttttaagaaaaagatccactatctcattgtaatgttaatgttgaggtacaaggataattataccactatatcttcttgttcagatggggaagtactctaatgtgtcctagggatacaaatgaaaccacagaatatctgttgtcaggtaggtacttgaaaagggttttatatcataaactaagagcagagtcagtctctgagatggtccagcactagtagggcacgtagtctttctaatgaggtgggtggagagcctggacttggaaccagaagaccgagttggttttggtgcctggcttttagcagtgcgatcctgggcaagcggcttaaggccttgggcttggtttgcatgtctgtaaaatggggatagtaattccagcttacctcaaaacactatgaagtctgaataaaaaatgaatgggaagaattttcacaactggtaatttttataagaatattaaacatcaatattgcaagggtctggaaggtcttttttctctacacactcgtgcccaccaaccctatccctactccctcattcccattgcccttcttgagtcaagctcatttaatttaagctaaaaaattttgacttctgttgacataaaaatatacttgaggcctagaggctattataaagggaatatttgggattgagttcagggactaaatatgtatatactgggcatctaaggaaagaaatgggtatagaaagtaaaagatggcagacaaaacattttactaattagttggtctgggagtggtctttctaacagtaaaagcaaactgatataatgtggcctaagaaactgttttagaattcagcaaatcacaaagtagatggtaggagtggcctttattctcacacagacctagactcaaatcctagctttgcaagttactcagcctctcagagctacggtttccctatcagtaaaatgaggcaataacaccagtatcccaaggtgatgaggactgaataaattgaggtagaaaacactggcatataagtgaaactgatctgtgcaaggaagccttaccaggaatttccgtttttgcttccagtggctgccttgggcgttggtcgccacatgggcttcggtgacagttttgatgagctcccattcctcgtctgtgggctctggcttgtgcccgatggacttctgcagctcttcccgccgtcttttctcccggttctcctctatcagcttcctcttggccagcctcttgctgtcatccagcaccactgggagggggagaaagatgagacaaggcacacagatgctcccaagatacacagcaagctgcacttcctggagcctcaggagtgggaccactgatgcacagatggcttactgggtccttcggggtgggtcacactgggacagtttctctcctcaccagcaaactgccattgactagtcttgtccaacatggtctctagagccaaactccccatgaccggccagcttttcaaaacaaagtccccagagaacctagacactgcgcactccaactccacagaaggtggttctaaaacagagtgaagcagagaggtaaaatccatactacccacaagatcacagagaaatctgtccagccagtcatccgaattcactctctgggtttctgtcctccccgcttcccctaaaacggctcttagtaaagagaacttcaggttaaagaaacgttatggaattaaaaaaagaaacgttatggagcagtaagtgggaggctcgtgatccctttttttaagaggaaaaaggaccccaactcttcatggctcccttaagggctaattggaatgtggctgggcctcacctgggcctcaaggtactcactgtacattattctctacctggtccaccctcaagggtggttaaagagtccaggctttggaatctagaaagacttgggtttgaattctgatattattacattctagctgtgtgacctctggcaagttccttaggttctctgagctttcatttcttcctatacaaaatgggctcaataatacccacttcacagagtattcaatgtgataatgcattataagtgctcagtaaatgcagtcctgacttctatcatttgggtgaaaggaaaatcagaagggcaggtaacaagaaacctatatttctgtggtcaatttccaaaaccaaaaccgtttcactagacttggtaactatcaatggaatggaaaggctcaggttttacattgcagagtcatagtattttagaactggaagggaacttagacgtcatctagtcctactctgtcttttcacagaaagaagaagaaattgatccagagaggtcgtgacttgcctaaagtcacagagcaagttaatggcagagccaaggcaagacccaggactcctgactccagttctacgacatcactgtcctagggccatttcttgatgaaggtgtgacctggtaggaaaagaaaaaaagcagacatagcaagagaaggagaaccaaggtgcctagctagtctcccatttaaatattctaatttaaagagaatattaaattccagaccatttagatttgattggattgtcaaagtcatgtgagcgcttacaaatgaggaaaatatgaatgagccctgttaagtcattttggttcagttactaaagggaaaggaggaatggtaataataccctcaaccccttcccaaatgcttccggtgtgccagggactgttgtatttgatgaacattatctaatttaatcttgaaaacaactctacaaggtaggcaatgatttcacagaaggaaaatctcagcttaattccaaaggtcacacagctagtaagtgacagatctgggactcgaacagaagtttttctgattagaaagcctgagctcttagaatccctcacaagcaagtaaagggcactcaaaatttatttccatacagtctagattaacactgagtttttaaacctcatagacactagtatcttaaacttctcaatagaacactgaaatagataatcaataataagtttgtcatagtggcatatctaagtatttggctgtaagtcaatcatattcacatatccctatcaggcatattgttggcaagggctaaaggcctttaagagataaagataaagaaaatactcagccagaggtggggattaacccaggatttccagcctaacactctaacataaccctcttcctttttaaagattctccattccttcttctttaatgggcaaaccagaacatttcacagatttttttttctcagtgaaagaactctatttctcacataaaatgtgagtcatgattacttctttcatcaggaaaaatcctcactgtattttcttttttctttcttcattttttatctttctttttctttttaatttttaactaatagttggaatctctcactgatgtgcaaaaaatttatgccagtagaatcattaatactgatgcctggcaaaagggaggccacacattctgaatgacatgattcttatttttatgattagattaattaaagtgactggtgtaaatccctcgcacagtgtggggagaagagaccccaagggctaatctcgccaccatatgctgtagcactttgaaaactgggtaggacgacttcagctcggaatgtctttattgctaaaaatataacaaacaaccaactgcaggatgactcatgcaatagcactcaactttgcattcttcagaaatttctgaacacgatgttttctgccagcgccccatctccaaaaatgtccataaaataaattcctgtctttgctcttgaaaaaatattaggactagtccctgaggctctaccccatgtgaacactgtgtatagaatgataccttatcaaggtaaatggaccagacctctcatttgtaatctctgtctcaaacagagtgttgctaacaactaggcctgcaaatgtgatagggataatttaactgcatttcctcctccatcatccatactttgacagttaggaggtggtatgacagggtaggatggaacccacccagcaatggctcccacctccctttcagggcaagcctggatgtggggagtgaggggtgtatgcgaaagtaaggtattcccttctctgtcttcttgggttcctgccttcttttctgcccagtcgatctccttgaaccaaactgtttcctaatcaacattccttgaatatgaagcaagtgaagatctacttacaatctgttgccatgccaacatagatgcatttcttaaagcgacattcctggcactgatttcgcgtgactttgtctatgacacattttccttcatatttacaggaataggatggatggagatttttctgaatggttcttctaaagaaaccctatatgaaaaacaaagacccaagacaacagtttcatattttcttgaaatcagtgattctggaattttgtgtccatataactatgagatgaatcgttttggaccttaacctgtttctaggcctctagctccacatattcaaatataagacagttggcccagaaggatctagagagttctaaatctgagctgatgatgccataggactacagagtcaacacctttttttttggtctttattcaaggaaaagaggctagtaggaacatctagcgcttgtttttattttttctaaatattgaatatataagtaaattatactgttctatttcatatactgacataattgtgttgctaaattaagctatgaggagttttgctactttatactgagtaataagagagctccaagaccaagaagaaagtgaaaaaaatgaaaagacatggatacttgcaatactttattaattaaaaatctaataatttagtaattaaacagatgtactagctggcttcctggatttagtttaatacttgtttttgaatcttgagacagccatgatcagctcacttagcctttcaaacaataggactcagggagtagaacgctccaggttttctaccaagtttttccccatagctcattgcattgaggttttccttttataacactctttctttggtatctgtagacatacacctacaggttcaatgattcttcctttcttaaggcatgagagagcacctctgtagcatctggggacactgtttagttctaggtttgggtgacttaggtaatattctcaagaatgtgcaatactagaatttttctggacgtgatcctcaagttgaggcaactgtcatctgtattgtagaagttaataacagcagtgagcacttattgtgagggcacattgctaagtgctgtagaaacattcaatatccttctatcttccctacaatcatgtaaaggaggtgctctaaatatttccatggtagggattaaaaaagtaaacctcagacaggttaaatcgcttgcccaaatcacatggtaagtacatgtgggaacttcaggtaggatggaaaccacccagcaatgacccccacctcccttgcaacccaggagcggcactccacatcttacttgcttaactgcttatatgatgtataatgaagtaaattttactgtattacttgaatgttttagatcaacagattataaacagtcctgccccagccacttaaaaagttcattttaactgttggtaggataacaaggcaaaatgagtgttttaaaatgtaagaaattaaaaaaaattttttttgagacagagtctcgctctgtcacctaggctggggtgcagtggtgcgatcttggctcactacaacctccacctccagggtgcaagtgattctcatatcttagcatccagagtagctgggattacaggcgtgtgctaccacacctggctaatttttgtatttttagtagagacggggttttgccatgttggccaggctggtctcgaactcctggccttcagtgatccgtcctccttggcctcccaaagtgctgggattataggcgtgagccaccacgcctggctaatttttgtatttttagtagagatgcgtttttgccatattggccaggctggtctccaacacctggcctcaagtgatccgtctgcctccgcctcccaaagtgctgggattacaggcatgagccactgttcctggtggcaaaacaagttttgatggatgtcttctgctaaggcctaaaggggtcctctaactttgctagataaatggtgggaaatatcagttgatctagattcagcccaaatttttatgatcccggttaatgttctttggctttgattatatacgtataccctattgcatattcctccttcagacacaaaagctctttcttattatgaaaatgcccgaggtaggattttatattgggcaaagcagaataaaatagaaaaacatcaggaataactgagactaacagacttgattttggggcgtatatgcaaatcccttatcatttccattgttcaagttctaacagaaaactgtcaatattatatttgggttctgtgttcctaagcacttgagtccattaatttcagtgatgttcatacactgttacaagattcactcattcacacgcagggcagttgttggagatgttggcaatgatttcctgggtgtgcagggtgggcaaatcttgccaaagcatgaatgtcagagcatgccatgagagtgaaaaacaagtttccctgcaaacctagcttttctctctgctaccctctgaccaaggagggcaaaggagaactaaagaaacccagagattcctggcaagaagatgtatgtcacagacagggaggggaggggtagggtagcacgcctccttctggaggaaacaataatttcctagaggtagaaataccaaagtccaagacatccagtaagaatgctgacggcttactaggataggaagattgttagtctatctgaagttggggagacccttgtctccctcatactctgatgctgactcatgttcaggggtgggtttagggcaaggagtacattgaccagtaagaccacgctaagcagagaatgaggtgtgacacaccagacactccaaaaagtcactctgttcactttttattgggatgaatgaaataatttatactttgcttatttccacaaaagagttgagatagctagctctactatacactatgccatcttttctgtggcctatctctgatgacttgtcttgggcacttcatggaccaaatccttttaaagatgttggcctttcttttttttgttttttcttgattttcttcttaaaatgttggcctttcttaagctataattaaagcatattttgatgtatgataaggaaccacttcattttaaaaagtaacagaaattaactcttggaagtggacttgaagacatttaaaacagtctacttattttaaaaaaatccttttagagatgagctgacaaaagagatgccctgggcaataaataaggacatatatttcattgatgatttgttggtaagaagaggtcttgcttttataaatcaatatcagacatgtttctttgtattctgagaagaactgtatccattttttagtactttgagatgattcactgatcaatgtgaaaaggagataactcactcttctagttcactattcaggcagctgttgaaaagctttgattctttctctaaaaatagtttgctgtgggacagtatcaatatcctttctacaaaagatgtgtaaaaacttggatatcacaacagacatgacatctccaaaagatttcactcttctcagggtgaaaactggcaaaaaggattctctccatacacattgcaagtatggggtagaaatatttttaaattacaggtttgaataaacgatataggaaacaattaaccctttcatctttcaccactcttaaaaaccgtgtttcacttgaaaaactcgtttgtctttttccaagatgctttgtcattatattaagtgatccgcacaagtaccctgggaaggctcttctctgattttacaatgaaggcaaccctagaaacaggattctgacctgagacaaagtcacagaatctgaaaaaaaatctagattttgctacacgatttcttcttttaagaaaacctcagctgatccaggctccaaacatcctgtgatctagggaaaacaggctagttgatttcttgatcatcctgaagacatatgtgaggcagggatataggttaataggctcaattctctctttgtttaagtcagtcactaataacgtattgtcctctgtaaggcacattcactctttagagtcattttggggaattaagtattaaattgaattccatattaaatggaatcaggatctctctcccagaattcgaaatttcccattatgcgccgatttagaagaatctcagtgctgcaactaaggtagggaaagccttatgaattgggactaatttagagaaaagtctagtttgaattatcgaacttttggaatgagagtaggtacctaaagttatgtagttttattactttcaaatcaagccaataaaactactttcaagagactgtctgcaagtctctaattaataaatagccagaacttacttgtaattagattcattaaattccctaagacattattttcatagatgtaatggcaacctttagcccagtctttgttaaaggactacgaattccagatcaaaggggtctggataaataagaacatgttacaccacattccaaaaagcaagtcttgcaaccttagaaattacccctttccaatggatgtattatctcaacatttttagcagccttctcctaaatgtttcctaatgtcacgtacaaaaacatagggaatttgcatggaaaatcttccactagggaaaaggaaaacaccttaatttgaaactgagctaacatgttgatttgggggctttacgagcaagggtatgaacaaagcggggcagttggagaagcggaagaagagaaaaagaggtaaggtggatgagagaggagggaaggtgaaatgttttatacatttaatacaatttttgctttagggtttacatcttgataatttagttttaaatataagaggtaaaaaagacaaggtatttaacaagtaaacaattttaaaagtccttccctgactttaaatacttctttatttatgaaacattagctgaacagacacgaaatacagcactgggtcaagctttttcctttatggtagatttcattttcaaggctagattgttggaccaaaagatattttccagaaaccttatctgaattttgttgatgaagtcttgtaagtaggccaatttaggttcagtttcaggaagtgaatggactgatcactggtatattcttgtcaagtatttcctgcagataggactgtacagcacaaaattagccgatggatgaccagaatctacttagtcactgcaggctgtgcgaaaagccaacttggataatttcagaacataactgaatctaagtagcctcaaagatattccctattggaacccttgaaaatgagcatattcactcagactaacagcagaaaacagcctgtggtagagtaaactctgtctcctccaacactgtagataaaacaagaagagaaacagtcatttctcgggatgacaacatgttaaaaaggacctatgctttttaaacccaaagtaagagttttattaatttctttttattttattgattctcttcctgttttaaaaacacttgcagaagtaaagaaaccagacattacactcatttagttatttatgatttgggaaaaaaattcagttcttgaacatgtcaaaaatgaagagcacaaccagacacctggatgatcacagaccatggatgttagaatttgattttaatttgaatttaaacttaacattgcattctggaagaggactgggaggggactggagctgggctaagctctgtgcttgtggacccagggcaattaccttgcagccttcacacgtgatacagcggtagtgatacccggtggctttgtcaccacacactacacagagctcgtccttgtctaagtaactggggatgtaccctgtgaaggaaataaaagaaggaatattaaaaaataatatgttaacgtcaaagagacactatagctaaggttgctaggccagagacaaaattggcttgccaggaagaggtaacaacagtaaagacttagtgaaaccaaacggtaagaattttatactcatagagttaacataggcccaggatttcagaatgccttagaaatagctcacacctataatcccagcactttgggaggcccaggcaggtggatcacctggggtcaggagttcaagaccagcctggccaacatggcaaaaccctctctctactaaaaatacaaataattagccgggcatggtgacaggcacctgtaatcccagctactcaggaggctgaggcaagataatcacttgaacccaggaggcagaggttgcagtgagctgagattgtgccactgcactccagcctgggcgacaagagcgaaattctgccaaaaaaaaaaaaagaaagaaagaaagaaagaaagaaagaaagaaagatagctgtgatcacttgctgtgcaggtgggaatggcaggaaggctgtagagccagtgactcaagcagagaggccaggatttgagcactgtgagttctagataacacaatctatttaacaaggcttatttcaaaacctgttttcacaagatttgatccactttggaatcacagtaccatgcaatgaattcagaaaactttatagctggaaaggtcccgggagatgacgaagtccttgtaaggtgaagaaacaggcctgcagaggtttggccttcctcagggtctcactggaaattacaggcaggactaaaaccccagtctcttaatttctagccctccagtgtaatatgctggtctttttctaaaaatggagagttgactttaagtagaatgaattttgccacctaaaaaagttaggtaaacttgtgatattatgatatgcaatccaacaacactggatagtgtgaaatgacagaggttttgtttattaagaaaaaaggaaaatccaactatgataactctcttttttagtggacaatgagtttattagtttaaattccttgactcaggaagctaaaaagcacaaaagcagaagcctcctgtttccctcctgtctttgctccttcagcttcctgtggagaggatgcccagacacaagatgctgattcaggagggcaggttcattctcccctctatcaatggtttaccattgataaattatgtgatatatagaatcacacagcttcacataagaccaaacaatcaaaatgaggcaggattggttgggatgtgaagaaggaagaggctgagaaacaatcctttctccctatcatggtccttatgaagttttttgactcagttcagcaaagtcttctttgttccaataaagattagctaggttgaaatgactgatgccttactgtgtatcttaccgtgacatttcatagaccttttattaaactaggtcactgaagtcttgcttttcagaaaaaaagccattaaggaaacagaatgaaataaatccttttcataatttcttagaaattatgttgctccaactttaatttagaaaaatgttccttcttgggaggcagataattgacttgaaagtgaggtttagtaatgtacaggattatatttttaaatatcacagcttttcttagtttacttttgcatcatgcaaaccatgattcatctgttgagttcactgcaagggtttcaaaactcttgtcagtcatttttaaaaagggaattctgggaaggatctgggcagagaaaaaagggaactagaatgctttgcgcgttcattcagtcatttatctatgaattcagaaaacatttatttagcatctacatgtgcttagcattgttctaggtgctgaaaatacaaaaatgagtaagacatggtttcttcctttgtaaactcataagctgagttctgtttctgtagccttggtcattcttcaatgagaaaaagagaggtgaaaatgaagggaagaacatgaaaagatgctcaacatcattgcagggaaatgcaaatcaaaaccacaatgagataccactttacactcactagtatggttttaacaaaaatgacacagtcacaagtgttggtaaggaggtgtgctcatgtgcttttgtgtgcatataaagacctacttataaaacacaaagtaacttttaaaccacaaagtaactcaattaggaaaacaggcaccttcctggtaaaggcagatggaatatacagacccatactgtcaaaaaagctacatctgaacctcttatacctcgaggttatacacaattaatccaacagaatgaagactttcaagttcttagtatcaagtatggaatgcagagataagggaaaaagaggtacaagtcatttctgtctaatctcaggtatgagaaccaattgtgatacacttgaacactgctgtacttgtgggacatgacttgggaggggtcaaaacaaggtgtccaagaacattaaccagagttgggaagatgcaggtagttccctctcacctcatactaccccagcctgtctcatgagacctgctggctttatcttttggcattggcagccagacactgaagatttattcctacctgtagttcaacaatttatgtagatggtgtttaaggttcttgtggaatccaacaataattcaatcagtgactggaatggactcctttcatttactgactgctaggctgagaggtggtgtgctttactctcttatttctcctagactatcttcttcatgggtggaggtgattaaatgactttagttaaatcatcaaaacttctacagaaacatctacttaagttggtggcagctacttacatgatcatactagtgcaccccaccccttgctttcttttctgtaacatattaactctgaaccatcttatttatccaaaacagtcaccacaggcaatgatacatcaatcattatgcctaagtccattattcttcattaaataacttccatcagggaataatgtcccacacatagtgactaggtaggtgaggattctcttaaggttactgaacatgattgacaacattacatactaaccaattctcctagagaacttaaccatttcttgctgttgtatttcctgttgtattttagtgtctccatcattttcctttgtcatactcaccaaatgagttacacaatggtcagtatgccaaactaaggaaaatgcacatgtatcattagttttgttgccaagagtggacactgatgagtgtcataatgtcagcgttggattctgcctagaaacaaatactacagacacaatcctggaagctacgactgttcatgtcaggaactgcatctgctagttgtcccaggtgactgctaaagaagcctggtcaataaccctccagaaaaaattaaggtccatgacaatatatgatagttcaaaaatgatatatttccctcagctcttgtctgctcagatgtattatttttcagattaatacattatgctgccactttatcaagcatatttttataaaagcaaactccatctgttcaacaaaggacttgagattttttcagttgacatttggcaatgtctggttaattgctaagtattatcttgaatatcttacagttaatgctatttaaaaaatattctctgagcgacttgtcatgtagaaggggaaagttttgtacatttgcactacaaaggatgcaacaggtagtaagcttgccttcttggttgaaaacagattcaatgctttcttccctatgggcaagatcagaaggctggctagtttaattcttttgagtgaattataacagcatctcaggtcctaggaggagaaacactggttcctcttgtcaccttggcagatacatggcccttagggaatagaatataaagcagattaatcttgaaagtagatctaaaatataaggtgctgcctaggagagcagaagtagcagcatgtgagaagagctgagttcagagatcttttccaaactggcaaatcttatcatctgtataagaccacttgcctagcagaaccagtcctggcatcttaagggaggggctgtggtttgcggtagtgggaaatactttgggtagctcagagaagtgaagaagttccatgttgctgattcatcttgtagagctatcaactcagagccagtaggtatctgatcttgggacgggatagaggatgagactgtattttgtcacccttcaggaagctaagtcactagcatgcttagtcactcttctgattttatactgaacctcctcagttcatcctgcagctcagacctgatgatttaagcttgttttccccaccagcaccttccctatgtcatttcttgacaaacttaaaaaccttgaaagggttatcctttagcctttccccaacatacgaatcctgattccttttatatttaattcttggcattaggtaccaagctttatatcatgttaatctttaaccctgtgatagacactatattaaattaaaccatgcattcatccatttgtttatttaacagcatgtatgggtgtactgtgtggaagacacttggtacaaacttgaaacagcattaactttggaggccttcatccattgccctctgcaaattattagcagagctgccccaggggctcccacttcacacaattcacaatctttcctcagaacatccactgttttcccaccctgcctacccctgcttggagtcttggagtctctttctttacactttgccctctggctggctgggccctggtgttgggggacagcagacaatggctcgccaggctttgaacactgaagcactggtgggcggaggaggggcgagcaggaggaccaagtagaggtgtcaatctagaaaaggggatgaggatatgaggccaaaggaccctggattctcatcggaggctttagtgcagaaaaagggacaacatgagttttggatcatttcttctgattcaagaattcctgaaactaagacatatttttaaattacaattttttttaacttttattttttgagacagggactcacttctgtcacccggactggagtgcagtggcatgaccatggctcactggagccttgaactcctgggcccaagcagtcctcccagctcagcttcctgagtagctgggactacaggtgcatggtcaccacacctggctaattttgaagttgtttcgtagagatggggtcttgctatgtttcccaggctggtcttgagctcctggttcaaaccagcctcccgtcttggcctcccagagtgttgggactacaggcatgagccacagtgctcagcctattttttaatttttagggccaggtttgggcatagtatagtttaatgtataagaagtacctagtgaaatgttccttttgccgtccctgtacattcagatccttaatagctgacataacctttcaatctacaattagagggaaaacacttgaagatgcaaaccactaagaaagggaatacgttgatataatgcgtttgagttggaatgttaatcaaaagggcacacattctggcagtctacaacatttggcttgcagagtgtttttaaaaatcgtagcaaatttttaaaactaggaaatttcataaaacatacagaattcttgcttcatgtgaaaaacaggaggaactggcaatactgaacccaaattctcacagtgtaacgatcaactgaactagaaaggtagccctacctcccaagaaacggacatcctttttaggctccacagtcagaacctctcctgattgtgtgcatcagttgctatttatttttgttcttgcattatgccttttcataaataaagaaatatttcacataattctttatctttatcaagagtggaaaaacaaaagtagtttgagaaaaatgataactttttttttttttggggggagggtgggggacgagtttcactcttgttgaccaggctggagtgcaatggcacgatctcggctcgctgcagcttccacctcctgggttcaagtgattctcctgcctcagcctcctgagtcactgggattacaggtgcctgccaccacgcccagctattatttgttatttttagtagagacggggttttgtcatgttggccaggctggtctcgaaatcctgatctcaggtagtctacctgcctcggcctcccaaggtgctgggattataggcgtgagccactgctcccggcctgagaacatatttcttcatggaagtgagaagtattcttatcatatattatgtaagcattatgtgtctttgttgaaaaatttaaattaagcagccattgtaagacagctcttcctctctctctctctctctctctctctctctcgcatacttgggggcattggagttgtagaaccctggtattgatgagatcatttcctgttttaaaagacggcatgaattagaaagcaggaaggcaaagtcatcagaagattaggggagggagcagaaacagtcactagagaagggtgatagttgcctctgattttgctgtgagaagcaatttatagctttgggctcatgcagaggcacccacagttatgtcatatcctgaatccttgagaaaaacaagtgtcatttctttacctgaaaatccattcagaatgggattcaaggttatagctctaaaaatgtgggctagcagcccttcagccttatgttacataaacatacataaaagggaaggagctgttgcatttgtcatcagaacaccgtcactgtcgttatgagctatactgctctccctgcaggtgtatcctgcagtcacatggatgtgcgctttagggagtgcaaaataaaagagattgatgctttcgtagtgcttatgatctagatagatttgatataaataagcaaacatgatgaggggaacccaaatcccaacaatggaaatgagctatgacacatatgtatgtgttatgttgcacgtatatatggttatgtaggttcaggtgtactccattttgacagacgtcaatatatgaacacttaaatatgatatttggaaatggaggagggattttaacattataagaaatcctttatgaaagatcctttacttcagatattctccaagtagtaagttcttcaccattaatgcagtggtcctcgagtggggatgattttgcctcccaggggacatttggcgaagtctggagacatttttggttgccacaactgctgtgtgtgtgtgtgtgtgtgtgtgtgtgtgtgtgtgtgtgtgtttgctactggtgtccagtgggaagagggaccaggaatgatgctaaacgtcctacaatgcacaggacaaccatcacaacaaagaattatatggccccaatgtcaatagtgccaaggttaagaaaccctagtctaatatactttatatataatatattacttttcaaaggtggtttacacaaatgattcagagctattgtataaaacaaaggatatctgcctttgaaggcagggctggttgggagcgggggtgatgagagaatgtgttgctgggtaatagaagaggctggtgggctgtgagctgagttggtgacataaagtgatgcaggctgacagtggcaaggtggcccaccagggtgtggctggcagtgggtgacagctggaagaaagcatactggttcagggatggagactagggtgacagagagaggaacccatggggagactggccaaggtttctggaacagagggtgtgggtaaaagcacaaagccagaatcaaaattgaactcttgagggcagggaagagttggtggaatttgtggtaatggaaaagggccccaaaccttgagacggagccctgtggtggtgcagaggatggggaagaactgcccctgagtggctggaagcagaaggctttaagcaagagagggtgaacctggagggaagaaaggcaggaaaacatggcgggaggtatctgcggataaggaaagcaggtgtgtggggtgactgctcaaaagcacattctgggagtctccaagagagctgaggaaattctctacaacagctggtaccgagggagctgatgagagggaagtaccaaggacagcgcacgggaaggtcagcattcccaatgctctggaaacaggaagaatacagataaccaagtgggcaccggtgaagccaaggacccataagatgatgggatcataaaagctggagcagagtgggtggtagggcgggaagcggcttgacttcaggctgaatgcacttgagtgctgagaaaaaagtgttgtgcttgactatgaaaaagtatccatggaggcatgtgaggtggtggatatgaactccatatgcagaaagtcagcagtctcaccattcctctgtaagcctgccaggcgtctgaatccatttgctcataatgctttggactcctactgttagctttcattgtgagtaagggcaatgcatgctctggatgaggttagggcattcagtgaaatctctgaaggacatgtctttgacgagacagttaattctcaggaaagaaaaggaaagagctcacgcttttgtctgcacttggacttggtttggaaacgattattgctccttactttgctttcatttctgggtgccaagaggcactttcatttaaccttttgtacagtgaatatgttctgtatttttaaaagttgtggtattgttttctggagtggtgttttctctgaacagcatgtgtgtggcagtacctaatttaaaatcctaactttccatcagcgtccttaagttacatacgcattgttgaaaaatctatgattgcattaaccacttaactattacatttaaaagagattatttatttagtactcaacagttcactgggtggactgatcacatctgtgtttaaattaaaaaattcaagtataggggaagaataaggatgggagagagagggagagaaagagaagatagaggaagaaagagatggagggaaagtaggagagagagacagagggagaggaagaaggaaaggaaaggaaagcttgagaaagaaacattccccaatttgctacttaattttcatttcaaatgcctatgtaattgttcacctggagtcaacagagctacagaacacacacacacacacacacacacacacacacacacagacagaattctatctccaagtcagaggaacaatgaaagcagattcagaaagcacagtcctgtgtggagtttctgcttcagttattaatttttattcctgcacaattaaaaatgtggttgtagagcaacaacatatacaatcagaaccaaaactgaataggacaaccctcccccacccccacccccacccccatctcctcgatcctggcttaaaaacaggaaattcttattctcttggacatgataagcatctctgacaacttttcaaacatgcaattcctatcaagtaagatggcatgtagaaggtcaagcaaagaatcccgtggaggagagtcgcccagggcagactcctaggaaggtttctgtttcaacagacccggctggtccagactaaatcgagaggttgacctgcaaagctgccttcagagcagccagatgcagatgcaggctgttcgggaacttcggaatgtgattagtatttgtgatggaaacagctagcacttccacccacaaaaggatttttttttttttttaaagaaagaaaagagaaaaaaaagtcaactttttactttgctgcaacctcagccacagagcagaaagcacaacaaataacctgtctgccaattctcctccatctgattccaaacttactgccttcttctcctgaatttgcaggggccagaagtgtgcagccagcactggccccgtgaggacttagcatagcatttcacagctatgtcactagaattacagtaaatatcatatcttctgagtgaatgatagggttcttttcatttgtccctaacttttgaaaattaaaaatttgttttttcataatccatatgaaaaataagacagacattacattctgcattttaggcctcctcaatgtgaaaattacatcggttttcccctcctcaattcttgaagctttattttaaatgtgattcaatgaactgacatctgactcttccttagttcgtgttcttaatgcttccagaacttgataacttattctgtcggctatgaatgcaaaaaaaaaaaaaaaactttgtagaaaaacaatccaagggaaactaaaagttattctaaagtctaccaattaagataaccattcttaacattgggtagtgtagccttcctttatttcaccagtttgtacctataatttttttataagattgtaatttttttttacaagattctctgtatattagaaaataaaggctaggaaataagccatccttaaaaaaataaagaaaaagttaacacagctgcagtattggagtttataaagctgtaatgacagccatgaacacagatgaagcaattatgaacttttatctattgtgaatagataaaaatccaattggaaaatgaggcctaccccactgaacacctgtttatggtcttaattttgccttaacgagacactactgatgtcattcaacacaacaaaaatcaatagtggatcaatatggataaacatgttgggtacaaccttttgtcctaagagacagttaacagctgggtttagttttactgggatttactcgaagacttgtaaaagtaaataatggtgcatttaagaatatttgcctgttttgatttagtgagtttggcaggtggcggtggcctttcaatgacatatggctttgaaattacatcaatatatgcatacaatgtgtcttttcctttagttcatgcatcaaattaattaataaagaacccctggtttaacattttataagcaaatattccccagtgttggttgaagaaaatacagtgaaaagataaaagagaaaagagcctgaaacgttctgcaggaatttttaagaacagcagaatgagcacatagattgacaggtaccaatattttcttacaacactacaaaaggcatatccaagtatgtttaatgaggcaatgttaatttcttcttttcaaagttaaattacttatactattaaatgaaatagcacatgttcaatgtacctcaaatgtttccattaggggacttaccctgtgtatcccttgtaataaatgagattctgatgaccttcaaaaggatgcaaaactctatatttataaataaaaatcaagatgagaaactctaaatatatttcatgctgtaatccccttaatatttcatgattggaagttatagaataacattatatatagtaaaaattacagattctagtttttgtttttataaaattttgttcatttgttttcataacagactactttcaattataaagtcacattaagaaaagcaaatgataaattttatagaaaccacaactaaataaaccacattatgttttaagattaatttaacagagaaatttacctttgaggatcaaagggcatcatgtttttgtaaattatagaaactcgtaaatttggttctctatgcaatatcctatagattatatacaaaagcatgagattctggcatatctgcactagcatttacactatcttcaaaagcattcctatctggcagttgctacttaatgttctacctgtttgcctcccttattttatttttcagtatcttatttttcagtaatacaagaaatgttctattgacagaaatttaaatagcattataaagccacagtgtctattaagataaatggatatcgtactggttttaatattggctattttgaagtgtgtttcacttgctttcataaagagaattcacttgatatgattacagacatgttcaactttagggacaaaatagcaaagtaaagtttctcagtttttgagttttacatcttacagtttgacatggttacaaatagattctttactgtttacatggataaataaatacattaaaatgaacatttacagatcctagcaaatcaacattagtatagtactgttaaagaaatcactaaatcactaaatattttactagttaactagtcaactaaaataaactttcaaaatgaagtgccaaggaaaagtcaaatgagtttttaatctgaacctgaactagagagaattatctcacttcaaacaccacaacacctacccgccagaaggaaacctttcacatattttctttcgcaaagaagccaacaatagtcactttgggcaatatatacacacacatgcaaaatacagaaaggcaactcactccagctttcaaagatgaagaaaaaaagtgcttggaaatcttgatgttcacagagtccttcaatcacctagcaacccctcttactgccgtttttaatttcaaatatttagcgttcaaattcaaagatttgacgaagctgatgtaaactgtaactttaaaatgaaacgaaaacaaacagtgaaactttgaacaaatttaagcaaaatggtccctaccttttttttgagaatacgatggcgactgcacttgagaaaaagtaggcttttcttcagtgaaatattcaggttggctgtattgattcagggccatgtccaagtcagagtccttgcttttaaacatgtttccagggtaactacaggtataaggctgattcactgcccaggcctgttccatatatatgttgttactgggcacagcctgagcatcgcaaccgctgtaacccggactatcttcaaaatacgcgtaataatcagtggactgcatgtagcaattgctgccggcagctgggtgcacttcatatatttcttgcatacagtagttcattttgtttccctggttcagtttctagtttacatatacacacagtctacgcatgcattctccagccccatacaccctgagagctgggcatatacgcagagaagcatacatacatacacatgaaacgcgaagggaagatgaataaacaccaccaccaacacagcaacccagcctgctttactttgtaatagcacctgatgtgctaaaatcctatttagaccgaggtgtcttttgagctcttctgccatccaaacatattggaaagcagatttatgactatcaaaggtcttaagctgtgcatgcagctagttaattcctggggaagatggcaggcaggtaggaatgacctccacccagatagggaagtgacagcgagaatgttactctgaagctgctaagatgcattttatatgctgtttttaacccctttcaacatgattataaaacgattactcattgttatgtcattttggttgacagcttaagcatgaaacattataaagacatcttagagaatatccttggatacaaagaaaatcctaaaatcaataatctagtttattagcatgaaccagagaaaatccagtagtaatgagcctgatgactgactgactccaaaacattaatctagctgtgcaaatattggtggttgaatctgttgttgaatgttactgactgggttttcatactaggatccaaccatcttcccatgacacataggtcccgctggtttttaaaacatgccaaggaagtacacggttgaaaatgctgctgatgtctgcaagtgagttttattctgttccttgcgcatgattattttctacttcataagcactaatctacatgagacctaaagcttacattaactgttcaattctgtaatttatgttttctttataaaggcatgagagactgtatgccaatgcccctatatgaggaatacccctattatatagcagctttccttttctgttggtgcttaacagtactctgatcagtagtgcgtggaaaactgtaaacacttaccactttattcccattcaaatctgcttttgagattattttcaagatttaatgtgatttaagtggtattcatgtacttacttaaagatagtgatcaaaaagggaacagcattttctgtaagaatcatcatatcttttaactaaggagttaacaaataccaaattagattgtgaatgcttgctaggatgattactaatggtattttctccctgtggatggtggccagtgtgtgcatgtcacatatatgcatagttgtagatcatgacatcaggaagggcggatgctgctcttctacactagggattccttccgtttcttaggcagcttgttttcagggctcggcctcaggtggttacgtttacatttggcttcctgctggtccatgagcatgtgaccttgttggtatttgtctctaaaggaccatcaacaatgtaatactgtaattttcaacagtgagacctttgctttggacatgtagctccagtcatcaattgcaacgtggaattctgggacagggacatatggcagaagtaaggagggtattacagtcattcaacaaattatggggtgtctgttaagtacaaagcaaggagttggtggctacagagatggctgttcagaaaaaaaaaatcaccgtctctgtcaataagtagcttaatagcatgtatattaaatatacagtcaagtggaccaccattgtgctgtctttaattgctgactttttataaatgtagtaaaggagccatagactcaagggaaaaggtggggaattgtagaatgagctaaagatgtgacaaaattagaaaagagacccaggcagacctatgtggaggatagtaataagactcctttaaaaactgcaactgatataaaacaagcaaaagcatgttcgtcagttggtatatatttgaacctggaaaatgaatcacaatatcctagaaagcatgaaaagttaccataaggaataaagaacacagctaacattttaatcgtgtttttactttctgattaccattaaaacaaatgaaagatttattcagtgttactaagaacacatacacaatattacaattaacattttctccctactggaaatgtcaaaacatttcattggaagcaataactattttctgaaaaccccaggaaaaaggatccaggccttatgtttttttgtctgatgtcatttatttatctcaaatttcccaagcctaatctgaaaattaacctttcaataaagcagttttcttttttggcaaatgcacatgttccaaagtctctttttctggttaagagctgcgtgttgaatccattcgattttgcagttttgcccagtgcatttcctggctccctctctttctcattaaaggcagaaatccaagcaatttcttgcttttcatcagtaacaatatcaacgaaaatcagagactcaacttttattccaaaggaatacttaaaaataattttcagaaatctctaaatatgcttgaaaaattggagagttattctcccctggaactggatataaatactgcagtgaaaaaggaaagaatagctgctgaaaaactttctctctctttttactaaacgtcagaaaggtcaacagtatttttattgaatttaaaaaatcctgaattccctcagaaatctttaaattaaaaaaagtttcaaaacatatttaagagagctcacttcctcacgaatgtttattgtttggagaaaagagaacaaaacattctgaaacactcctcataccaagtgggaatactctttacttgtaacgaatgcacaaaactttcattactattagttgaaaatggagctcaacacttacattgaatttgaaatatggcccctcacatcctgatagaagcaatcacatctgtcacctgtgattcagtcttgcatgcttctttgtaaagtcagtaaagcaatctaaacatattatgtgtcacaaatggggtaagcttcagtgaggttgttgtcttattttcttgattgcctgctctaattatttaaagagcagcttaagagttatttcacttatagtgcatccaactgccttaaataaactcaggaggactttaataattccgattagaagtgtttcaatcaataatatatatatatatatatatgcgcctaggtgtgacttatagaaagtccgctttaataattatgggtgaaactttagcatcaagatttttaaaagaagttcctgaggttatttacataagtagcaacatttgagaaccacttgttctactaggtgtctgaccccagtcccttcaccaaggagcaggaaatcctgtgtactaactcctttttcttcatttgcagcttcactacatatttcccttagttcttagcaatttaccctccacacttcaaccaggcttcacctgcctttgagttaaccagtcaagcagaggaggcagcacaaaaggaggcacgctaggaaagaacgaaatacaaggagaagtgtaataaacttggcatggggacacaggagtaatctgcctagagtgccagggatggcttcacagaagaggtgaccagtgagctggaagagtatgtaggacatcatcagtggaggcctaagatatgaaatggctgagcagaaatgtcttaggaagggtgctatcaactaactgtacttgcaaaaatacacataaagaaagataattgataagctttaaagcaactggtcagagccttttaacttccactctaatgattgttctcactttctgttttagtaattgaaccgctaaattttagttgggctcatggcccctgagaaaaaaactatacgtcccagtttcccctttgtcaatatgtgtctgtgtgactaacttctggccaacgagatgtaatagaagaagtgttgcaaggcaatttctaggaaacttaaaagacacattaaaagacaactggtgcattccatttgcctctactttgttttgactttctgctccctgcaatgactggagccccagccatcattttggtccatgagagtgaggactatactctagggattacggaagaatgatctggaaaattctaggttgctgaaatacacagaattgccatactagcactggactgccaacttctggacttctttttttctcgagacagaaataaacttatttaggtcacagttttcttatttgtaaaacagataacggtagtcacttcattggttattgtgaagattaagtgagtttatataagtaaagcacttagaatgatgactggcctagtaagtgacataattatatatacataataattataataatatatattatatatatatattataatatatatctcttaggtcttgtcttgggctacttctcagtctatactctaggtcacaggtcagcaatcttcagcctgtgggccaaacatgacccaccacctgtttcgtaaataaagtttactggaatacagcttttatttgttacatattgcctgtggctgcttttgtgctaccatggcagagttgagtagttgcaagagagaccttatagcctgctgaaaatatttaccacctggtattttggagaaaaagtttgccaagccctgctctagctgatctcatcctgtctcacagctttaaatactaattatatgcaacatccatgtggatatctccatcgcagatgtcacctctgaaaccaggatcctatatccaaccatcaacttgacatctccatttgcccaaccagggcatctccaacttaattctttctaaaacctgttcctctcacagtagtcccatcttggcaccaccatccacctgggagcttaagcaaataaccttcaagacaactcttttcttcccttcactacctaaatccaattcattagcaagttcattggttcttcctccaaaatatatgtttaatccaactacttccttctctccgctgccatctcgcagtccaatccatcatcatctcctaactggactcccttctggctttctcattagctttggcccactttaatattttcttgacacagccaccaaagagtgatgttttacaggctgcaaatcagataatgtttcttccttgtttaaaaccttcagtggctttgtactgtatttagaacaaaatccaaacctctaccaaaaggtggtccttccccactacttatcaaccctcctgcttccttgacataaaccaaaatagcatccttattattccttgagcactccaagtttttgcctgcctcaattcaaggacgctgcacatgttcttctgtctgtctgatatattcctccctttagctcttcacaggacagagcccttctcatttgtttggatggagcctaagtgacattttgtgtgtcaggaacctcttgataccatcagaggcctgaaagccctgacactcttcatatacataacaacacttgctctctcagaaaaaagatggaggactctctgcaccaaaatccatgtgcatttaaaaaaaaaaaagataaaatgttacatattgcaataagtggattatcttaggcttgaaagtttctgggagatatctgtctgtctaaaatcgatccagtttgttcttttatatcttcgtcacaagagaacagagatagagctgtttattaaacttacctcagttgaggttatggaattacaagtaaccatcatcagtgccaatcatctctgccccaaaagagatgataaaaaggattgagacatttgctgccctttgaagtaactactcaaattgaggaaagtttcctttaaaaatgtaaagaagcatgagtctcgatcttaccactgaagtgctgaaagcacatctaatacattttggcggaaaccaaagaggtgcacaaaaactttttgaccatgctttcttggattgttgaggtctggaatcttcggactcattgcttttgaaaaggacttcaaatcagttcaactccagagatgtgagcagggcaagctcctgggacttccggagcacccaactttaaagcagccctccctccagacgctaacacatatggaacacttatggaggctgagacctgttttatgttttcttaggatcctaggatattacagcaggaacttctgagctatgcattccacatgtattttatctgattatgagaaaactgaatcccaaggggatgaagtgacttgtcacatggtaggtggtagccgttgaggccgtgacccactcctgctttgactgtatcatttctcctattgtaggtggggcctttattttcccacctgggcctagtgttctagggttaaaaaggtgctgtggaggaaagggagtaaaggaacttgtcttaggcctggggattgactgtccctcctcagcatttctgccaaataatataaagccttgagtcactagatcatgcaaaactctaaccattttagaaacttttacttcctcagtcctgggagtgttaattagcatggctcctcctcccctaccactactgtaatggtgtaattcttaataaatgaacaccatggctactgggttaatattcagatggtgttccctaagtggtcccataatacagtcccaagagatgatctaaagagaaaacaataaaaataaactttataatcaaatgagtttgggaaatgacacattaatgctcctctcttggagattcacacacacacaactttgaatgactttgtataacagcatttcctaaacatttctgatcatagaaccctgtgtgtatcttgtaacatttgttacaagtgttccatgaaacatactttgaaaaacctagtcatctgctctgttggatatatatgctggagcttaaggcacggatacataacagtgcatttctcagattacacaccaagaacagagagaagaaatctgctgaaggggagtgtcctttttagggtctttaccaacgaggaaagctgccggccagaagaggcaggctggacacatggaaatgcaaatccccaggtgggcacaggacaagaccagggcctcttgggctcttgaattaagtctgtttcagtaggaatagaaactcaaagctcttctcttttaaaacatattgttaactgaatttgtttctaattttttcccttggcatttcataaaagcttttgatagttctagcccattacagctctacaaaagggcactaaggggagacttttgttcacaatcgatcaccaagcagaatatgcttttacaaaaatgtgcttgaaaaagtgacagtgttttactagtgaaaagggaatggattctgatctggtgcagtggaaaaaaattggctctgattagaacattgaagcaggaacaagacagtctcagggaccaagctgatggaagcaggcccagtaattgaactgagagatttccaaagggcaagagactctcatcaaggcagtcctggtggcttcctcaacctggacaccctctttgtgggtctaaattttggagttgcatgttttatttcacaaaggtggaataattgcctcagcacattaatgcaaaagataccacaaacttagctacagcagccttttactagatgaaatatgtcaatttctaggatgagcaagttaaaaagaacagccttttgtggttccacaaagattataaaagagtccaaaattcttaggtcagtgattctcaaatggtggtttctgaaccagcagcattagcatatcctggaacttcttagaaatgcaaattctgcagcccaccccagaccaactggatcgtaaactctggggggtggggacagcaagccctccaggggattctgatactagccgaagtttgagaaccactgtcttagtaaaggctgaagttgctctagctagtctgtgtcaacttttctagcatcactggctgttaccttgagccctggattctcaaaacttctgtcttcttctgttggttttctcctggtcctggcaggtgtattgactttgtccttgatctaaaatgttttaggcctaattaggctaggaagaacggcgtgctccatgtggccaatgcagctcaattttcctggcctctactttgagttttggtgaccatgcactaccagtaccataatacacaacaaactttatcactgtcactccagactgtcaacaggagcagtgatatctgacatttttgggtctttggacataatactatcacaacagcacaagctctctgcttccacccaactccacagccaaacctattgatggtataccagaaacctccatgtcatacagccttttcccacatgtctcctctatccctggacagttcttttcagtcatcttcaagggatgatctcctcatctgtcttttacaattggccataactttggttctattctcagccctcttctaaccatacatattcttccaggtgaagccatcagtgtctacagcttcagctattgcccgtgtgcagatggtgcttaatctctcttgtgccttccagacctgcattccagccacctaccaaacccctttctgtggatgccaaggtacctcacataccaattctaaactcagtgtgtcagattctgtgttgggtgtttatatgcatcatcttatttaaacatcacaatagtcctacagcagctatgactggccacattttaaaaaaaatttttattttacttcaagttctgggatacatgtgcaggacgtgcaggtttgttacataggtatacgtgtgccatggtggtttgctgcacctgtcaacctgtcatctacgtgttaagccgggcatgcattaggtatttgtcctaatgtagccacatttttttaatagatgaaaaaaaatctatttgtctgaagtggcacaatggtaatttgaagagtgaggattcaaatccagatctgttcaagtagaaattacatacttggacttttcgttacagcttgcttatctctctgtagctttgccacagcctctagtcacaaagggccaactattctatgctgttactattttaattaaactaatcatttcatttttaagagaaaacttggctaacccaagaggtttctatacctctcatcttactctgatctttccattcatccaccacgttgcagctaggggaattgattttaaaggagaatctaaagcatgtcacctgttacccctcccacaaccccaatcctagcttgcaataatctttagtttttaagataaagcttaaagacttagaagtcttttgcaatgtagctcctgactactttctactcttatctcttgccactttctcatatgacctgaatgctggccatttgcagttttgttgaacagcatctctctggcttggtcacacacagtttcctgcgtacagtggcccatgcactgtgctaaccactttcctatagattatatcatttaagcctcacagcaatcctgcttgtagacatgactgttcctgttttagagataaggaaactgagactcagggaggttccataacttgcccacagtcataagactgataagtggtattctcaatgcatgcaaataccatatttatgtccaaaatggtatgtctctgttttgctgcccttatgccatttagcagcttacgctggagtctgggaaactgtagggctatagtgactgacatgcagtgattcttcgtggtttgtcatctgtcctctttgatgagtccagaaacttaatcatgtcagacaagggaatttatacactcagaaaattactaaacaatctttgctggatgtttagtccatgaaatcctcttctgcatattgagaaacaatatatagtctgatttcagcctaaattcaagatttgttccatttaagttttcaagtaatgggttgtagggtccaaaattcccagacacgtttttactattccaagccctttcttgcatagtatttccagtggatggaacagtgctgattaaagactggagtcctagcatagtgtctttcacataagaactctgggataacgatcaagggttttattctgactgatatttcccaagaagaccaaaggcaaatcataaagtcttcttgtgctttgagagaatgagatactattcaaaaagagctcaggatccacaccaaaagaaaaatgcacatatacaaaagtgaacagaatagtattcgtaaggctggagattgaaagaaaagtgaaaaatttgaaatatacttcagaccactgttatcatcattgaagtcttctatttgctaagccaacagtggaatgtctgctcttttttataaatgaacatttgattcaaaaccaaccttaatgaatctaatatagtctgatgtggcttgaatatcatggcataaaaaaatgcaaaaatatttcagttttggtgtacctttaattagacaattggctacataataatgatgaggtctattgcatggtgtctttataaacaataagattgcttgggaaggtatttccattcattttgcacagtggaaaactgaggggtgcttttcttactgtacataattacaaagggaaaaggttagtattgaaatttaggccctcaagttactattctagaaatcacttttcccacttccacgctatgcttttctaagtggaaaattattttattgtttttgaatttctgggtgactaataatgtgtttcaacacaaattctaagatcacttcaatgatttatctgtttttccaaagatgtgcttaatttaatgtcacattgtatatttattatagtcaatatgtttccttatatctctagaaaaaaatgctcttcgatattttgtttttataaatatcatttatgttttgcttgaatttcacatagcaactcatttaatgtattttttaatttaatcattagataaagtagatatgtttccccttaatgtgttaagataattatttcactgtaattcacaatgatcgacttgatgtgaaaagttgagtggttgtttaagtggaataattttgacatttaacagctacagtatactttctttatcccagaatagcatgtcagagattaattttaaaacaaatttccctaataataggaataatgaatgaacaattgaatcacctgcatttactttgctttttcacccttaagaacaactagtgcaaaatttagactatgccacagctgatgtagtttcaaaagatttattctttgtcagtaaaggctccagtcctacattatacttgaaaatgttataaaaataataaaaggtaaaaagttcaaagtactgatacatgctacattgtgggtgaatctcaaaaacagtatactaagagaaagatgccagtcatacaagaccacgtattgtagcattccacttttgttaagcttcagaaaaggcaaatctacagggactgaaagaaaaatggttgccagaggctgggcacaggaatggggagtaactgtaaacgactcaaagtttcttttgggatgatggaaatgttctaaaataagatcctgatgatggttgcatgcctctgtaaatatactaacaatcattgaactatacacttaaaacaggggaatttgatggcatgtaaattatatctcagtgaagctttacaaaaatagatgcagggctacaaacagcttgagttaattaagactgattctcaaaataaaataaagtttacatcatttatgtatcaataccatgtatgttattctcccagatctaatggagatacactatagaaggaagacctggccctgactctgaaatttgcaatcaaactaaaaatacctatcagcaagcagaaaacagtatcccacacactgaatacttcaagtgttaagtgaacatggagtaaaatggaatcattatttttgaaacaacgtaggttacattcttcattattctttcctaagacaaatgccagccagccaatagaattttcatcatcgcttggttgtcaacagagttactgctcattgcaagcctagactcgaagctctgccaacattttctgtttgaaaaatcctacgaaaaaaggggtgtgcatttaactttttattctcagcatatagtacagtattggacacacagaacacactcaatttaaaacattgtcagtataaattatgacgaattcaccatctgcagtgaatcaaacaggcatgttcagaagccacaattaaataaggcagaacacaatgaatacttgtacaaaatttcatcacagcattaaaaacaaaaatccaaattcattctgatggggcatgggggcgcacagaggaagcgatgtctgaattgggccttgaaggatgagtagagaaaaaggatttgtaaaagtttgcaaaaataggatctacttcatgttggtgcccttgagatccaaatccagaaatggcaaattgaaattcttcattttatttcaaatgtcaaaatgttctagaaagttacacaataaatatcaaggttatcaagacatactctgatcttagttgttttgtaatgtaatatgattggattgtggaaagaaaagaatgtttagttaaaatatgagacgagaataaagtggctgtgtcttttttttaatcttcagaaaagtcttcagaccgtggacaatgtgctctttgcccctattatggagaaaggtgttccctaggtaagtatcatcctatgggtccaaccttaaaaatgtcacaggggacagagaaacaagtaactttttcttctgacattcacctttagagcattgaatagctgcttattagaggactttagaaaatatactttcttctaacccagtaagataatgagccagctcaccagtaaagatctaggcctgctcacactaagatataagtggtttggaagattgaaaactatttctgcatcatataattaaattcaaaattttataggaacaaacaccgtatcatacaattttttagtatctctgtccaaaatgtataatctgattctaatcatgaggaaaggctgggtgcggtggctcatgcctgtaacccagagcaaaggaggccaaggtgggtaaatcactttaggccaggagttcagggctgcagtgagctattagctcaccactgcactccagcttgggcaacaaagtgagaccttgtctaaaaaaaatcatgaggaaacatccatcaaacttaaattaagggacattccaaaataataatcagcctgtattttgtcaagaaatatttcttcaatggtgtgaacgacaaagaaaaactgtgaaacggttccagactaacatgaacctggaggacattatgctaagtgaaataggccaggcacagaaagaaaaacactccatgatctccactatatgtggaatggaaaaagctgaaatcgaagcagactagagtagaatggtgataactaaggtctgcagcggggagggtaggtagaacagatagatgttcgtcaaagggtacataatttcagttagatattgctaaaatgttctcaccacaaaaaatgataaggatataggtgatagatatgttaattagcttgatttaataatttaaagctgtataatgtggcaaaacataacatgtacatgataaatacatacaatttttatttgtccattatactctaataaagctgcacaggtggtgggaggaagaagcagactaaagagataaaaaataaataaataaaatgaatgatcctggcctggatcccagaccggaaaataagattggtatagaggacaattggtggtggcctctcccagccctatctagaggaatgaagcctgtgaaaaccccttagagacaagtcctctctccagctctggtcctcacctcaactccccctccaagggggtggcaggaaggataatttgtaaaatgtaaataaagtctgtagattagaaaatagtaggcatcaacgttaaacttcccaattctgataattgtgctatggtgtcctaagataatttccttagttttagcaggtatttagagttaaaagggcatgatgtttataacttactctcatatggtttgcaaatgacataataataatatgtatatatgcaaacaaacacatacagagaatgagaaaagaaatatggtaaaatgttaacaattggtgaatccaggtgaggggtatgggaattatttgcactattacaactttttggtaaacctgagattaatttagaacaaaatataaaaaggaatttataggtctgcctgaggagctcttccaagaaaacgtacaatttactcaaccttgaagacttagtggtcctttgccaccaattttatttttccacttcaactcttagaaacagaatccaactcagaaagtaagcagattttcaataaaacaagtaataacaaatagcttttgattcattaaaaaagggggtcagattgatttgcataattttattttttagtagtgatcaccaggcttatattcctgatatcaaaaagtcttaaaaaaatcatagaacgggcattcatttctttttttgggagaacaaataagactcaagcatagaatgatcgcttcaaaggaaatttaagaatgagcatgtcgtgtgtaagataacaaggaaaaggtaacaagaaagaaattccctatgttttgtcttaaatattaagtgggatgaacccattgcagatacctgtttccctggaaacccattcaattgaaattgctgcaaaaattaacatgtattatttttcccttaaagggcagtagcttcttttacttacacagttttgacctttagttttgacctttagttttatatcttagtcttattataagaagttatttccagaactaggcaaacaaagagctgaatacatatcttttcattagtcctgaggcttaactaaaatagtatggcctttatagctgtactagatgtctgaggcaactatgggtggttggggtacaatctgcaagtcatagaatattgcagtctagactaataaaccatcaacccacacatgatattctgactcaaatgccaagtgtctttatcatatagacaattgagttaaacagtcacatatgcagcacagctctgtattttaaaaggcagtaaagttgaataaagtcaagtcccttatataagcccatactgacaaatgtcatggggacagaggttcacaatatataataatcctatgtcaggtcagtgccatggagaatagctctggaccttggagaatttctgactctaatcttacttgaaaagctcagctgtttctgaatttctgggacccgggcagtgtggatagaggctcatatttattccagttcaatcaagaaggctgaactggccaagacctgaaagaccaatctgtaaatacaactcacagaattagccacagaatagaataactggagagataaaccagccctatgccagggcaggttgtaagcacaggtgatacggttcccccatgtatgtgcttcctagactgcaatgccactatcagaggctacctttggcatgaggtcgctgcatctccaggagtactcaaaactcaaagcctccctgccctggagaggtaaggatgtaagtcagtactggtcaccaacaccttcaggggaataagttttttttatggaaaatgagaatgttttcagaatgtgaagagggaagaagcctagacttcgtagagactgaaaatgggtttggatagcctgaagactcctattttcctgggaaaaagatatcctcaagggaagtaaggacactgaaagagatggtttaaggcaactgatttcccaacttatcctggaactggtcttatgttttcatgatgatcatagcttgttttagggggctggtaatgatttaatatatttttccttgtcttccccacaagggaaaatatgattatcatattggagggccactttaaaaatggagtgtagattcatctatttgatttctttgtggtcagttaatctctgactacattctttgttggagagaattattgatttagccaaggttaaatagctggtaagcgtcaaagccaagaaccaatggtcatctgttctaaacattctcctatgtgtttactaagtgctgggcaaaatccctaagatacgatgcagcaggccagctgtgtaaggtgaggcctttggggatatcttgatagcctatgatcattacgtcattcacacatttgtctagatttggctggaaactctttgtagtttaaacctacgctcagggtcagcccttgacaaacagtgagataggtgacatttgtctttagagccttgacaatgaagtgagtgctgctcacaacctgacaagctgcacagtattacttgttacttggcagtcctgctccttattattattcttttccttctctcttatcccttgctatccttaccctgttcatggcctccttctagtcccattctttccattgtctttattggaccctgccaagagtaaaaggaatcttatccaattcatccatttggagaagctaatgacttgataagatattcagccagtaagtttgcgttttgaaagaccacagtggggccaggtgcggtggctcgtgcctgtaatcccagcactttgggaggccaaggtgggcggatcacgagttcaggagatcgagaccatcctggctaacacagtgaaaccccatctctactaaaaatacaaaaagttagccgggcgtggtggcgggcgcctgtagtcccagatactcgggaggctgaggcaggagaatggcgtgaacccgggaggtggagcttgcagtgagccgagattgcgccactgcactccagcctgggcgacagagtgagactccgtttcaaaaacaaaacaaaacaaaaaaacaaacaaaaaaaagaaagaccacaatggaagggcaatgatagaattataagcattcagggcaacttgtaggagatgtcctggggaagggaaagactgaattccagtgatcacctacgatgtctttgtaaggctgaccctcccaataatacctttccaacttcagtgctaggtacattagcaatccacttgtatctgattttgtctgaaaactacctgatggaagagtcaagggatttggctattacatctgttctgcctgcgtccgtaatattcctggctttagaaacttcaatcctgccagccacaatatagtgattattctgacgtgggcattctgcattcctaatgtccaatgtggttctcatagtctttctggctcattgtaagaaaaataactcccatctattgagcactcactgtgtcccatgagatcatttaagagcttgtttctttccacaattctgtgaaagagggtccacattttacagacgagaaaactgaggctcaaacaaagtgacttgcccaagtttcaatggctggtaaatggcagcaccagaatatgacctcggactgtataagtagatacgtgctgacctctactgctcccatcacagcaagtctgaccaccctgcatctttacctgacagtagagcagtatttcctctgcagtttcaaattctttcctttgggtctggaatgttcttaccctttaaagtcataggggattataactgtagagagctctgaccctggggccagattgcctgagttagaattccagttcagctacttcattttccccttgatttcttatttaaagttttaaattttaaaagagtctgagaaaaaaaatactttggttgttgctatggacttttttttcaactgtttatgcctctactagagctgtgcacatgatgttttgtttggcgtcccttcatttatttttatatagttcaatgtatttcaaggtcagaaagggtggcaaaaactggaggaggtgggcacaaggctaagaggtgtgtttatattctaagaacagttatcattgtttagtctctcctaagtgtcaggcactatgttgggggctttatacatattatctttcatcttttttcttttcttctttttcttttttcttttcttttttttttttttttgagacagagtctcactctgtcgcccaggctggagtgcaatggcgctatcttggctcactgcaacctctgcctcctgggttccaagcgcttctcctgcctcggcctcctgagtagctgggattacaggcacacgccaccatccccagctaatttttttttgtattttttgtagagacagggtttcatcatgttggccaggctggtcttgaaactcctgacctcaagtgatccacctgcctcggcctcccaaagtgttgggattacaggtgtgagcgacggcgcctggcctttcatcttttttttttttttttttaaattaaatccttcattgaaatatctttcatctttacaacaaatctgaaagctagatattattcctctgtttaaaactaaatggactgagggttacagaggttaaaaaattttccctgagctgatgatttaaagagcaagaaataaactgaagcctaactgtaaagcatatgataataacattaaacaaatttatgcacatcattattcattaatacattcattaatatttattaatacgttcttgtaaagatttttgaatgtggttgcatatggagttaatccttcttattccgcccttttctaaggtatctactgaaacaagtttgatgtatatctgggaacttttttctgtgcacatttgtaaacacacaattatatagacttttaacgttataaatgggattacactattcttaatgcatgcttactttcaataagtattcctaaaatcacttcttttaaaaaagcctgtttttaatttttctggtgaatgctttggatgtaccacaatttattggaacattccccagtggacagacatttagatcgcttccagtttatcagtaacaaaaaacaaagatgcaaagaacatgtttgaacagacttgtgccctgtgtaagtatttccctgggacagagtatgatgagaggtatggttgggtacgtctgcatcctttggcgtgacagacactgttcagttggccttggaaagcgtggggtggtccatcctctgctctgtgtgcatctcaacgaaaactgaagttagatgaaccagggccttgaatttctgatatctacctccctttgacattgctgtttccagttttttgttttttcttccctccaatctcgtgagtagcttttctcccccttggctttctatttctgtctgccccagtatacgtatggggtactcgtccctgcctttgaagtatcaaatcacacagctatctgacatatgcccacagtggggagagagccatcgttctcatgttgattgctaaggttcccagagtgcccttgaggtataagaatcactggcactctcagttgggactgcagatcctgatgtatgatgagtggggcagagtagagagcagagatggatggagcagatggtagtactggcggaagggcacaagctttttaatcctccaccttttaaaatactcattcacctggagatgcccttgtattttacttaaggacaaagatagcaatcatctgctgaaaatgtgaatgtctaacatgaaggattataatgcacacaatgacttgcatttatgtctccaacttttaagacactttgttattttggtaaatgagaatggcacatcatttgaaattgtcatcactgatttgattcattttttttgtctttatgaagagcatgaattaatagttttcccctttgctgacataagatattgtttaaaaaattactttaacttgtctaaatcttgaggactggtttaataaagtatgatacatctataaagaagaataatctatagccaatgaaagtcaggactcagaatatttaatgacatgggaaaatgttcatgatatattgctaggcattaaaagctggttaaaatggtatgcctagtatgatcccaggtttataaaaaatacacatgcacagagaaaagactgaaatgtaataagaatgtgcagtgcttacccttggggaatagaacttcaactgattttaaaacattatttgcaattttaaaaatttgtagaaattttttttctaccatgaacatatataggcttttataatgagaggaagtaacttgttcttaaaattattttaactgattccctcttgccttcctgggtatctgagaatcagttttaaaaatattaagcacagagacatttctgtgagatcactgatggctgctctcctttttctgagtccaccagggaggtgggtgagtccctgccttgtttctccccttgggtttcactgtttcagggaggtccctgattgacataaaagtgtaaaggcctgactgcctgggttcagcagggctggttaggtccagctccagggatccatgcatccgtctagagcccatccttgtgggactggggagaccctgtggttcccagagagaagtacagtagggcatgagagggtagaggggtgaagccttgtaagacttcaggggaggatcagggccccagtcaaacagtgtggggttctcagaagggctcaagtcccagggtgatctgttattaggcagtgactaagcagaccttccagctggcaattgagataagctaggcccaaagacaggcccaaccaagaatggagggactcaagtggctccccacgtgcagtcagggaagggaagaaaaatgcacatttcctaagtgcccaccaggtggcagaccctttcctgtgcaacgagttgaagagtattttcaagctcgtcatgatacccaggtattaagaatctgcactgggctggcaagaacatagaaggctgggcccctctctagagattcactagtctgggtggggcctgagaatcttatttctaccaagctccaggttctcctagtgccactgattggtactaccacactttcagtagcactggatatatcgtctcagactgggaagggaggaggaggacaaggagtaggatgtggtccttatggctgagcaattggttcaaattgtgattaaagtgccaaggaagtgtggcatggaaagagcgggtgtgggtgggtggggtgagttgcagaagggaatgggtcacttgctcctggttaaaatagcctctgatactccagcagattcaacagagatctgttgtgagatctgcaacagaatgtaagggctcttccatagctctcattctaattaaatgtgttaccaattaattcacttaggatgcttacagcagacagaagcataggtatatgcaggttaaaataaaagcagtaaggccgggtgcagtggctcatgcctgtaatctcaccactttgggaggctgaggtgggtggatcacctgagctcaggagtttgagacctgcctggccaacatggcgaaatcctgtctctactaaaaatacaaaaattagctgggcatgtggtgcatgcttgtaatcccagctactcaggaggctgaggcaggagaattgcttgaacctgggaggtagaggttgcagtgagccgagattgcgccactgcactccatcctgggcaacagagcaagactccatttcaaaaaaaaaaaaaaaaaaaaaaagcagtattcagaacaaaatgaaaaacaaaaccttagatagctacccaaaaccctaaagaaacaatatttagagtactatcaactatttgaagtgaaagactattttaaaaatctggtccattatggagcaatacatggttctactgcacaggacttttacatagttcaaaccacatgtgactgaccaggcaagtttgacaatccccaactaactgtctatatcctgttcagtgaaatgaattcactgatcatgcatttggatgccagtggcaatgtcaaactgctataaaagttcctaaagcttactctcagtttctgtatttgcatcaatagaaatggtaataaccactttgcagaagagtgccagtccccaaaccacgcttagaagtgcactggtctagcctggctagatgactgatctggcagatgggctcactgcacagcttcaaggaagtcaatttgttctttggatcctgttgtgcagaattaacttttgtatcctcaggactattttgttcgtatcatttctacatggggtccttggaatagggctagttggatgtccttttggccctgctgccattttcttatgcttggacatcaagggcaatatcctgtatacagtaggcactcaataaacaccgatgagtgaatgcatagattactagcccaagactgagatgtcaagcattcttgtgggatacacagccatctaggaaataaatgcccaacatggatgaacatcaaaatataactctcttcatagtaactatatagagctgacaagcagagcagatggagaaccaactctataaggaaagactgtataatcttgttgctgtcctggactcactgctgcctcactcaacacatgtgcccattttgaatgaatggtatttataagtttcttggaccaagatgacacaggtttcctggtggcatttttatgctgaaccaaggcattgcctcatgcctatgtcaaggtggaccctggtggttactctggaaaacatgggagagttattttagctgttttcctgttaatattaggatcttgaggaaggactttaataatttaattatattttctcattacatctctgactttcagtgaaaaagagttgaatgaatgcaaaataaattatcaactctaacgtccctgaagcctcatgtcctaccccacatctatctgaaattctcctcttgcttcatttcttaccaggctcacagcatagttcaaagtatttatatgacttaataatgcatacctaataataaggatcacaataataatgacagttgctattcagagagcactataagtcaggtactttgctaaatgcttaaatacatcatcttatttaattgtattaacaatcttataagtttgctcaaggacagaaagtagaaaggctaggattctagctcaaatagatcagtctcaaatatttgtggtcttaaccactctactaagcatcttgtattcaaacagagactgtttccttttgcttttaagatgcatagatttattttaaatgattgatagagacatagatggactctatgaatgaataaatgaatgaatattggtatcaattgtgagtgaatcaaattgggtttatgacattattagatcacaaggatgctagagttttctgttggcgtttcaccgtaaactgacatggttttagtgccagcccatacaatgttgagatacaatctggccacatacgctaagagtaaatctcaattgtattgcaaacaaatgtattttgcgcacgcacacacgtgcacacacacacacacatacgtcctacatcctgactcctttgaaaaactttattttgcttttttttctatatagccctttcaatttctcagatctcctcaaatatatatatatatatatatatatatgagagaaagagagtccaaatacaaacctttccaaagggacatgtatagttttgactgcactcaaatcagagctcagaacactatttcactattacttttgaataactctatttccaactgaaacactcaatttcccaggtaaactggtaattcccaggagctttcaaagcattttcagaaaacctaaaagaccagttcttttatatgaaggataaatataatcatgtgtatatgttcaaagtagagcagctgtgtaagtccttcatgccttgtaaatgggagtctttgcaaactttattatgttttggtatatgattgtgagattttcaaaacacaatttaaaactttaccatgagtcacaatcctcaaagaaaaactaaatagacccccccttttcttttaaaaaagaaaaaccactaaactgaaaaagaatgggaaattaaatgaacttagacatttaaagatgcaaattgatctcttggacattgaaagacacaaattgatttaagaagcaaagattttggggagccctaagacaataaagcgatcagcacaaagacatctgtcagggtggaggcgacctgaggtaaagaacagttaaatctaatgcaatcaggaacttaggccagtttaatgttttttttgccttatgagctgacaacctcctaacaccataatctctcctttcaggatgatgacacaaggatttaatgagtagaagacaacaacttaaaacctctcatttgagcatgaattgtctaggttaaaggtaggcattgagatcccattagctactggcacacttgggaaaagaaatgtacacatgcacagacacactttaaagcaagacttcataaaaatacagcgatgcctgtttctactcagacccaaaaatggaattaaagccaaaacttacaacccctctactaattagagaagtaaaaatgtcttcaccccaagtgtcccagcacaacgtgaaaccgaaacaagctgcctttctttggattccacttatttatttatgtttaaaagaatatttgaagaaaaggacgcctagtaaaagaacagttggagaaaacatgggacaccatacattggaagagaaatgtagatgaagtacacagctacaacagggatattttttttcttgttgaaacacatgataatgggctaataaaaatctggttacctttacatttcttctcctccgtttggaaggtctgggcacttgagacactctggtcgttcacatcatcatggtccagatggaatattgagctagtccaagtggtctggatgagatgtggcgacgactgttcatttttcaacgtgctgcgcctctctgaatggctcttcctatgtaggcaggcttcagacattcctactagcttccagtcgtgttctcggtctggacagtgcttcggtttgtcccaggctgtaaggccattttctaaagggttgaaaaacacgagatgacgagctgttggcattgtcaagattttgctgagatgcagagttttggaaggcaagttgtttctcaattcttttgggctgacagtattcacatgccacttgacgggagtgataagatgcagaatttgtcagccttgggcatttagccactgcagttgggttgcctgtcggagtaatcaacacattcccccttattttaaatgcctagaaagacattagttcctgcatggcaaggctgtactttcgccagtcccacttccacagcaatggcccaggagcaagtttacacaccaatttacgttactgcttagatgaccatttgaggtcttgagggtcagggctggccgtgaacacttttcagatccttaggacataaaacacccaggattcagccttgtttgacttgggttttatcacaagctgacctgagggacaccctgttacttaagtgggacgtgctcacgtggccacaccgagagtggcaactctgtttttaccaccttctacctctgatggcctacaaaaagaaaaaaaaaaaaagaagggaatcttacaaatagaagttttgtaaagggcttcagtagagtcccaagttggcaataagaaccgatgaaggaaagcagatagtgctttaggtgtgggacaaattaagagccctaatgatagaatgatgaacttaaattctttggagtacagctggttaattatttatgtatattatatatattttttctattcaatttatagggacttgagggtctggcctacagaaaatgggaaaaaatgtaataatatgatgaaaaatttctgacactaaccttccctggtggcaaattttacttccttaaatatctttactgcacatggatatagagagcaaaaatgagcaagctaatatatatatatatacatatttgtatgcatgttgtacacattaaaaaaacaatccatctggtcatccatattttcagaaattcttaagctactgtttgtcaaaattagaaaaaatataatataaatatgtgagtcctccttttcagagtttatatggtctttttaaagtgatcataattcacaaatttatatgtgaattttttttaacagtgaaattacgagaagaccatggatacccatatccctggggcttagagagacatgtctatcctgacctgtgcacagcacactgaattttaagctgactttcaaacatttaaagtgaattttaaattatttaacatgagggttaaaaatgctttaggttttcataagcaccctctcgaaagctaccagatgtcttcagctaatgttggttaggatggtttctctaaaagtgtaaattactcagtcacttttgaaagttgcatttacccttccgggttttcatattactatgagaaaatgccaatgcccatgcacattgtatttctactccaggagaaaaccatgaacaatagtaacaaagtaacaatcaacacacgattcctttgtcatagtaaatggaaatgctgtggcttgaaatagcttactttggccagtaagcaataagtctccttttaaaaattgtacactgtgctagcttttgggtgtaacatttgatcttattcagagaagagctctgaaaattcactgtatgcaaagggctgtgctaagcattgtattaggcacattatataaacatagattcttccttttcagagtttatatggcattattcattgcatggtaaatcaaaaaggtgtggacttctaccactttcgactgtgctagctactggtgcaattacaggcacttattctcagtagccattaaaaggcaacaacagattgagatcttgaaagatcgtattgcatttcgagctaaacatatccatgtgtaactcattcaagtacctttatccataagggcttgaggtttttcatgagctaaatataaagttactgggggcaggggttaattctgggcctaatgagattgattttatttctacagacatgaaaattcttctcagcacacatgtttttatggtgtctgctttattttcagatactctaaatcctcagcaaattgcatctcgcaaagcttaatttaaataaggttaaagttctcaaactattttgaaaagcctttaagatgtgatttttctgcagaaaattcctaaaatttggtattaattcccttgaccccacagaaattaagaaaaacagccaaactgggtagtcattactccctagggaaacaatgcttggctgagagatgctaacaggggctccactccaagaggacattgccccttaaagtgcagcctattaaagcttgcttaccatgtcccttgggccagcaagaaggggtttttttctaagcaaggaaggctacacttggggtgaggtaagggataggattgctttcattttccaaagaaaagcagctgagatggtttgggaaaagggcttcattcatgggaggcaattacaagctcataattactgtctgtaattacattcgtaataatgatattcagttgcttaactggcaggtttattggttggggcactgctgggaaacctggagactgagaagtcccggttgggtcatgagaaaactcaacaggaatttatttaaggaggattcttgattctgatcctcgcaagaacagaggggcaacatgcaattcctatgccattcccaaggaaggatgagactcccatgacactggggtccttgaattctacctactggatatactgttgttggtgagaactgcaagttacctccacatacctgtggttggcaataatggtcttcagtaatttcctatgtctaatgcccatatccttttgttccttcaaagctcacacaaatgggatatttctttttagggagattaacatcccaaaaggttaagtcagtgattctcaaagtttgatgtgtatcagtatcacctgaggcactattaaacaacactgaagaccaggctttttgaaatttggatagggtgtgggcatgcatagatctatcaagttctccaggtgattctgatacccaacagagtttgagatccacagggttaagataaatttaaggtaagaaaataaattagtgacagattttgaataagcgtgtagtttcttcagactccaatattttacacaacctcagagtaaattttcattatcattcaaaaagtcatccattgttttgaggtctactgagtgacgccttaaaagtcaggtgttaattagatattatcttgtagattgcaggtatggatgtaaataagtatttactcagattgcaggtatggatgtaaataagtatttactcaaaaagcctgttgtcacttggaaaacagtgtggagattccttaaagaactaaaagtgggtctaccgtttgatccaccaatcctactactaggtatctacccagaggaaaagaagtcattatatgaaaaagacatttgcacacacatgtttataacagcacaaattgcaattgcaaaaatatggaaccagcccaaatgcccatcaatcaactcatggataaagaaaatgtgatatatatgtatacaccatggaatactactcagacataaaaaagaatgaaataatgacattcatagcaacctggatgcaagtggagactattattctaagtgaagtaactcaggaatggaaaaccaaacatcatacgttttcactcatgtgtgggagctgggctatgaggatgcaaaggcataagaatgatacattggactttggggacttcagaaagggtcagggtgatgagggataaaagactacacattgggtacagtgtacactgctcaggtggtgggtgcaccaaaatctcagaaatcaccactgaagaacttattcatgaaaccaaacaccacatgttccccaaaaacctattgaaataaataaaaaattaaaaataaaagcctgttgttctgagcattatctgggacacaatgcacacagtagtagaagtaatatttttttttaaaaaacgagcattctagaaacgatcatatcttgttattcatataaattatgaaccgtttactctttaatgaatcccagctaacatctggctttcaatacttcacattctagacatcaacacaattaatcaatttaattagttatggtgaattaaaaataagtagaacaaaataaaataataactagatagggacatgtgaactgcattggcttgtgtgtctcaagggagtttaggcttgaatgattaggtttgcattcgatgaccatcattctgatggctttgattgacacaacactgatccaaagtgttcttttgcaaaagagaaacaaacataaatcgcattaacataactacttacatcctatctctggatatttcattaaagatgatagaaaataaatctgtccatcaaagaagggagaattagattaaaatattcaagtatttcaggacacaagagcgagctgataccttagaaaagagctaaagcaaaggaaataggattatgacaaagtggtcagaaggggtaagctgcgtaggctgggatttcatggcactcattgcaagagtttagcttgcattaaaaggccattaatattaggtactgagactgactgcaaaccatattctgcattaggggtgtgtgtataaaacgtgctttgtaaacccagagagtgtgtagaattatcattgtgtagcatcagactattaggtatgaagcctcaaatttccattttaatttttttacttcaacccataaggtttagccttgctgaattctcagactatgtacgcctcaactgatttttttttagaatcgtgcaggacaggagaataatgtttggttgagcatttactatgagccaggaactgagctagacactttatcttcacaaacatccagggaatatatactgcttaactgacaaggaacctaaaattaagagaagcacttcacctgctcctctttgccttttgtgctattaaccgatatgttctccttatcgcccttagtttgatgagtagtaattgacctattaatagctattgttttatttgtgctttgaaagttctttagaaattgtacttactacctcatttaattttcctgttactcatttatattcataacaagtctccttgcttttgctctcagccacttataatctattttccacagagcagccagagtgagcatttaaaagtataaataagagtgtatttctctggttcttaaaataatctgatgacttcccaccaatattagaataaaatcttcaggccttacagtggcctcaaggccccactgagcctccctctggctgagctcctcacccatggctctgcccccttctctctatcctccagccacatgggctgcctctaacataggaagcccattcccacagcagcatcttgcagaagctctttcctatgctgcagtgcccctgtccaaatccttatatcaccagctccctgtcattgaggtttgagggaggcctttcctgaccagctctccaaccattttctctctatcatcttactttaggttcttcatcatacttgtcaccaatgggaactgttttgtctgtcctcactggaaatgtaagcatgacagaaatagggatgagcactgttgtggtcattactgtgtctctagcacttgcaaaagagccttatgaataacaggtgcttggcaaaatttgtatgggggtggggaatgtggacagaattatcatccctgttttacatgtgtggaaactgaatttagaaagtgatgtggatgtacatgatggaactggactcaaacccaggtcttctgactctaaaacctgacctgaccttctatagttcagttaaagttgcttctggttgccaaggactgtaaactttgacctagtccagaagccatttgaaggaatggctcatcccttatatttcttggtagcctcgtgagaggtggtcattagagaggccaaaaaaataaaaataaaaataaaaaaagttgcttctggaactttagagatgtgggttttctgtaaaatgggaatatactattgttttgatgaccaaataggtttatatataaaaaggtcttagaacagtgtcctgcacattgtaagcatgcactaattgtaagttcttcacttatgcatccacatgacctctcttcccttgccttactctccaaactcttctcctctaaacatgatttttaaagagcattccccccaccccaaaaaaaagaatttcataaatgactccataccactatattaatggctaagaacctgggatgagtcacctcacagcagaagttgtgttttaaagaggatgcctggaaagcattgggccatggcccaaggaatgtatctctaaaattggattcctagattctgtgcaaggcaaatgggagaagaattttggtgaagtgagcatttcctgttaggtttgcctgaccatcattttatctggcttgattagcttggtagctcaaataacataacaatgaagacacacatttgatccttactcaaccttcaaggtctagttcatcatttaagctttcttgaagcaatccatccaccctccaaacttccatcccactttccatgtatctctctcctccatgtgctaccttctaccttgtgatatatccatttacatacatgtatataattttcttaacactcatagtggctagcacaacatctgaagtaatatttattgtcctctcataactttgcaaagagaaaactatttcctaggcacataatccagtaactttgcaaacacaaaactatttcctagggacataattcatgcccagtttcttatccaaaagccactggtctgctaggaggactcatcattacaagcaattcaatatggactaccaataggattgttctcccagaagtgctggtgaaaatgaaacctattttgcttttcagaggcaggaaaagatagtgggtaagaatatgggctctgcttgccaaggttcaaattctgactctgccatatattagctgtggtttggggcaaattgctctacctctttgaatctctctcctgaattatccataatatttgtctatgtctcttctataaggcaagaacttaccatgtcctccttgtatcatgtaaatggtacatgcgcccttttccctcttattggactctaatcaatgtatccatctcttaatctccacaggtctaagcacaatgctataacatgatgggacctcaataaatattatttggaaataattgaacataataagaacagatcaaaataccccgaaactgaacagagcacatacaggtttttattcatttaggaatttctatttactgagcaataatgtgctctatgcaaggcagagtcagccataactggttagcatcaaagttctgcaacaaaaggcagctcagccatcaacagatactgtagcatagccttagacaagctctgtgagcagggaagacagaaagggcagctagatggctttattcttccttgtcctcaggctgtgtaaaccaaccgtgtttttactttggcatttgtatcggatgccggagctggtatctcaaggccatctttctaagacctctgaaacactgacttaatcggttagtccactaacatctgggatggggtgagctggtcaccagagggcaggctcctggcttgtgtttcccagtgcctttgaatctacccaggtggctttgcctggcctgggaacttttaacagtagcctgaagctgcagtgcctgctcgcttccatttatgtaggtctctgcaggaactctgccccagctgatgccatgagacttgtaaatttggaatattcggacaagggaggagagacatctccaaaatagtgaaaagttaaattgttggctgtttctaaaggaaatctgctattactacattcaagaattgctatggaagcgttataggttataggacctcacagtgttggtgtgaaagtacttcacaatgttgatgtgaagaatacatgagccaacacatggacaaggtctagccttgtgcagaaatacagtaagtgttcaaagtgtctccccccgccccccccccccccttttttttttaactactagtaattacagagaccaaatccacaattctcaactggtgggaaggagcctgtaggatctattctcatgcttcccctttctctcaatttacacgaacattctggactctcccagctcagtttcagtcctatccacacagctttcccttactattccagtctgtggtgagttctttttcctttaaaatacatttcttatttattctaagctcatgcaatcatgatcatttctgagctcttgttggtgtatgttagtgttcccaaaatgaagacttagatagctcttgagactgtgaacagatcctactttggtattctcaacaatttaagcctgcaaaatggagtgaaatattctggtcattgttagactcatggaggcatgggtcatagctggggagggtgtgtcttcctggccactggctcctaagggaattgaggatagagtggatgagaaagggagggaaccatattcattattttgtacaaggtagctgaagggcataatcataataatgttagtgatagctcagatttatggagcatttatttaagtcaggctacatagactaggctccataaattaaaattactaccaactgaacacctactacatgccagatagcatccgaaagtacttttcatacattattttatctaactcagataatgtgttttgatatccctaatcagggtgcactcatctcaagaagaactctgctgcttcactcctgagacttgatcaatacggtctgctgaggcccatgttcaacttttgtccggttacataaactatgccttcagaatatcttcttttaggcaaagtcttgcaaaattagcctctttgttcaagtacgctgcctttcattgctaaatggttttgtctttcttttactgagcacctgcctattaattttctctcttgttgagactgggcttttctgtccccgtgtgcaagtgaatttaagtttgctatcacagagtgcttctcctatttcattggtggggattatcagtccattaagtgggtgagatttgggagctgttaggagataaacaaatcttttccttatctggctgctcccacttctctggttttcctgtatattccattaggcaatcactatcctaatgaaaaacaatcatcatgactgcagaaacctgaaataattactctgaaactaaaaagtacaatgattgataatcttttgataaatgaaaaccattaaaacaattttaaagtttgtgtttataacatttatagaggatgcttattaatctgaagtgcagcctgaaacaaaactaaaaagcaaaacaaaacaacgtgtgttcaaagaccatggtgtaaatgtcatttggctgcatgaaaacatggcggtgaccaggttcataggcaacatcttacaattatttaaccacataggaacaagctgactgctgaacactgaccagaggccctgagcactgggaaaatactttccggaggacacaatggaatcctcccccaggaatggtcatttgattttccataattcataccggatttaatcagagagtccttaggttggatgactcaaactttgaggtaattactctaaaggccacagagattccatttaggatattagaaaagctacagtggttgcagaaacattcatattaacgagccacaaatgcacataaaagggaacagatgtttactgctaggattaggtttatcctgtgcaaaagttcagagcataatgtttattcttgatgccagtctgaacccacatttttcaaaaaaacccaagatatctttatgagactcgccccattttatgctcccaaacatgaaataccccttttcagggtagaaaatacacgtgaatcttttctgactttggaaactaggactagggtatgatttgtggacaaaaatcaaaacttaagatttataatttctcaaataaaagacaaaatatgacttgggtaattagatcaatggtatacatcaccctgtaaaaatctcagtacttggcagcaaaacacccatattctttcaacagattactctcagggattaacaaaatccacacaaatatatgctagtgttagcagagtaacatataggtcctcctctgggttttcatagaatctcactacaatttcccactttgtttggtacccaggtgagactaattttcaatttttatgtgtaaaaaaataaataggatcaagatcatggcagatagtttttagggaagagacatttcaatctggaaaagtttggttttttctttggttcaggaatagaagcactgccacagcatgcacagctatcttcttggttataatagcaggtgaggtttttacactggtgagatctccttgagagcaggcgcttttgggatattttcaggtccacagaatacttttaaatacaccaaaaacatattttatgaaatgggccttagtggtatgacttaagtacctgcagggtatgtaatgctcccctaggagggtctattttagcacctgtatctcactgatacagtcccaacagtaaagaggggagaattaaattgtcttctacgtgcctgtcttgtggaagataatttagaactgcagatgggtcaaattgcttggtgtaatctattctatgattttttttttttaagtttaggaaaatgaagagaagcaggtagggttttgactgtcttttccatatcttcctgttatttttcccctgaaacatttcaatttcttaaattagagttggcgaggttggggctggagagggggtctggcagtgagttcctgtaggcctgcttgatctctactgcttgatctctacttgggtcaggtgtgccccctgcctcctccatgctcaaatggcttgtgaatatctacggccctgttactcaaagtgcagtctaaggacctgcagcatcagcatctcctgggaatttgttagaaatgtgggatttctgcctccagaacaggtgaatcacaatctgcattttaacaagatccccatgtgactcacatgcacattaatgtttgagacattctgttctaggggcacagtctccatataaagtagacagaatttgttaaacatgtggttacccaagtgaaatgttggtgggatttaacatataccacatagtgataagagccatgattttcctattcagaaatcagaggggaaagtagtagttgatgaattgtaggttagggaaattatacatgcagaaattaaaagacagtgtatttgatgtctttatttcctaagtggttagtttggtaaatttggttcataaaatggaaaaatccaaacaccaagatttcagattatacttccatttttttttgtcggtttctcctctaaagacagccaacaaaataataaaagcaatagctaacattttatttatgcttactatatgttaggcactcattttgatcagttttcatttaattttcatgataactctatgaagtagactgttattctcattttttgtatgaggaacctggagcacagagaggttaaacaacttgcccaagatcacacagtggataaatgacaaaatcagaatccaggcccaagtaggattagctgagcatgcgacaccctttatgggaagtcaacactggagggcttagatgatcatctcaggcaaacaaaaacaaaaactaaattccatgggctgaaatatggctcagagaggtcacattcttgctcaaagtgactgagatggaggaagagctgggatgagtcttgtgattcttcatcccataatcttttaattgaaaacatacgtttttggtatacaacaaaaattcattgctcaatctcaatgctgtttcaaattctgatatttgaaccctacacctcaaatactaagagctgtttttgtaattaagactcctttttttcatctagtaaattaaccaaacaagagacagctgtgcaaggaagcattctgtttcccatactggttgctgatgatgatttttaaaaaggttagtatttatgaccggctctgcctccaaacggccaaacttaaaaagatggcaaaaacaaagcaaccaaggtcatgaagaatcaatttgtttcttagctgccatctagaaggttaaaaagctgccaaatcatttagaactgacaaaaggataattttgagtttatgatactgagcgtcaatgcctatagagggcctactatgtgccatttcatttactgtttcatttactcactacaacaacattgtggaggagatgctgtgattagccccattttacagatgagaaaaccttggctgagagagcaaaagatgttacccaaacttacagatagtaaataggtagctactttcataacacctttgctatcttctacaggtgaggcaattggagcccacagagataaagcatttgtcacagtcacaaaagtaatttaaggggaagtgctgcacttggaatcttcctcaggatgggtcaactggcctgatggcaaatgggaactcttgtaattactatgggccatttcggcaggactattgctttgagagaggttcatctatttccttagcaaaaaccacttcaagaagcaaaatctctcctggaaaatgaatggaggaaagggcatttttctttagaagcccagccgggcgcagtggctcatgcctggaatcccagcactttgggaggctgcagtgggtggctctcttgagctcaggagtccaaaaccaacctgggcaacatggcaaaaccccatctctaccaaaaatacaaaaaattagctgggtgtggtggcacacacctgtggtcccagccacttaggaggctgaggtgggaggattgcttgagcctgggaggtggaggttgcagtgagtcactgcactccagcttgggtgacacagtgggaccttgtctcaaaattttaaaaaagcatataaaggacattatgtctaaatgaatagggttgtctcatttcacccatggagcaatagtgtctgaacactgatgtttgggaagttgagagacataagttttggggcggttctcagatggctgaataggaacagctccagtctacagctcccagcatgagcgacgcagaagatgggtgatttctgcatttccaactgaggtaccaggttcatctcactggggcttttcggacagtgggtgcaggagagtgggtgcagcccactgagtgtgagccgaagcagggcaaggcatcacctcacccgggaagcacagggggtcagggaattccgtttcttagccaagggaagctgtgacagacggcacctggaaaatcagatcactcccaccctaatactgcacttttccaatggccttagcaaacggcacaccaggagattatatcccacgcctggcttggagggtcccacgcccacggagccttgctcattgctagcacagcagtctgagatcaaactgcaaggtggcagcaaggctgggggaggggcacccgccattgctgaggcttgagtaggtaaacaaagcagccgggaagctcgaactgggcggagcccaccacaagctcaaggaggcctgcctgcctctgtagactctacctctgggggcagggcatagctgaacaaaaggcagcagaaacctctgcagacttaaatgtccctgacagctttgaagagagtagtggttctccaagcatggagtttgatatctgaaaacagacagactgcctcctcaagtgggtccccgacccctgagtagccttactgcgaggcaccccccagtaggggcagactgacacctcacatggctgggtaaccctctaagacaaagcttccagaggaatgatcaggcagcaacatttgctgttcagcaatatttgctgttctgcagccttcactgctgatacccaggcaaacagggtctagagtggacctctagcaaactccaacagaccttcagctgagggtcctgactggtagaaggaaaactaacaaacagaaaggacatccacaccaaaagcccatctgtacgtcaccatcatcaaagaccaaaggtagataaaaccacaaagatggggaaaaaacagagcagaaaagctgaaaattctaaatatcagagctcctctccccctccaaaggaacacagctcctcaccagcaatggaacaaagctggttggagaatgactctgacaagttgagagaagaaggcttcagacaatcaaacttctctgagctaaaggaggaaatttgaacccatcacaaagaagctaaaaaccttgaaaaaagattagacgaatggctaactacaattaccagtgtagagaagtccttaaatgacccgatggagcggaaaaccatggcgcaagaactacgtgacgaattcacaagcttcagtagccgattcgatcaactggaagaaagggtatcagtgattgaagatcaaatgaatgaaatgaagcaagaagagaagtttagagaaaaaagagtaaaaagaaacgaacaaagcctccaggaaatatgggactatatgaaaagaccaaatctacatctgattggtgtacctgaaagtgatggggagaatggaaccaagctggaaaacactctgcagcatattatccaggagaacttccccaacctagcaaggcaggccaacattcagattcaggaaagacagacaacaccacaaagatactccttgagaagagcaactccaagacacataattgtcagattcaccaaagttgaaatgaaggaaaaaatgttaagggcagccagagagaaaggtcaggttacccacaaagggaagcccatcagactaatagcagatctctcggcagaaactctacaagccagaagagagtgggggccattcaacattcttaaagacaagacttttcaacccagaatttcatatccagccaaactaagcttcataagtgaaggagaaataaaatcctttacagagaagcaaatgctgagagattttgtcaccaccaggcctgccctacaagagctcctgaaggaagcactaaacatggaaaggaacaaccagtagcagccactgcaaaaacatgccaaattgtaaagaccatcgatgctagaaagaaactgcatcaactaacgagcaaaataaccagctaacatcataatgacaggatcaaattcacacataacaatattaaccttaaatgtaaatgggctcattgctccaattaaaagacacagactggcaaattggataaagagtcaagacccatcagtgtgctgtattcaggaaacccatctcatgtgcagagacacacataggctcaaagtaaagggatggaggaagatctaccaagcaaatggaaaacaaaaaaaggcagaggttgcaatcctagtctccaataaaacagactttaaaccaacaaagatcaaaagagacaaagaaggccattacataatggtaaagggatcaattcaacaagaagagctaactatcctaaatatatatgcacctaatacaggagcacccagattcacaaagcaagtccttagtgacctacaaagagacttagactcccacacaataataatgggagactttaacaccccaccgtcaacattagacagatcaacgagacagaaagttaacaaggatatccaggaattgaactcacctctgcaccaagcggacctaatagacatctacagaactgtccaccccaaatcaacagaatatacattcttctcagcaccacatcacacttattctaaaattgaccacatagttggaagtaaagcactcctcagcaaatgtaaaagaacagaaatcacaacaaactgtctctcagaccacagtgcaatcaaattagaactcaggattaagaaactcactcaaaaccgctcaactacatggaaactgaacaacctgctcctgaatgactactgggtacataacaaaatgaaggcagtaataaagatgttctttgaaaccaacgagaacaaagacacaacataccagaatctctgggacacatttaaagcagtgtgtagagggaaatttacagcactaaatgcccacaagagaaagcaggaaagatctaaaatcgacaccctaacatcacaattaaaagaactaggagaagcaagagcagacacattgaaaagctagcagaaggcaagaaataactaagatcagagcagaactgaaggagatagagatacaaaaacccttcaaaaaatcaatgaatccaggagctggttttttgaaaagatcaacaaaattgatagacttctagcaagactaataagaaaagagagaagaatcaaatagatgcagtaaaaaatgataaaggggatatcaccacccatcccacagaaatacaaactaccatcagagaatactataaaaacctctacacaaataaactagaaaatctagaagaaatggataaattcctggacacatacaccctcccaagactaaaccaggaagttgaatccctgaatagaccaataacaggctctgaaattgaggcaataattaatagcctaccaaccaaaaaaagtccaggaccagacggattcacagccgaattctaccagaggtgcaaggaagagctggtaccattccttctgaaactattccaatcaatagaaaaagagggaatcctccctaacttattttatgaagccagcatcatcctgataccaaagcctggccgagacacaacaaaaaaagagaattttagaccaatatccctgatgaacattgatgcaaaaatcctcaataaaatacgggcaaactgaatccagcagcgcatcaaaaagcttacccaccatgatcaagtgggcttcatccctgggatgcaaggctggttcaacttacgcaaatcaataaacataatccagcatataaacagaaccaatgacaaaaaccacatgattatctcaatagatgcagaaaaggcctttgacaaaattcaacagcccttcatgctaaaaactctcaataaattaggtactgatgggacatatctcaaaataataagagctcagacatccaggtgggggcgagagacatcatcatcttgtctccttcagactgagctccaagaaacccatcacattacccagctgcacagccccattcctccccatttttccttcctatacctcaatcatatagtgcagaaaccccaaagccagcaaaagagcctactcttactgtcagaaacagctgcactctgccagctatctatgacaaacccacagcgaatatcatactgaatgggcaaaaactggaagcattccctttgaaaactggcacaagacagcgatgccctctctcaccactcctattcaacatagtgttggaagttctggccagggcaatcaggcaggagaaagaaatatatggtattcaattaggaaaagaggaagtcaaattgtccctgtttgcagatgacatgattgtatatttagaaaaccccatcgtctcagcccaaaatctccttaagctgataagcaacttcagcaaagcctcaggacacaaaatcaatgtgcaaaaatcacaagcattcctatacaccaataacagacaaacagagagccaaatcatgagtgaaccttaattcacaattgcttcaatgaaaataaaatacctaggaatccaacttacaagggatgtgaaggacctcttcagggagaactacaaaccattgctcaacaaaaaaaaaaagaggacacaaacaaatggaagaacattccatgctcatgggtaggaagaatcaatattgtgaaaatggccatactgcccaaggtaatttatagattcaatgccatccccatcaagctaccaatgactttcttcacagaattggaaaaaactactttaaagttcatatggaacgaaaaaagagcccgcattgccaagacaatcctaagccaaaagaacaaagctggaggcatcacgctacctggcttcaaactatactacaaggctacagtaaccaaaacagcatggtactggtaccaaaacagagatatagaccaatggaacagaacagagccctcagaaataataccacacatctacaaccatccgatctttgacaaacctgacaaaaacaagcaatggggaaaggattccctatttaataaatggtgctgggaaaactgggtagccatatgtagaaagctgaaactggatcccttccttacaccttatacaaaaattaattcaagatggattaaagacgtaaatgttagacctaaaaccataaaaaccctagaagaaaacctaggcaatgccattcgggacataggcatgggcaaggacttcatgtctaaaacaccaaaagcaacaaaagccaaaattgacaaatgggttctaattaaactaaagagcttctgcacagcaaagaaactaccatcagagtgaacaggcaacctatggaatggtagaaaatttttgcaatctacgcatctgacaaagggctaatatccagaatctacaaagaactcaaacttacaagaaaaaaacaaccccatcaaaaagtggttgaaggatatgaacagactcttctcaaaagaagacatttttgcagccaacaggcacatgaaaaaatgctcataatcactggccatcagagaaatgcaaatcaaaaccacaatgagatgccatctcacaccagttagaatggcgatcattaaaaggtcaggaaacaacagatgctagagaggatgtggagaaataggaacacttttacagtgttggtgggactgtaaactagttcaaccattgtggaagacagtgtggcgattcctcaaggatctagaactatttgacccagccatcccattactgggtatatacccaaaggattataaatcatgctgctataaagacacatgcacacgtatgttcattgtggcactattcacaatagcaaagacttggaaccaacccaaatgtccatcaatgatagactggattaagaaaatgtggcacatatacaccatggtacactatgcagccataaaaaaggataagttcatgtcctttgtagggacatggatgaagctggaaaccatattctcagcaaactatcacaaagacaaaaaaccaaacaccccatgttctcactcaaaggtgggaattgaacaatgagtacactcggacacaggaagaggaacatcacacaccagggcctgtcatagggtgggcggagcggggagggatagcattaggagatatacctaatgtaaatgacgtgttaatgggtgcagcacaccaagatggcacatgtatacaaaattaacaaactgcacattgtgcacatgtaccctagaacttaaaatattaaaaaaaaatgacataatttttggaaaaaaaatcacagcttaagatacaaacatttctagtaatgaaagtctggcctgagatattttctgaccaaatagtaaccaaaataagaaaaaatattgtgctgttaacaattattctgtttgttctgatacgtgtctacagatgacagcttctgtggagagaacagaattaacaaaacggtgatgtcaaaatgctctccaacctaaatgtggcatgtttctcttgtatattttcattgttatattcacttaggacaatgtggcaagttcaggggacggtgctgcaaaatggtccatgcttactacaccaaggagaattggcaatttgcttcctgggaggccctatctacaactgcctcaattctcaggacacatttacctagaaagttgaaaagatggggagggtgggaggaaactgccaaagtgaggaaactgctctggaagaaaaattccatacctgcatgttcccttcatgtgaagattatttgttcgatccaaataattggatccctggctggggagatccccggctggtggatctcacccaggttggtttatttgtttgttttttttttttgcttctgtggggcatagctggcaatatctggagacattttttggtggtcacaacttggagtgtgtgtgttactggcatctagtgggtacacgccagggatgttgctcaacatcttagactgcacacgacagcccccacaacaaagaattatctgtccccaaatgtcaacagtgctgagactgagaaactgtgaggttagtgagtttccaatgcttctgattcaaagcgttcatcctctgacgctgggctacctggcactggagttcctaatttacacctgttatctcctttctaccagtcagcatgactgattcccggagggaatgtctggttgacagtaagtaaggtatgaatgactgacaggtgtagtgctagcagaaacctattttaaatggtcactaattgagtggaaagtcagcttcaatcaatggagtttttgggagggttccatagtaatgtggacatttgtttttggaagatataaaagatggtggggccaagtgcggtggctcatgcctgtaatgctagcactttgggaggctgaagcgggtggaatacctgaggtcaggagttcgagaccagcctggccaatatagtgaaaccctgtctctactaaaaatacaaaaattagccaggtgtggcggtaggttgcctgtagtcctggctacttgggaggctgaggccggagaatcacttgaacctgggaggcagagggtgcagtaagctaagatcgcgccactgcactccagcctgggcaacagcaagactccatctcaaaaaaaaaaaaaaaagatggtgggatttataaagcactattcccttttaaaagtcataatacacataagtatatttgtgatgtggtgcttgtgatatataatcatgaatgcttttttcttacaagcaatgatttgcacctggtattgatcacaattgctttccagcaaggggagaaacagtacaggaaacttcctgttccctcaacaaaccttactttcatttcccttcattgctaatattgactggtgggctttgatatgatacagccgatttgttaggtattcaaaatgtcctgtcaccgtaaacctcaggctgtcttctctctggactgccgtggacctatatttggatggcacactgtgtaggcttttatcttaagcaagtgaagcagacacagcttgaaaaaataatgagcagtggggatgcactgcagagatgtcttctaaaatgagaaggcttagaaactgaagattgtattctttttgccagcttatgatggtgccaaaccaaagtgatcctaccttggctaagccacactggagtgacttcatgaagtctttatcttgttcttcagactctttgtttttccgaccctcatctagggacatgtatgctaagatgatgtgcagcaatatttcatgcccagtttcagaggcaaattaaccagatcaattggtcctagttcaatgggctctgagtaataaaatgcagacaatatttgcaggctaaaaaggaccttattaccacaccagttcaactttatttatagaaaaggaaattgaggctgggcacggtggttcacgcctgtaatcccagcactttgggaggctgaggcaggcggatcacctgaggtcaggagttagagaccagcctggccaacatggtgaaaccctgtctctactgaaaatacaaaaattggccaggcatggtggcttatgcctgtaatcccagcactttgggaggccgaggtgggtggatcacgaagtcaggagttcgagaccagcctggtcaacataatgaaaccccatctctactaaaaatacaaaaaattagctaggcttggtggcaggtgcctgcaatcctagctacttgggaggctgaggcagaagaatcgcttgaacctgggaggcggaggttgtagggagccgagatcgctcccttgcactccagcctgggtgacagagctagactccgtctcaaaacaacaaaataaaacaaaaaacgaaacgaaaattagccaggcatggtggcgggcacctgtaatcccagctactccggaggctgaggaaaatcacttgaacttgggaggtggaggttgcagtgagctgagatcgcaccattgcactccagcctgggtgacaaagaacgactccgtctcaaaaaaaaaaaaaaaaaaaaagaaagaaaagagaattgagacccatgaaggtgatatggtttgatccaggccacttggagagttacaggcaaaaccaagccttgatcccccgctattatgctgacacagaacacaaccgtccatcagctgctttccagatagtacagggagtgctgagacagcctgggagaaagctgggtgaaggtaaatagccctcatctagatgaagcgacctcctcatttcagttactggattcctctgtcttctgtatctaatttgtcctcaagattaaggcagcagctgactatttaggattaaataatattgagccaaaacattcagatgattccttctgccaagataactggcagacgttctaaaccagtgtgcccctggggagtggcaaacaatgccattctttaagcggagtgagcaactctggcgatacggtatgacatgaacaatgggagtggagaacagcagcaaaaaactgtaagggtgccaagtagaccagacccttaaatggcaagagtttctgagagagagaagagaagaacagagaaaactgattaggaagtgtgtttggtgaaattatcactggactgggccaagctgtcccaggtccaggagcctcatactgtagccagtttaggttttgtcctcttggccagtgcatgtggtgttcaaaagcctttatttagttgatttgtggcacatggaaaattcttgagaagggatggggcttgacagggtcaggaagcaaagcacattcttaatcttggaaagttggaatcttacccaggactctattaattaaacatgccatggactgtgtactttggaaggagaggaaacttatcatggatagaactgtccctgcctgaaacagagagaaggctaatcccagccctggtcaatatttccagttctcctaagacaagagggtagagaagaaccacatatagaaggatcttcagaaaaatccttatctggaaaggagacgacaatacaatcagatgtattgtggagggaggccctagcaaaggatccaggagctttagtcatagactttcagtggtgtcttctgcacaaacattctaaagggatttaaaaaattaatgggtaattctcaaggatcaggcctggaaagtgcgactagaagactcatttctgagccaaacctgtgactctttagtgtttagctgtggaatgggttgttcaggaaaactggatggcatttggttaatggggaatgtgaaatgtgtcctctaagtttgaagcaagataacaagacagctgcatttgttcccatcacagcttttctggcaaggttggtgcatttggcctgcagatatggtcactgtgggggatcatgatgatggcacctgtcatttattattagaggctcactacctaccttctagacatgatgctatgcacattctgttatttcttttgaccctcacatgaatactgacataagtaatgatcatctccgtttcacaggtaaagaaactgagtattaagaaagggaaagcgacttgcccaaggtcacagctgaagaggtaaagccacaatggacttgaggtggatgtgacaaagcctgtgcctttagctcttctgtggcattaggggtcagcaatgcagctgtggtttagggcatataaaatggctggtgcagggctagctggagtcaagatggtatgtactttggtctgaagacccatcatcctcattatgtgccccttttctcccccagactattctgcatttaaggtaaaaagataaaagagaagtaaagagaaataaaacagcttcctggaaagcatgaagcaagagaggaaaaaataggcaggctatcaaacaaaacaaatataaaggtcctctgctctatttggaaatcataggaaacaataaaagctgagagacaagaaggagtcaaagagcaccgaaggtgccggtttcctcaggcaaaaaccctcaccagtctctgaatcccaaagaccaaggctgcatcagtggctgagatgccgacatggtgttatcctccttctcttggggaccttgcttgccccttctgatctgtcagtgagtaggaggggctgctgcaaatttactgcccttctggtcctcaggaagcctgcaacctggcctgcaaccagagatggtcctcaccatctctgaagaccctcctcatctcatttgtaaaggaggcttagcaatggaaaggccaccagtcttgaagagggctctccaatttgatgtttctgtttactcttgttgggactgaacaagtatttgtttgcagctcaaatcattatgttttatgcccttgcaaattaaacatccttcatagacataaatattatcaccccatcaaatcaatttcaaacaacaggaacaatggaaacatttgaaacgttttccacttgacctatccatcttacagatccatcattcactagtttattctatctagaatttctagggatgaacatatcttcacagcttagctatagagggcaaaaaagcaagagcactaacatttactgagtgctttctcatgacaataactgtatatatatcatttattaatctaggctctgtgcctttaaaaaaaatctctgccatttccccagagtgtaccataggacttgacatgtagtaggctctcagtaagtgtttactaaatgatttaattaattcacaccacaactctaggatgctatctgcccccattttacaaggagaaaattgaggcttacgcaacttgctccaagtcacaaggttacttagtggaaaactggggatttgaacccaaggacacatgacgccaaagtctgttttctttccattactccatgccaactccaacagcaaccaggaaaggtgggtaaaacagaccatcctacccctgtctagagatgttggtaaaacctggaatagggtcagaggactgaaacagacactttttaaacaaaaagatgacttcactgtaaagatcaagcccttcctgaactgatctccataacgttattaggcatttgtatagccctttatgacacagactcattatcaaaatctgcatactcctaacttcctgggcacacagctagactgcatttcccagcaaccttgcagtgagacacggccatgtgactgaggtctagccaatagaatgaatgaaagcattgggcactatttccaggtctggcctgtgaaacacctcttatgtgttttgtttcattgtctttctcttgcctctgtttagtggagaaaattctgaagtcctagaggtagatggggatgtaagaaggaaagaacctgggtccataaatgaccttgacaagtgtcacctgccaaccaagaacatgtggtactagacttagcatgagttagaaataaaattctgttgtactaagtcactgagattttggggttcatttattgcagtggagagcattattttgctaatagacgctttacaattccaaatagcttggctatcttttatatcattcaatattttaaaaatccagtcagagtcaatggatgcttaaggtgtgagaagtgtgaaggcaaacaactgaatcgtctgggtgatgcactgctgcagggccacacatttattacttcaagttaatgggctttgtttctccacctgtaatttcatggcattgaactagatggtctctaagattccttccaatgctgaacttccatgagtcagatgttaaaaatatgaattgctggctgggcgcagtggccagtaatcccagcactttgggaggccaaggcagccagatcacgaggtcaggagatcgagaccatcctggctaacatggtgaaaccctgtctctactcaaaaaaatacaaaaaattagccgggcgtggtggagggcacctgtagtcccagctactggggaggctgaggcaggagaatggcctgaacctgggaggcggagcttgcagtgagccgagattgtgccactgtactccagccttggtgacagagcgagactccgcctcaaaaaaaaaaatatatgaattgctgtgtttagaaactgtgatctcttgactatgagcttctcaaaggcaagaactcttgctcagtcatgtttatatgtttagtatgtaatatctgagatgctcaaaaatgttaaattgtattagaattttctgttgagaaacttaaagaatttacgaatgttctgatttatcccaataatttcttaatctaatttagagcatggtgttaaatgattaaacttctcatgaatattttcattatgcattgctgagttcgatgggctattttatattcatttacatagaaatctttgaagaatgattttataataatactgaaagacttttttgatgaaaggtaatgccagcagtaattggtattctgatggcttcatttatggttccatagtccttgtaccccagttttctcaaccctaagtaggaattacactcttataatattaaaataataaatattataagaattataagatattaatataatatttaattaatataagaatgtaatcctacttagagttgagaaaattggggtacaagaatattcagaattttctttttcaaatgtttctaacctgaggtctataaaagcagcgtcagaggaaactatgagccatttaaaaagtttgaaaaggcccaagggaagttgtacaataatatgaggcagtctgtgacacttccatgaaaaatgccttcagatttttgaaaaagatatagaaatttttctatacatctgtatagcgtgggaacattgatcatttcatcctgctcattgaaaacatcagattagtaaccaaatatgtctttgatgattaaaaaccagtcaatgaatgctattacttcataaaagtggcttggcaggtaagatgtttgaaagcacggggttcaagggacgtgtgtgttgggagaaaataagaggatcttggcaaaaaaaaaaaatgttgaaaatcacaatttgacaccaagcaagtaaaatgaaattgaattaagggaagccagtgcttttaaacacattttattggcagtagtgggaaggtatgtttcccctcccattttctgctatgacttcctacatgatgtgattgtatcatgctaagtcctccatcctgcaggacgctaggcattcaggaaaatactgtgtggtgtggtcccttgccttgtctggcctaggaactgatgcctgttaaaaaattaagcaacaataataatcatagcaacaaatgtttaaagatgcttattttatcagggattgcagaaaggaagagattgtatgaaaaactatctacttccttttgcccgaattgtttgcttcaaatcttatgtttagattactgcttcattaaaaatatctttcctggccgggtgctgtggctcacgcctgtagtcccagcactttgggaggctgaggcaggtggatcacgaggtcaggagatcgagaccatcctggctaataccgtgaaacctcgtctctactaaaaaatacaaaaaaactagctgggcatggtggcaggcacctgtaatcccagctactcgggaggttgaggcaggagaatggcttgaacccaggagacggagcttgcagtgagccgagattgcgccactgcactccagcctgggcgacagagtaagactctgtctcaaaaaaaaacaaaaaacaaaaaaaaatttccataaagaataacaaataaattttttgtctctctctctctctctcttttttttttttttttttttaaaaagaaaagtccttagctgtacggaaaattcttttagaaaattctagctagggtgctaaatttgtatgtgacactagtgagaagacatgaattatgggaatgggctaagcaaagctatagacatttaaggttagctgcaaaacaaacttcttaaaaaagtacaaacactcatttacatttgttttttttttccattgtaggatcgtaattctgttggctgttttctccacagtaaattaagttagtgagtatctactatgtgccaggtactccctcataatggctgttgtatgttgtgccccagtgctccagactctatgttaagtgatttatataaatcttacatcctcaccacaatcctttgagaaaagttcagcattttcagcattgggatttttaagatttccccaagtgagttaaacatgtagatcaggctgagaacaataaccctatggggactgctcaccagagtgctatattctcttcagaccccaaaatggaagtcctctcatttatttaaaaaaattaaaaataataagtatataaatacctcttcccataaccaaaagtaccacacatctaaagacaatacattaaagcagcatagaatagcattctaagctcgggcgtggtggctcatgcctgtaattccagcactttgagaagccgaggtgggcggattgcttgagcccaggagtttaagaccagcctggtcaacatggtgagaccctgtctctgcaaaaaataataataataaaaacatttagctgagtgtggtggtgtgtgccagtggttccagctactcacaaggctaagatgggaggattaactgagtctgggaggtctccttgggaggaggaggtcactgtctccatggcagtaagctgtgatcacaccactgcctgggtgacagagtgtgagaccctgtctcaaaaaacaaaaacaaaaaaataggattttaaactcgatgcctatcaaatcatttgtgggacagagaaacaagtttcctcatgactgttccattacttcaatgaaaaatgctggccttggagtgcaggcctgaaggactttgtgatcatttgagctggagagtttgctgttctgatgagccatttgggtaagtgaagatgctgatgttcactggtcaaatgcatggtttcaggaaccatgagtttgtcatttgtgggcaaaagtaacaacagacacctacacagtcctcaggagtagagcatcactaattacatttcaatttgcccaccctaggtcaggttaggcctagattaaagggtaatattttagatttttttgtaggtactcagatggccaaactaacattttctgtggaaaaaacaaaaccctctacatcagtgattctcaaacttctgtgtgcatcagaatcacctggagagctaattaggcacaagaaaagccaaggcacttgtcattaggtaagatggttggatagaacttttttctttttaagctaaatttcccagtgattctgatcccaccaccaagtttgagaacaacagctctttccttaacaccagatgcgtagcggaatcacttgaggagttaaaaaaacaaagctaccagaggtttcaccttacaccaattaattggaatctctaggggtggggcccagacactggtattttttaacagatctccagctgatgtgtaataggcagcagggttgagaaccactgtgtcccactgggttgtactttagaattacctggacagttttaaaagaatgctgagtcttgggcccccacctggagattactattaaactggtctaggatggcatggacatcaggactttaaaaagctcctagagtggccaggtgtggtggctcatgcctgtaatcccagcactttgggaggctaagggggatggatcagctgatcccaggagtttgagaccagcctgggcaacatggcaagaccccatctctacaaaaaatacaaaaattagctaggtgtggtggtgagttcctgtagtcccagctactcgggaggctgagatgggggaatcacacgagcctggaaggtggaggttgcagtgagctgagatcattccaccgcactccagcctgggccacagagtgagaccctgtctcaaaaagaaagctcccagagggattctaatatgcagccaagtttgagcaggacaaacttaggtcctctttcaaagagagggatcaaatttctggtcacctggctgtcattttggaaactgaagttgttctagaagcaattgtccgaatctctaggagttttgagggaggtttttgctaatctgactaaatttgctgagattttattaatttggtctcagcttactaaaaaggagaagaaagaatgcttaatacatcttccttggaaatgcagcatgaaaaagacaaagaacttcagtcaaggttaaacaaaagaaaaaaaaaaaaagaaagaaacataatcaccatttgaagccatttaacccacagtttcccagtctttgggaactgatggtccaaatactgaacagtctgctgtggcggccctgggcaagacacttcaccacattggcttcagcctgctaatgtgtgaaccatggcttagagaaaatgactcagttcagttacagaaccaagacaagaaagcatctgcactctgcaggcttggggaactggcattccacactagtttcctttttacaacacagccagattccagagcgagaatgtcatcatagccaagacttgaaagaaaagcaaagatggataaaacaagcgcctgggacttttcagatggcaatggtggcaggtggtggtgccgtataaaaataactcttggctcattgcaaacaaaataacaccatatagtcattagaaaccaaattctggttgggaaaattgttttcttttgaagggatttgcacctatatatgtgcaactgctgtggactttagtggcatttaggagactagagaggaagatacatccccacataacagaaccttgttaagttatagctgttatttgtgactgttaggaaaaaagttaggtagagatgtgctggacagctcttggttacagcagggcttgcaggagactgagatgagtttagcagagtggtgatggtggggataatggggatgatgatgtgggaggcaatgatcatagtggaggttggtgtgatgatgattgtggttggggtatgagaagaagccagctttgtaaagggtgccttctgtaaagggtgacttctaggaagaatacaggggttgctgagaaagaatttttttttcactcttctgctcccaccttctactctctataaagtcttgtccttttgacatttcaacttcctgattacctagctgctcaaatttggaaactgaagttgttctagaagtaattgtctaagagttgctgggagatttgagggaaggttttcgctagtctgtctggatttggtgagattttgttaatctggtctctttcagaaagctccctacttttctgtagtaagtttctcttccaagagaagctcaggaagttaaacaggagggatgaaaggaggacagagacagtcagagcacaagaggaccagtccttcttcatgtagcctatagggcatcttttacccagtcataccacatgaagagttaccgttctttgtttcatgaggaaaaaaggagcatttgctcttgttttaaagaaaaaggtgatgtattagctgcacagaaattcttcctggtggtctcttgatttgccccttattatggcagaaactagagaaactcgtgaactgaggtgctggtctcctctcttccctagtctggatggaagccatggagtgattttcatcctcttctaccaatttgtgtgtgacaggaaaaaaaagtaagatgacaaatatttatggttttcccttcctttgctttccaaggtaagtgaggtcccaaggaagatctgtttattttgctgagtggggttttaaaaggaaatacatatcgaggaagtggagagaagaggctcacagtcttgaaggtggaggtagtagtggggagaagagggaggggagcgaagggtccagattcctgactgcagcggggaggggaggcagtgtgtacagccgactcatcagggttttagcctctggggagagagggagaagaggatgtgaggtttcagcagttcctgtgaggcatggatctgtgggagagatgtctgagcatgaatttaaagactttctgtgtgatgtgtgtaatagcctcccttctgccctcaaggaatttgggggaagacagatgcttcctttctagcctacttgcagtgagatttttatttcttttagaagtgacagcatgcagagggaggagcaaaaaggcccccatcacattgtgtggttaaatactgaagaaataaaatcaaagcttagccaacagtagagctagctatttgggctatttttctttctgccaaactattcatggcagcattcgtaatgtgtatagatggctgtatggaatccaaggccaagttttatttttggtcacatctggggagacaggaattcaggagaaattgcaataaacctccagatttcccttcagaatggctatgccaggagcgtgtccatctatctaaagcctcccagctctatggcactgtgggaagcggagccgagggtcgtgttggcattctgcatcgttgctctcctttggcttctgttattacttcatctacacctgtaatcagtcctaaggcctggggattgactgtcctgagtttgggagaagggacagaaggacctccaccaatcaggtttgcccctcccttgcctcagaggctcaccactttgtgtgagtgtttggtgcacaaaggtaacaatgcaagtgttaaaggtaagtatgagagagaaaaatcctcaaccttaagcaagtcattcctgcgtctaattaaaaagaactacatgttgaaataaaagtgctaacacattccaaagagcccattgaggtctgtccctcagtactcatcagaagatattactaagcttgacaacaaagaaataaatcataaatgacacctcaatagaactcattctatataaattaaaagcttttgtatgaccaaaaatgctatggaaccatatttacaatttatttgtaaatggtttgaaataaaaattagatagagatggaaagagagagaaagaagattaaagcaaatgtgataaaattaacattttaagacttagggtaaaggatggcttgaaattctttgtattaattttacaactttcctgtaagtataaaattatttcaaaggaagaaaaattaaggttaaatattgccataaacaaaaagaagagatatgtactaaattgagaaaaatatatatactgtttaagatagaaaatgaattaattccctaatatctaaatcattaagaaaaagacaaataccacaatagaaaagttaaacaaacaggttaagttataaaaggtgaagtttgagtcaccaatcaatgtgtgtgtggggggggtatatagtcaaatttataatcaataagaaaaatataaagttttgaaaggcttgatacaattttgcctaataaattacctcctcaaaaacaaagaaataggctaactataccaaaaatttctacatttggagggtatatacttaaatggaggctgaactgctgttggatgtctcaattggtccaataatctggctaaaatgtgaaaacagaaaaagtttttaaagctgttcagtccctttgacccatcatttcctttaacatagtagagtttatccagagggaaattatcggaaagatgcaaaattatgtacaaggcagttcattatatattcatcatgtcaatatgtaataaatatgtattcatcgtatattatttataacaatattatgttaatagcctaataatcagggactatatcaccatatgatgaattactaagtagccatgaacaaatccctttgaggaagcgtgtttattgacagcaggaaatgttaacaatatgtacagtgttaacattagttatttttgaatggtgtcattattttgccatcagtaaccttttgaaaccatggaaagccattctacgtaggttgtaggacatatgcaccaccgtgaatctatttctgaaggaagaaatggccattaagaagcagctgaaaaacctaagggacacctgaaggtccacctttgaaaaatggcatgggcttcacaataaaatgccgagttttcccaacttaaatgttttgtctgactctgaaaagcttgttcagtaggacagtctcaaaacacaaaatgcactgcctcagtgttcactttttctttatactcaaccatcaatgtatgtatgccttactttatgaacatgtgatttataaatattcaaatttgagaagtggaaggggaactagggatgaactgctttcactttctcattattagataaggaattcaagatctagggagatgacgtgacttgcttagttaacttagcaaaaggagactctagctttgatattcaacatttagcatattcgcatctcagcctaaattgccctatgctgttgatcatggttttatccaaaatagagctcatatatccataacacataaacaggttctacaattaatgagaaaaagacaaaaactacagtgggcaaatggacaatcactatgaacaagcaagttacagatgcagaaatgcgagtggtgaataaacatgtaaaaaatgctcaacctcagttgtcataagggaaatttttaaaaacctgggttgttctcagttttgcttaacacatgagccctcccaaagcaagctcacaggaaacagtacaaagatcacatggtgggaaattttggggtaacatctgaaagctcctatctatcttggcacgcatcccttccctgctacagagggatactcaagaataatgccttgataaagaaaataccttcccacagtagggaagctaaacaaacaagcaagtcacaaagaagtccaagttaataactgaatggggaatacattattcacattaaaggcatcataatagagtgactttaaattactggaggcccagtttcaatgaaaacgtcaagtactttgccagctttatgccatatcctaatatcatacagccaggttcagcgcaaacataatgggtctttgtttttgcctcttccagcacagtttgaattcttggtttcctgttcagtcaaggccaaaagcctctaactttggtatttaacattttagctactcatatcttggaacaaatttccctatgctgaggatcacggttttattaaaaatagagctcattatattgtcatcaatgtcagcagaatttccctcagattatctaggaagtgatgcttaattccagacagataaaatattgtatcaaggtacttttttacttccttctttaagaattgtattttttttcttgtttctgctgaggttggaaggaatcgcatttttcaatgaatgatttcatatagtcctaatttcaaattaggtggcgtaaagcagtgagaaaattttggcaagacctgactctactgtagcttatattaagtaacctcaaaaaataaacaattattcattcgagttagtgcaaagtacataaatttaataagcattgcggttgaaagagcctacaaaaaacatgcctcatttatctgaaaatgctgacctgttctgtttgaggaaaatagattccatattaactactgatcatctaaaaaatgattttcttttcataagggtttaattgatttcctgtgttgaatagcagtaatattatctattatgcttttcaaaggaaaaatatgcacatttggcctttgaagtatgctcctagagcaagcacttagttctgacagcttataacttcattatggtcttcctttgggtttcttaaaacatgtacccctgagcccactgcaatcgaaggagggaaaagaacattgttttatctcatacacaaacaagggcatctaaagtaatgattttctcatatgagcccactaacgtatactgtacatgtatgtgtctggagtaggtttcttttgaaaatagaactacaattagtttctccactatgaagcaaatgctggaagtgaaaactccctccttcactaggaggcagctggggttctggctcagtctgcgaggaaagcatcccagcttccacaagatgggctgaaaagctggcttaccctagagctgtctaggagtgggcctagattcctagctcagctctcaagctgactcagacctgggggctctgctcagtaatgagatggtttgtagctagaagagaactgcctggaccaccctgggctctagaacaagggtccacaaagtatgggccaaagctgacctgctgcctgttttataaatttgtagtaaaccacagccaagtctatttatttacatatagtctatggcttttcatgctacaatggcagaattgagtaattatgacagacactgtatgggctgcaaagccagaaatatttattcactggccctttacaacaacaataaaaattgccagcccctgatccagaggagctggaatgaatggtcactctccctagatgaactgcactgtacctagaactaatccccacagcaagcgaagaccattttattacctacttttacaccatgttttgccatttcatatgtcttggggtatgttctttgagtccagatctttggacactttttcaggtgggcaaattatcatggagtagagagccatccttatagcacctgctctcacactgtcctcctttatcagaaaggaatactgtccctccattttgcagcgtggctacctgctgtctggtatctgtgtgctcacacctgcgtgtgcctgcaaagacttaggccatcactcctcctgactgagattgccattcatcccaacagaaacattgaggctgtagctaaggttgaatgtgttggtttatgacgtagaaggagtgcgattttagtggcggagaatttgacctagttggcagtggaatagatgtgggagtgggtgcgttttggtgcctgttgatgtgaaataagaagatatgtgattccgatgccctcagctcctacaggtgtgaatcattgtgatttgcccaggcaccccatctttttgctatatcaggagctccagtacgggtgggtagagaggctgggcaaagatgctgggagagttaaagtttatggtcattgggaggcttcaaaacttttagaaggctgagtggcaactttcagttgcttcagtttctcaggtctactggagaataagttcttggagcaatttgtcctacatgtttagcttatcatagggtggggaggtgacatgaatagataatcaaaggtcaggctgcatcctcgacacacagaggtctatgaggacctgccctgttgccatggtaacaaaaaggacagtggtggacttgctgctaggctggaaggtatatagctgaggtcataaactcacagctcatgggttgattctagttagcagacatatttcgactgagccataagtctataaaatttttataagttatttgctaacatctaaaatttgggatatttcatttaaaatccgaatttccaacttctcttgcaaatttgaaatctctggacacatggggcttcattccttcttgtcagtgattgcttagagtgggagatggcttccttttagagagaaccagagttctccagctttgtttacttgtttttccttttacctaacctttgtcatcactggtgttatcagcctattccctggcaccactgagtgtacaaccatcgctctataaattgcacaaagaatttgtgctattgcaaccttgtattcctccaaggtcattctgcctctcctttgacccttgctaagagttttataactgacttataccttacatgacctaatcatattccattctgactctactgctgaatggaataaacagccaacttctgaaaatatacactttctgtggtcacaaagtatgtagagccatttattatattaattggaatgactgtaagaagtaaacatacaccgggtgcagtggcctactgtaaatccaagcactttgggaggctgaggtgggagaatcacttgagccctgggaggttggggctgcagtaaaccgtgagtgcaccactgcactccagcctgggtgacagagcaagaccatgtctcaaagaaaaaaaaaaaaaaaaggaaaaaaaagaaaagaaaatagtaaacttagtgtgcaatggctaaaggatggctaaaaatgaatagtcatttcctctccatcacctttctggtgaggatgcatcttatatcagaagaagatggaagtacatttctagggaggtattcacaggatttaataacacttattggtttggaaataacggttgctaaaactcgcaagttaatctttaagaatctataatttcactctaggtggaacaaaaatggaggcacacaaagaaaatgtaaaaaaaaaaagatacctgtcatactgttgggagtcataggttagtaatcattctggatcccttttttcactgacatctcctacaaggaaaaaatacaaaaaaaatcacagattataatctgcattttccataatggttttgttccaaacaatatcatatgcattaattaccttgaagcaatatttgttactctcaactcagaactggggacaccgaagcataggtgggctatgtgatatgtgtaaatttgtaagacctcttaattttcatctcagggttccttctataaacatgttttaaaaataaattttttatcaagcgcacatttttccatctcagatttttaagaaagctaccagctcacagatttgctgtttatcccaagagtggctaagatgtattagcatctctaatctagatcttgcttctcaaggtgtggtctgtgggccagcagtctcgacattgcctgagagcttgtgagaaatagaaaatttgggcatcccctcagtcagaatctgcatttggacaagacccccaggtgattcatgtgcactttcaagtcatagacacactgccctagagaactgaatccatattctcatctgcccatttatgacttgtcctagtcagagctgaactccccacctcaccactaccttaatgagatccaagagcaacagtcagacttggccctcaggctggggatggaggcctggtatgcatcagtggccagaggtgcactgacccagggaagaatgccaaggaagggtgcacccaggatgacacagatggacactggtgggtgatgaacctgggtcacagtccttcagcatattgccggagacagattaggattagctttctttttctggagtgtgttctgtggccagtggtagatggtggtagcattttggcttaggaatagcactgaagcctgaggcatgggcttgaggtccaacgttgtaatatactactagctgtgggatcagaggaagtaatttcaaagcactggaaacacgatttcttcagtgtaagatgaggaaactaatacttgtcccacttatttcacaaggctggtatttctgaggtttgaagatgctgtgagtggaagtgctgggtaatctataacgtactgtgcccatgaaagggaggaacaatcttgttaaataactggttggagaagaaaaagaacgaggcagaggaagtgtgtggattatgtttacaacacagatttatacatagccattcatgctctgtctccacatctaatgctgcagcaatgacttcaaaccttgatcatacttcttgtcccattctgtggaaattacatgtttacacggctgcctttcccaccacactgtaatctctttatggcagagactgcctttctcatgtttatatcttctacactgagcggaatgtcagatacataacaggtactcaacaatatatgttgaacaactaaataaaataagatgaatgaagttgatatagcatagtgtaagctgccaaattggcacctgatggagaggatgagtattcactgctaggaaaatgcattcttgcctctgattagctcgtcaagggtctctaccacaagccctttgtcccatctttgttcacctgtccagcagcattttgagtgagaggcaccaagttctgagctgctgtaggtgagagcacaggtcgtacctacagtattgcgggtcctgactctgttgctcctcttagaaactgtgctgccattaaccaccccctctgaacccatggaagctgccatgttttcacatgctaccactcctgaatattctaaagaggtggaggaacttggcttggactgtgccccacctctggcaaaactggcttaagacttgagctggactagtaagatgatttttcagggtgaaagaaagggagggattgagggagagagaaagagatattatctagttcctctctagggacagaatttattagaagttaaaactctaacactgagaccatatctctcagccacctggaaaaagtccatttgaaggtgagagagaggatccatctgacattcacagacagcctgaagtggaaggagaaagctgtggtgtctctcggctcttcctgaggcccagctgtatcctcttctgctcctccagggatttggctattcagcccttccttggatgccctcagtaaaatattaccctttttacaataagctggtttgacttaggtttctgtcacttgcaaccaaaagaatcctgactgataatattaaaatacaacattaatacaaatgtgtcagcatagttttgtatgctttttattgtcttgaaggcgaagctataaaatcccagttatgtccttatgatattatcagttaaaaatatcttcattttcaaaattccaattgaataggcatatgaactataggaaattattgtgtgtggggcggaaagtatctaggaatggaaaaaatcttaattctatataagactttaaaaatagtgttatcaccacaaaatttggtaccaatttttctgtttagtactattttccttcaactatagtacaatttagtacttcagtattttagtgttactgttactatataacagatatagtattactaatactattaatagtatactagtgttacttttactgtagtattttggtattatttagtatttagtagtatttagtacaattttccttcagtgagctctagagttttcaatgtaattccagtaaagcttctaacaatcccccagggaaggcaggtgtcccggggcctcctttcctggtctcctgtcctacatggtgggtgttggtaaaatgctctgtactgaggaggggaatcccaagatggtcctttccacagccttggcagaggcctggagctcaccagcaaatcatgggatcaaaggagaaaagaaagtccaaaagaacttaaaagtaaagcaagctgagtttctttatttgccaggaaggaaacaaaaacagcgaagggctttgtaggtcagtgaggaggaagggtcaaggagttgttgagttagaaaggggtggctacgctaatgaaggattgacacctagcatctgtgtgtcattcattaaaacatgccctgtttctctctggtcagggaagggttttcagttagatccagtgagggtctgtgtaccacggcccttcaaagtcgatggtcctttaactgcttcaacagttcagcactaggggaagggaaatgccattccatttagtcttctaggcaactgctacccaagtagagaatatccctttgacatgggtcattcatttgtttggttatcgcgaggccttggttgaggctactctgtttaggcaatgccctaggttttgtttaaagacaacactgtggcctgtccacaagcagcttctaaactaacatagggagagaattgcaccagataaatgcaaaaatatatacaggtttcaccttacctgtctcttcagagtagactggggccatgagagaaggaaaggtcatttctacttgggcttatttggggaggattttgagtggaggtgaccccagacctttaggcccttctttcaaatagacctatccccaggttatgatttaaccctttgttctcatccttgtgctcctaaggcccatggactactctgcaaggaatgagcttcatacagaaaaactgggtggtgcctttacattacgcaggttttaagcaggggtgtgataagacccaatgtgggtttttaaagctttacagcagctcgtgggtggaaagcagactggtcaggccacggcaggtccagaatagagaaaaaggtgctggaacttgagtggaggtggtggagatggtgagagggctaggtgtttaagtgacatttaagaggtagaaacaagacttgtgaagaatgtgatatgagcatttaacactgggataaacactgcggatgcagataggttaagattggaggctctctgccctcaaggaatttacaatccattttataagctggttgggaaggaacagctaaaaataaaagtcacagatgccatgtgccaaggggtggtgctgagaatcatgcaggtggagccttcctctgccagttctacctgttctcagcccagtgctgtgtcccttaaataaagctcattccactcattggaagagtagaaaagcaggcattcacctctcaaacacacaaagtgtgtttgtattttaaaaatccaaatgatggtaaagttattattgaatcctctgaaactgaaaagtaaatggaattattatcaacacttagtaaataggtccaggaactttggaaggccttgggttccatgccacactgtgaactgtggctgctgctaattactctaacagcatcttgggctgcatggacagaaatatagcctgtagctgggcacagtggcatgcacttgatactcttagctacttgggaggccaaggtgggaagactgcttgagcccaggagtttgagaccagcctggtcaacatagtgagaccctgtctcaaaaaaaaggaaagaaagaaataagaaaagaaaaaaagaaaggaagaaagaaagaaggagggaaggaaggaaggaaaagaaagaaagagaaagaaagaaaaaggaagaaagaaagaaagaaagaaagaaagaaagaaagaaagaaagaaagaaagaaagagaaagagcctgtaggacattggtcagaccacatgtgggctgctacattttaagaaggatgtctcatgtacaatatcctggacgatggaaaacgtatcttaaggaaacattgaaggaaacctagaaaagggaagagtcacatgaggggtagagagtggtcttcaaatatctgaaaagctgtcacgtggaacagagtgcaggcatgttcagtggacagagaacgggtggagagatgctgttggagactgctgaggggcctttccctgccctgcctgacgtctaagaagatgcatgtctcataggctgggatggccacacagaagaacacagtctccttaccttgcactgctttttgctctcagggcatgttaagcctctcttgagatgacctgggtctttaagctgcaataaagcaggcgctgtgtgtatgaaatggcttcagggacaagctaaaatcctgctgcatgtccctcactccttcaaattctcctttaaagcttcattctttagctgagtgatctcaactattagggagtgtgctctcctcaagaaatgtaatgaaaaattacatttccatttaattatatcacttgcccctccccttgaaaaatgggtaagccatttggtatatattttcagagggttcacagatactttacacatgcaaaatctactcacagctgccatattaagctttggctatggactttgatcattcttaaaatgcagatagctaatggaaaagatataagttgatgtaaatgtgatctagtgaatagaatgaaaaggagacacaagagctatttttggttgggagcaaagagaagagaacctaccagcagtaaattcctttgtgggtggaagatgagtttctaaaaaacaagcctggaggctgaagaggaatccatcaacccaaggatctgtctagggctgccccattaatcccatcagacaccaactcaggctttagatcattcaagatgaattactcatggagcccactcctgcaaggcttaggtgaagaaccaacctgtaactcaggggcagaagagctgaacaagagggatacaagatgtgtttgaaggcactgaagagactgtaattaattacacctgtatgagggaacccaatggtgatatgtgagtttggctttggaaaaatgagctgggatttttttccacgccagggatgaaaagcatggcttagaagtaccaaaaaagcccagggtatgtgactgcaggagcggggcaggaagtgaccatgaatgacactgcaaatgtagtttcaggccagatggtgaagagtcttgaaagagttgctgtggaacttgggctttatcctgtgaaaaatggggagccacggaaggtctttaagcagtgatccagtgtgagaaaggcagccctgctgcagtgtggaggaggcctgcttgggaggctcaccctttggtggcacctctttgagtgggatcattgctattaggttgatgcaaaagcaattgcagtttttgccattacttctaattgcttttgtttttgcaccaacctaatacttgcctgtctcagtattcaaggtcacaaggctagaccagtgccagagagaacacctccactccttcttgtagaactccagcacgcttgccctgaccacacacctttgtccccttgtgtttcctttctctgtatcgaaactacagcactgaaggggcatctgtaaaaattacctcatgaaaaatctttccacgtagacctggtgagtcattgtttatccaacctgtgcactgaatcaaaacatgcttcccctcacagctcatcatcaaccttttgtggccttttcaaactgtcttccttagtttttcttctccttggctctctcaggaggaagggtagcagagtgtcatgcagcctgatgtatcagatgataagatttaacagggctcatctattaatacttcagcaggtgcttcatgggcagcccagaaaagccatgactgactgggttgggggctgtgggttggggaaccttcattagcaattctcttggttcattttaaaaggtcagacccatgagtgtgacgttattacataccctagcccaagaccattaaaactgggaaggccttcagagaaggacatatccatcttctcacctagcattgagcaaacgtgactagatgcagaatcagtggacatgctagatttcctaggaagttgccgtgtaagaggggggcatagcttagggatgtgtcttgaagttgtgtttaggtagcaagcaactatttttatgaagtttatttggtattgtggggtgctgggtatgactggagttcatgggatggggctgaacccctcaccccaccctgtccccacttgagccttcccacagctctgtctgtggcatctggaagcacagctgaataaatgcaaatggctgtccccctaggtgggctgcacccatgctaggagggcagtgaggctgtggatctcttgggggtaaaagtggagtttccccttcttttccttatccccctcataggaggagagggagagctatacatcaaacctttgactctggtatttggggaatattttaaagaacaagtccaatcccaggtatggaggaaaggctcctggactgggcgtcattccagatggctttgggtctcagtttagtagtttggggatcatggacaagttcctttaactcttcaagcctcatttgtaaagataaatcacaattcctgccctctcaggattatgctgaggaccaaagcaattggaaaatgcctgtaaatttaaaaggaggacacaaatgtaaggtattgggagacttctttattattataggcatcatcattattatagatgatctcaactcctggccagcctcaatcatcccaaaggcatgggggaactgaaactcttgcctggtctaactttaagcttacctgaggtcatttaaagactcaagaacaatacagagcccacctccccagatgctgtcattacaaagattaaaaggaggtgaaattgcttctccttcacctgccctgccattttcctcttgcaaggctgaatttttgtgaaaaaaaatttttccctttcaaggttactttgcatgttcatttaaccttgctgtggggagtaagaaagtttggacacagaaataaatttgttcccaagtctatagcatcctgagtgcagccccagttatccttccccgagccctttgcattttaatattaaatctaggacccaatgaagtgaataaataatggttgaatttctcatgataggaatcagttaagaactcaaataggagaacagaggcaaggtgttttcaaatcataccacgctgtgatccaccttttgtattcagtaaaactaaccctatttgggaatgtagtatcaaaaaatcagtaagagaaaaaatatgaaaagctagcgtagttagactgggcatgagcctaaagaggaacataaaactctgagttagtaaaaatgtggaaaactagtgaaagctctgtctgtaccgtatcccaggtattaatctgagtgggtcacctcttggaggggaaggcagtcagaatttctccactgggtatggcaggagactcatgccccacataacagactttagcaaatgactgttgaatggcaaagctatacttttcatttcagattttcaggcagtctctgtaagtgttttgccgtcaggaagggaaataattcaaccagggtctatggttgaaactgagcttaatttgctgttgctgatatttctttttattcttagtaaaataattcacttttacttccactccacccactctctcaactccagttcaacaatctcattctagagttccccctactctttatgttagtcaatatccaggccaaatcattgtcctcttctctctcttccccttcctcttcccctctccttttccacctctctcccagacaaagtcaccatggcatgttacaaagagcattggccttgccacttaaatatgggatactgagtcaggagtaaccattcctaaaatgggaataaggccgtagctctcaaaggtgacattgggttaagtgggacgtgcacacttaatccatggtagtattctatacccttcaatgctgggttctggggctacaagcagagtaaaatccgattcctgtgttgaggactaggtcagcagtggcagaggtggaatgggccttaaaacaaacaaacaaagccccctgcaaatctaaaagcatcaaccacatctaatttattgtcacattgagtgaaacatggagcacttttaagccaaataaggtagtgatagaaaagtaaagaagaaaacagccagtaaaaattttatgagaccaacctgaaaggaccagcttggccacctgctgtttatagtgcggtttccttatggctgtctttctctacaggtggactatcatctccgaacactcctaagaaatggaagatagtctcttaagaggacagcccagaggtagtttgaggaaacgtctgacagcaggaaaaacaacttcagcagatgcccctttggccaaagcatgctgttaaaactgactctactgacacctggtggagagtagggtaacttctccctgctaaagagggtgtgtgtgtatgtgtgtgtgtgtgtggggggggggggggtgtgtggggtgtgtgtgtgatgaacggattggaaacacattcatcatgtcagggaaattaattcctaaggaatgagggtaccatgcagaaccaccagatgccagaatatataattgtggttaggtgactcactgagacacatgcatgaaaaacaacaaacaagaatgtgaaaataaaacattaagactgcagcaaatgatttattattgatttttaaaaagagtttgataatgagtaagacaataacaaacaatccactcccttctgcaaccctggatggtgtcataagaaaagactctagtacttgaccccttgatagtatcatctgaaatttaaaagaaaattcaatcttgtcccagggagacagtgtctctcagtctgagccagtgctctgctgcctctggaatctgcagtgagctccttcagatttttaaccctgggataaaaagaataatcttcctaaatggagtgttatgaagactgctgtgctcctgaaattcccttgaagatgaaaataaaattatcctaataaatataactgtttactacttcttcagtgtcaaatggggggcaggggacatggggctacattgcaaagctcttgcagaaattgacttcggaaactttgtctccattctcacgcattaggttctttttttttttttttgagacagagtcttgctctgtcacccaggctggagtgcagtggcatgatctcagctcacagcaatctctttctcctgggttcaagcaattctcctatctctgcctcctgagtagttggaattacaggcacaagccaccatgcctggctaagttttgtattttaagtagacccagggtttcaccatgttggccagtctggtcttgaactcttggcctcaagtgatctgcccacctcggcatctgaaagtgctgggattacaggcgtgagccactgcattcagtcgcacattaggttcttgtttaattctgcttggtaaaggttctgttggctctttatcagaaattccagtggctttctgtgaggtgtcaggtgcatggtatagcacacacagcctgaatttgtctttcaacagtgtgtatcaaaggtgattttcaggaatgcaccagagcaattagagcaatcattagttccaatttgcaagaattaatccatcatatttgggacactaaatgagaatttacatcatcattattattatttgatggagtcttgctatgttgcccaggctggtctcggactactggtcttaagcaattctcctgtcttggcctctatcattattatttattattttgaaaaatcacaggagccttggttaagggttgtctcagggagctaggatgggtaggtctgggtaggaaggttataaaggaaagaagtccctcaaagatgcatatagttctaattttctttcagcttctcccctgctaatatttaaatttagaatgtgtatttcctgcaatgtgatggcttgaatgcatgatcctgccagaatgtgtacagttaaactatacctggggacagtcatgctgtaacagagattcccaactttctcagtgtatgtcactcttagtgtttcagtaatattttttacggtgaccctaggtcaaaagaaatacttaaatgccctgtttatgaagttatgaggtccaaacagcttgacaggtggatttgcatggtgtctgacagttgtttctgggtttccctcaaaaattaaaaacatcccactgtatttctgtggggttgctgtggtacccaaggtgctctggtacagattttgggaaccatggctataacagctttgaaaatcagtgaaaagtctagaagtgtgatttgcagtatctcctttcacccctcactctttgtgagaccatggccacaacatttgacctaaaggtgccattaaaaagtttcatacagccaagtgagtcggcctggcttaccacttggtgtggaggatatgagaaagagacacagagtgaagtcttagcaggatttaaggcagtcctgggaataaatcaggcttggttattattcagtagtttactgagcccgcgtcaaatggggaggctgtgacgaagaatctaaaaagtaaaagaacacagcccttatataatctgagaagaggatgcagtaagtcagattatcactggaaattacacggatgccaaccatagctgagaagctggctagatactgaacacttcacattcttaggtgaaaatcagacaaatgagcacaagatgttcaccatgttggaagagttgtacgaatacctcagtagatgaataaatgaccggttgcctgcattccaattctgtgctgcttctgacttacaggtagcaaggagctacctatagcataagctaaactagtgtctttcaaactttggtgagcatgtgaagggtttgttaaaaccaattgctgggctccattcccagagtttctgattcagttagtttggggtgcctgagagtctgcatttctaacaagttcctaggtgatctggatatactttccagggcccacatgttgagaaccaccagcctgatccatttaagaacatgttggaggaactaaggtgccatcctggtaggctgtactcactcaacacatggcaggcacccccacctttccatcctgaccagcacacggtcagccttctctagaatatttccagtgaacggcagcttactctggccaacacgtccagctgtgttggtggactgtgcccactgagggccacttgcattttaaatgggcacacctgaatttgggacgctcaactcctgtggcaacaaaacggcaatgagacacaatgggaaggggagtgtacccattgggcactttgattttgtattttccaaaagattggctttgcactctgcttacttgtaagtatggggcacaaccacacaggatgcagaaaaagcattctcagttctcaaggaggggttttcacggcagaatcatctgaggagctttgctcaccgtctccaggcctgggcccaataatgcgtacttagaaaagccactcaggtgattccactgagaccttctgctcatgggagaagtgcttgagtttgagcgtggagacaggtcaccctactgtcctcttaaccctacagccatttgctctgccactgcgaggccacatgtgtatgtcttactgtattatgtcctgctcaacttcctcaggcctacagagaaatctattcttgtgcctcttgtcacccttccttggatggtggcagtcatggccagtgtgatctatccaaagcacgttgccaattaacactcattagctaggtgctagagaacagatccaaaaaggggtacctgctattgcaccaacaaaccaagtgcacctttctagtggacttctgtattgaaccctccttgcctgccccttgtacttattttcttagagcggggttctcaaagtatgcaggcagcagaatcagatcacttgggaacaagatggcaatgcagatgcaccgcctctatcccagacctaatgagttataaactctgaaggtggggttcgggtcctatgtttctgatgcacacttgagtgtgagaactactgctttatagtattggtgcactcccctgcccatcgccacaaattagaaggtcttcaaaaggtagggaccactctccttcctccccccacaagttagcacactgatcagtgcatagtaggaactcaaaaaacatgagttatttcttgaagctagggcagctgtactgcctgctcacaagagtgaataaacactcccttggcgtgccacctctgagaggttgccaacactgggtctaaattatctcccatttcttatgggttgtattttccatatttacaaatcagctttccctaaatcctctccaagttttttacattcttttcagctcaggaagccaaaaacaagatggcatgttttagccaatgtctgtttcctgctgggagggggaagggcatttctgcatgattcttaaattccatgctcccagcatggtgattattttccgaacaatagaaccagattgctgattcatgttcggctcacggctccaagcattttttttttcctgctgtacttgtaccgatgcaacacaataatgttctattcatccctctgaattagaaatgccagcagctcagatatgcaactgaagaatcccccctcccctctggcttatttaaagccttcccacaaataacacattttgaaatattagacggtgctcactttgagccatttggcttgggcaaggacagttaaaccttatttttttctcagctgctccttgcacaatgcctggcacactgtcactattattcttaaacactgtttgttgagtgaatcacataccttcttcttgaggttctagccttatccttctcttctgccctaatatattacaataagccctttcttaggtgcagagagaaagccttgctctcacattcagaggctcgtgtttgcatccagccaaagaatgagattgacctcaaggtctgatgatccaggtgggctccagccagccccatcccagtttgcacactgtctgcagcaccagtcctgccactgctatagcagcaagatttttggctgcctctcagcacagctttgccaatgagcaagaggggtcatctgtggggttttgtttcctagctgcaaagtcaaatcagggggactacttagtgctctgaaagctctcatggtcaacctggctttcacatcaaaatcacctgcgcacctttgaaaaaaaaaaaaaaaaaaaaaaaaaaatcccagtgcccaggtgcactccaggccaattagtgtctgtagctcaggcctcagtttgtaaagcagcgtgggtgattctgatgcccagccaagattgagagccacttaggtttagaggccctaaagtagcctctgaagtagtatccaggggtctcctgcatctgcccttgccccttctcatctctgtttaaaatggcattccaacaggtaggatacgattccgctcctgtcacccctctgctcaaaatcccactgtggctcccacaaggatctgccccatctgcctctctgtctctcctctcccagtttcagcttcaccaactccttcctcttcctcgaacgtgtcatatgtgccccctacaagagggccttttgcgtcaggatttttccttgcctgaaatgctcatgcctccaacacctgcttgggtccctccctcacctccattaagggttgaacacctgaagttctcgggatgcctatttgaacatcccagtgctgtcacctgccccttccctgggcacggcgcttcccaataccccttatcttcctctcctgtctctctttgccatagtacttagtgtcttttaacatgctgtacattttacttctgtgctttgctgctgctgttgttgactgttttttctccctctgctaggaagtcagctttacggggacagggatctttttcattctgttcactgatgaccccaagtgctaacacagtgtgtagttcatagcaggcccttagtaaatactcgttaaatggagaacacccttgttgggggtgctagggacaggtgctgaatggaggaagggaggcccagtgacacaaaaggaaataaattttctcaaaaatgacagattttgaggaaacacttattaaattctaattatgaggagttgccaggcaatgtctaggttaaaaaaaatgcacactatagagacaggaagtggacgagtggtcagctagggctgggtggtgggggtgagggattggtttaaggatggggagtgactgctcatggatacaagggatccttttggggtggatgaaggtatcctgaaaggagactgtggtgacggcagtatataaatggctgtaaatacaccaaaatccagtgaactatatattttcaatgggtaaactttgttatataaattacatctcaataaaactgttgaaaatacacacctaactgaagcatcatacagggtgttaaagacagagctgaaaaagaaataggctattattatttcttgtcaggcatgtggattttctctggcttgagttttgaattgggagtgagagagaaccttccttatctctcatttgctgccagagacatctatttattggtaaagaaatgtaattgaaacttcttgatcaaggcctacctcaagagcaatttatttggattaaatggctttccttaataacttccacatctatcaaaattctgcagtcttttctaggcctccaggtcagttttggaaaacaagcagctactttgtatgaaactgaactttgacacttttgaacttataatgccaaggaaaactccaggcatgttgacatcagtaccatctgctgatgggcaattgctccacacaaacagagctcaaagtgtctgtggcagtgaactgagatgttgcttagctagcagccctgtgaatcttcctcccgagaactcactgatgttatggtaatctaataacatatatggaacaataacagcacattgcaatgaaaatgctgcatggttacaactcaatgaagaccattctccctcttctgggagcttaacagcataccttgttaagctgtgaagggggaaactttctttctgctcttctgcctgtttctctgctcaaaatcttgacatatgcccatcagtgcacaaagggtctgtttgaacaaaggtcagggggctatccagagtcctggcttcaaccttctcttttgggaatccctaagatgtgagcaacgtgatgatatgagaagactcttggggactgctgctatgtgtctggagaactcctgaggaggacacagtcactatgccattaataattagaatgtttgaatgaatggtaagttttctgctcattgatgaaacagagggccagaggactgagaaacttgccctttgtgacccagctggcaaggggaagagttagactgccaaccacaacaaatgcttttaactgctaagccattctgcatcccacctgcaaggtgcacatcactcagctgggtgccatgatgggtgcagagatgactaagccccacccctttccttctgacagatattgactggtagagaagacgggatgtgcacaaacaattctaattaggggaggctgtatttaatactctgtcagaagtgcagagggccattagtgtgtgtgaaagggaaagaataacaaaaaaacccaactttacaaaacatggacactccacagattaccatgcctccccgcacagggaccacgccaattttctctgtcaagatccagctataaactgagggcctggtcaggtgcagtggctcacacctgtaatcccagcactttgggagaccgaggcgggcagatcacttgaggtcaggagtttgagaccagcctggccaatatggtgaaaccccatctctactaaaaatacaaaaattagccgggtgtggtggcacgtgcctgtaatcccagctacttgggaggctgaggcaggagaatcacttgaacctgggaggcagaggttgcagtgagctgagatagtggcattgcactctagcctgggcaacagagcgagactctgtcacaaaacaatacaaagcaaaacaaaacaaaacaaacagagggtctttcataatgtgggttacgtaaagtgtagtttattgggttggtatcattctgaccatgcaatctggatgcttggacagaatagctacatcagcttgttttaatatcatttgtacatgtgtccccaaagaagatagcatgtcccttacggagatgttgtaggaattaaatgagttcatgcaagaaaagggcttaggatagtaccttgcacatagtaagtgctcaataaatgtgagttgttattgttatgcatagttaagcctaggttctggataactgagtattgggtaccagagacctaattccgtagggtcctggtcattttgttacacaccaagagaagagctggcatgtgaagtgtgttcctttcatggggtttcaagaaagaaggcagtggaacactcactaagtgccactgctgcctactgagaacttgatttacttcatgcactggttgtacggttgcagtttttgaaaagggcatggtattgatatttctcagtgtgaaatgatttcttatataatagttggtaacattaggaaagagtgggatttctattctctagcatgatactgagtagaagagatttaatgacgggataacccagttctttgggggcagcagcatttgcataactgactcttttcagcaattctgcaacaattaataggaaccatttgatgtctctgttgggacttcaactaacgctttcccagtgagagaatatttagaagaatattttcacaactttactttccctcaaaaaatatagttttgatcccaaaatgatagtttttataggtgtaatttggaatgcctcagttgtaccatctctagagtcaagaaaaagtttatcataaacaaggcccacttaatgactaatttttgtacatgaaaaggaaagacagtggatcttggtcatcaatttgtattgttgattttacctactataaacaaacatgaactatttcacttttcagaaaaaaattcatgtaatttgaaaacaaagattaccagagaaagaggaattaatctctttctaaaatgccaaagaaatattgcggatcccatatgatatgcttgaatgtgtttctggagtcacttcttagctccatggcaaaggccaactagacaaaacgtggctcttggctttgagtagaaatctacaacaaatgtaaagagtttctatttgttgtgttcaatgaaattgagtacagaaaaaagaaaataacaatacttctttatgatgaataaatatcttaatcaccatacatcttacacatgtgtgcacggtttcctaaaaagtaagaatagtaatgatgataacaataaaggcgataatagcaatagcagctaacatttgttgagtgcttgctatgttctaaagggttctgataagttctagggaacctgctaaggattctgctgcctcctttattactcttattacttgtattctcaacctatgacgtaggtggtaccatccacattttacagttgggggaactaaagttaagagatgtgactcccttgcccaaaactgcaagaattttaaagtgggagagacagggagcaaatcctttatgctctaaatcactaaacttgactgcatcttgcaagaataataatgattacatgcatttatattgcctttttacactgtattttttcatttgatgcttacaacctcattttatcatctcttttacagatgaggaagctgaggctcagatgttaaatgtctaaagataaatactggtacatggggaagtcaggacccaaaaatatgcctcctgaccccaaatccaagcttctttgtgaagaattagagcttcaatcttttctgaatgaaaggtcctaagaattttctacaatttttctatgagcaaaaatcacatctatgggatatatatacttcaaaaataaagtttatagctcagaatatcaagcaaccaaatttttaatatataaagcacaggatttggctaggctgaaaccaattatttgaaaagtttactcttgatgagtctggaatttttcacatggccaaccctgtatcagtgagacacattacttaagtggcaggaaaacctttctttttggatatgagacatttctgagttcagtaaaggttacatggtttctcagaaaattagaacttctattaataatcagtgctccatttgattaggatattattcctattactttgaggtcaaattcataagaatggaccctaacagtatacgaactgggtaggagtatatacaaatgaactgcccttgaaccctaaccccacgcattgagctatcaggctcaaccccatattgatgctgctggagacatttctaaagggactacaaatgaatactcctctaataaagaaaatactcttttctcgaaaagccaagagatatttggaaatttaggacatcagtagttgtttaaaggaaaggtttggaatagtacaatgaataaagctggttagctgccatttataaaactactgagtttttgacccaaaagctgggtgctagtttgttacctgttgcccctcagctccagatccacccttctttgctctattctgtgatgctggggctgggatgtggctatttcccagagtcccttgccagagggctttctattcactggaagaagactggaaggtgaggagaaggaacttcctttctcctttttcatgccccaggagcatcctccagtagtcactgctgtctggagtatgggcctctttctacatttccaaaaccagtccctttgcgtccctcagaggttctagcagcagctggttggcttcctttcttagtggtccaagcaccagctccacaggactacttccttgagttcttaggtcctactaatttcatctcctctttttgtttcccaactctgagggtgacagctacttcttgcaattgggttccctcagtgttcctttttgctcttttagtgctttagtgctccaattccgatgtaacaaccaattccctgaactaaatccttctgtttgaattacctagtgtgattttgtttcctctctggatcctgactgctgcatgtcagtgctacacttgtgaaagtgcagtagcagaaacaacaccgttgacttaatgcaaatctgtttctgctaagtgtgagaaattattatttccagcaaagagccagcatgtgtgagaaatgataaggcccaatccaaaggatagtagagtagaagtcttcaaaggatcaaacttttaaaaattcttatttttttttgcataaaaatgattcctgatcaccctggaaatgtttgaaaacagaaagtataaaggagaaacaattaaaacccaccatagagttaaccactaacaaactatcagtggatagtttggcatattctttctgatcttttcccccttatacttctaatactttaaggtgataattattttaaaccaacccttgttctctagtattttcacatggcagtatgaagaattaaactcttagagcgatataaccttgccacatcacaagaaaacttgttccttctactttgggactggatcactctggcaagggctgcttacctctaacccagaacttaaacaatcaatggctagggccacagactcccatctctggtatatctgttataccttctcagttggattcataaagtaaacaagaaatctgtacacattcaggaggaatacttaatacattatgagctggctccaggagtgagtctatgaaaaattttgaaagaatatagaactcaacagtctgctctataaggagtggcatgtttggacagagaggtggggcaaatgtcagtgctaattaccctggtctgcaacacctatttcatattttgctacttcactcattcatttattcacaacaactattaggccggggcaaaagtaattgctgtttttgctagtatttccacatggcaccatgaagaattaaactcttagagtgatatagtcttcaccattacttttaatggcagaaactgcagttacttttgcaccaacctagtaccagagtatctaccaaaggtgagggcaaagcactgtgttagttgctgggcacagaaataagacatgactgttggtctttttacacaaaattcatagttataagaaacaaaatccagaaagaagaaattaaaagatcaagcacatatatcctcatgtcacttttcttaactaataaaacatcttagtattagatgcatttgttcttgcctaaccctcaggtatacctgtcaccaattccctgtaccccttgagaagtctccaactttgagatcttctcatagctcgcaggtagtattgactgcctgttggtgcaatgtttcagtctccatctgccttaaaattatttatcaggtagaaaatagatataaccatacattatgctccaagtaacatagtactgaaatgtatgaagtgccgggcatggtaactcatgcctgtaatcccagcactttgggaggctgaggcaggaggattgcttgaggccaagagttcaagagtagcctggacaatataatgagacctcatctctacaaaaattttaaaatcaaattagctgggcacagtggtgtacacctatagtctcagctacaggagagactaaggtgagaggatcccttgagccttggcgtttgaggctgcagtgagctatggttgcaccactgtactccagcctgggcaacagagtgagatcctgtctcttaaaaagaaaaagagaaatagatgaagtcaaaccctgtagaaaattcaaggaaaaatacatggaaacacaatagtggttgtttaacctaccttacattccttcaaagattaagtagatataaaataagaaagaataccagaataacatcactaatgttaatctaggatcagatacccatatctgaaaaacagaatactgcaaaaatagaataattatagcatgtgaccaaaggcaataaagaaactttccaagagtagaaataggtagaaatgtgacaaaacaatctccctaaaatatacttaacttagaaactaaatagaaaaaaaagaaagaaaatcagacacataaaaaaagaaaaactgcaattacctggaagccaagaaaattatctcctaaacaactctttgtcaaagagtaaatagaagccttattgctagatatgtaaagaataattatgatctaaataacaaatgttaaaacctatgtgagaccctcaatgctgtacttactaaaggaaatatcttaaatgtcatagttttatacatttttatgacttaaaaataaatgagttaagcatttgtagaaaaagaaccacagataaaagaaagctgaaagagaaattaataaaagtcagaaagcttataggactagaaaacattttaacaggtctcatgtgtaaagatatcccaaagctgattctttggaaaaaccaagaacaaaacaacaaatagatgaactagcagttaacctagtggagaaaaaaagggagaaataacaaattcacaaaattaggaaaaagaaagggaattatttatgtatactgaggattagaataattataagagatgactttcagtaactgtgaaaatacattcaaaatcttgatgaattgtttgattttcttaaaaaacataaagtaggagaaaagacaaatttgcatagactgaaaatcatgggaaaaacttaaacactgtcaaggaacccccctcctctcccttccctgaaaatgccaaatccagatggttttgtgtgtgattatttcatagataaaaaaaattatttaaactgtttgaaagcacagggaaaaaataaacttcctcaattacttttgtaaatcagcataattctgataccaaaaatttggaaaagacagcataaaaaagaaatttgcccagatgacttattttaattgagacaaaaaatcttaaataaaatatcagcaaatgactcttggaaaaattagaagaacaatacaccagaaaaaatggaatatttctaggaaagcaaggataagtcaacattaggaatgctgaaactgctaatcagagtaataagtccactgaataaaaaagtatttgatctccttgaaagacgctaaaatggtatgtgataatagtcactgcttgttcttgatgacttaaaaacccacagggaagtaagactatatgaatgttatcctgtaagaatattaaatatacgaaacactttgaacaaaaagtaacagggagaattaagcccatcagatatgaaagcatagtataatgccttagtaattaaaacagtgcagtattggtgcatgaaaagttagcagatcaatggagcaggacagaagttcagaaacagacctcaatatatatggaaatttacaatataataaaaactggcttatttaactcctaaagatgagataaacagtaaacatctagaaaaaaaatcacagttgaatctataactcataccttatgcctggttaaataccaagtatatgaaaaaattaaaatgtaacaaataaaagccctagaagaaaccacaagaaaatctttccacagctttaaaatggtgaagacttactaactatggcacaaatctagaaaccacccacaatctcacttcttaaacacctgtaacaaccatatctcgaatgcctataaaaggagatatgtaaaacgcaaatgtccatcaacaggaactagttaaataaaccatctgggaataaatcaccaactggaatgctgtataaatgtaaaaaaagaataagagaacatttatagaataatatgaaataatctttaagaaatatggttaagtgagaaaagcaaagtgcatagcagtgtacacggtatgtgacatccatatatacaaagagaaagaagaatataaaagggtatccaaagagtatctgtggatggacacaaagaaactaacaacactgcctatgaggaggggacctggatggttaagggatgaggtttattgcagacctttccatacattttagattctggatcatgtataggatttggtatctattcaaaaagaataaatgaatacaatacaatacaatacaatacagtgaatacaaataaaggtgggggaaagaaagaaaggtagaaaaatttgaggtaacactcagagataatgtacgttttacaaaattgctgtggagatgaaatgcaataacataatagaggcataaaataaataatataaaaaggaaaatggaaagtatatatggtatagattgttgtatatctatagaaaggtaaccatttagtcttcttttctacaaagtgcaactctagagcaaaggttgcaaactttactgcttacaggggctagacattaattcattcaacagataggcatcaagtgccagccatgccccagacaatggagatacagcattgaacaaacacaggaaaaaaaatctctgccctcactgagcttttgatctagagggagatgacacaggcaattaaacaaataaatgtcacatggaataagcagcagcaaagtgcactgggagtacagtatttaaatagtgaggtcaggacagacaatgatagcagttgagagctgctggcctaactgtctctttcatacaggaggcagcagatactctgctccaggacggaattgtcacatggggctgtggaaagagttttgccagatcttcagattttccaaggagataagaaattcagatttgtactggaaatctcctggtttttcaatcctgactcaatttttaaagaaaaccactacggtggccaaataaaacacatcttgctagccaaggctggccaggtagatgatcagttcagatctctaaagaaatgagattgggtttgaaaacaaacacagcagaacttgtaagccctgtcatcttatgaagctatgcatgttttccatgtcttcaaacgtttctggaactcctcaccgagagagaaccagttgtccctcagaaccattttttttttttcttaccacacaaggaaagctgttatcattttgaactgaaatcttgtttggaccctgagtctattcactagatttgattattcataacatttgggtttttctaaaaatcagatttaccggccgggcgtggtggctcacgcctgtaatcccagcactttgggaggccgagacaggtggatcacgaggtcaggagatcgagaccatcctggctaacacagtgaaaccctgtctctactaaaaaaaaaaaaaaaaaaaaaaaaaaaaaaaaaaaaaaaaaaaaaattagctgggcatggtggcggatgtctgtagtcccagctactcaggagggtgaggcaggagaatggtgtgaacccgggaggcaaagcttgcagtgagcccagattgtggcactccaggctgggcaacagagggagactccatcttaaaaaaaaaaaaagaaaagaaaaccaaatttaccttccaaaggctcaggatgtgtttaataatacatatactattggccttaaaggtagtcccaaaagagtggctgcaaatatttagagtaagaacagtgtcactaaaataaatatgcatcttccaaggtaatcattgaagaagattgcacttaaatgtgtaggagtcaacacaagtctcccagccttacaggcatttaataaaacactcaatactttggattctgttgattgctatcagggtttttcctcttcttcttctgcttctaaagggctcagttctttggacctgattgagtgctataaggcagttcattctagggatccttggaatgcatatacccaaacaaaggccttgtgccaaacataaccagcacgtacaccatttttattttcctatgaccaatgacttagtttctgtggtcagttagtgacattagccatgtagaatcacattgaggaagaatgcaaagctttctatgagcccctgacagcttcagttttcctctctaataacatgtatgaatcagaagccactagtttgcatttcagaaatatttgtggtagttaggaaacatactgcacttattgtattcccatagaaatagagtgtccttgggaagaatggaaaaatggcactgagacatccaccaagatataggctttatcaattccattgttgtctgatgcttatgcctcctttgctcttggttactggaaagtctgtaaacattcatcccatcggtccagtatttttgttaaagcacagatcttagatcaaatatgccataactgtttgtctatccatgtatctactcttccctccctctatgcatccttttgtgaaatattctttgagtgccttttactgattaacccctgtgctaagtgctaggcatgcagtgtaaaacaaaaataacatgtatatcacatatataatacaatatatacatatacaatacaacacatatacaataataatatctgcctttagggagcttgctgtcttttggagagaatatatattaatgaagttaattatgcaagccaatgtaaaattaaagctatgtgtcattttcctttatggccaaaatgtgggctctcacttagataaggctttctagacaaagtgatgagtgggatgagactcccagaagtgccaactagaatgaagtcaaaggatgagtaggagttgcccaggtggaaggagagggaagggcaatcccatgtgtgggtttcatggagaagggagggacccgtacttatgtacagggtgatagatggctggtgtaggcagaagggtgaggacagggagctggagagagatgagtctggagagacagacaggagactggccgggcagggccttttaggccatagacaagattttatatttatcctaagtcagaaaaggttgaagggtcttaagtgaaggaagtagcaatgattagatttacatttcaaaaaccactgtatccactgtgttgagggggtgaggggaagccttcattgtcatatagataaatggtaactgaaggtgtcaacatggatgctattgctttagaactgcagctagagcaagaagaggagcacccactatttaaagaactctaatattgaaaagtcaggaagaaacagcgagctagtgagagagtctgaggatcaagtgagctggcaagagtctgtgaggtacaaagaaatcccagagagttttgtgtcatggaactaagggaagagacaagaaggacagagtaatcagtggtactgaatactgctgagaggtcaagggagatgaggtctagaaaatggtcactggatttagcaatatgagggtcatcagaggccttaatgagtattacttggttagtggaagagggcctgaagccagacagatggagttgaagagtaaatgggagataaggacacagaaatggtgctcatttattctcctcttcccagccaaagactgggaagccaaactttcagaagtttggctggaaagaggagaataaataattgtgagttcgttgcagggaataaatggtgatatgctttaaaaaaatttaatggaagatgtggacatgtttagaaggaagatatattaataataataatgatagtaatttgtttttgagagagggaaaaagataactcatactgaaagatcctgggagggagtcccatctggaaggagagagatacgtgtctcaagtatgtacaagaagggtggacacctctactgtacttgggaggaagggaggatggacacagatgtaggtaggctcatgtgtctggtgtcaggacaattagagttacagagagataggtttcattttctctgaaggagaaggtgaggttatttgatgagagcaagggaggacaaagagatgttagagggttatggaagatgaagtctgaaacagcattacagaaagtggaagagtatgttgaacagagatatttagtaggattcagggaaatgttgatggcccatttgaaggtggccatctgaattcatagtagcacaaattagctctgttctgtgaccttttttgtttttgcaggactggcaaaagccctttgcagaaagataggagttctgggttctcggttgtgatagctgtaacttgtcatgtgaccttaagcacatccttctctggttctcagtttcttcaattttccaaatggtgagatcagtttagatgatacctgaagtcttgttccagctctaaacattcacgatgtcctcaatattcatggagaggccctttaagcttattaaggtttttctattgatgcctttagtttttattttaaaatgaaataaattttttgatatattttttggtatatcaaaaggtattttttgataccttttcattaaataattctactctgggaaccaacaagtccagatgtttatgatattatccaagtagcaaaacaaaacaaaagcaaaactctgagaagaaactaaatatcttaattttaggttatagaatatgaaatagatctttttaagatctataggaaaatacatgcttcatagtaaaaaaagaaatttagataatttatatggctattctctatagacctataatatctgatgtccacatctaaatcaagtgttggcaaattttatctgaacagagctagataataaatattttaggatttttgggccaaatagtattttttgcaattactcaaccatgccatgcagtgtgaaagcagccacagacaatgttaagtgaatgagcacagcccaataaaactttatttacaaaaacaggcagtgggcactttccacagtttattccacagtgaattatataatgcattcaacacacaaacaaaacaagtgaatgcacactgttagacacaagtgggacagcctcctgcagtcactgtgaggccttgagcattctagcagaggctaatattccacagccattcattcagcttcagcttggagaactctgcaattagaagctcagttatgtggcttggcacctcacacttggagcaacacttccaaaatagtgagtgcatgaacaataaatggactgcatggagaatcagggtctgtagttttctgagatcaaattggtgacataaatcaaaacactctctttgtatgaatttattcaccgcagggctggagatgagtgactttgaacagagaagagagggaggagaatgaggtgaaaggaagcatgccaagaggcaggattaggcacagaggctggggcctcggactcatttgggggaagatggaaaagttaaaaagggcacccagcaatgcaagcgacgcctaagaaccaacagggtgggaggccctgtccgtctgaggcacagagacaggaaaaggccgaagggtctgctgcttgattcactcccctgggcaggcctgatttcaaaaccaaaataaacttaggagagccagaggggaggaaggaaagaaacaaacaaacaagtggagcttcagcttatgttttctcccaacccacagtccagtcctgcgccaagctgcctgcaactccagttctcatgtggcattgaaccttcccctgaaggactgctgctctgtacttagtaccatacgggtaatcatctcacctatgatagctttgttccccagctagactaaaagcatgcaggtggggccatctcatctgcttttgtgttgagtacagatgtatacattactgcatacgctgtagtgcaggctcagtgtggatctgtgcgggcacatcattactttgaataccaacagcttttactctagcatgagtcctgtgatcagtaacttacagctctacctgggcagcaggtatgattattatttcctttttcaacaggaagtcattgatacatacagaggccaaagaactagaacgaggttaccagcaagtagcaaaaccagaattcaaaccaggtcactctgactggaggccccagctcttaacctctcagaagtacactgccttttctagagtgtagagttggaaggaactccagagatcgcttgattcagtccttatttttagatgtggaaatggaaaattaaatggcttgcccaaggtcacagagccactagctgagaagctaacttggcctcctgatgcttccttcgtgcccccactgcagacccacgcctgctccatgagcatccaataactcttccataaagatttatcaaaaattcgaggatggagcatcagtctcgacagaatttattttcaggtgctgcaaggcaagactctacatgggcttgggattgttcctacacaaagacaagctggccaagttgaatgattcaggagttgctttaaatcaccagatacatgaagcaagtaggtggcggcatttttctaaacagggacaagttacacatttcaactacggcatggaaaagagtgtccttccctaagcttagagcaaaaacgttcatgcaaaagtgaaaccatggacactattagtgctcagacacaaagctgacagaagcagaaatgaacatgttcttaacagtgtatgtgtatgctgctttgacgagagaggaacacaccgccttaagactcctgggagcatacgttttgaagggtcagaaagaattcagctttgaaaagtagaattaacagccactttggtccaagtttttcacaacaaagcactacaaagtgggaattagctctgcttacctttttttttttttttttttttttaaggaaaaaagcttaactcctaaaagttatttcccatatcagagactagaagtttgtttgtttgtttttaatatattggaaagccctcagcatttaaaggaagttctatttgtttaaagataggtacaaagaaattcagttatagatttaagtgatttggtttatttccattaacaagtccttgttttcatctatacaaatagattaattaaatgtgtgtgtgtgtatgtaagttttaaaaagcagctttattgagatatgattcccatatcatacaatttacccacagaaagtatacagtttaatggttcatggtacattcacagagttgtgtggtcatcaccatggtcaattttagaacagtctcatcatcttaaaaagaaaccccatacctttcagctgtcactcccttatcacctcaaccctaagcaaccactaatctactttctgtttctatagatttgcctatttcatgtaaatggaattatataatattgtggtcttttgtgtctgacaagctcttatctatataataatttaggaaaatacagttgtcaggagagaaaatgaagaaatgtttttttctgggcactcggtgagtcacactttatctctagctgaccagtttgtgtcttactagccaggcagcccttgccgtatccagcactctggactcatgagctgtgtggcagccccaagactgtagacatgactctcaccaggaggcaagtaggctggggttgcagggtggattttggactgcaagaataaaaggtaaggtggtcttcaggaaatggtacaatttccatgctggaaagcaatgtttgcctgtaaagctcctgtttatgagacagtagtcattttattcacttattctttctctggctttctctttatcatcatgtcaattccagctgctcatcactggagaaaaagacacaatcatactgatgggctctgggtagacacatggccatgaactcaggtgcgcactaaatgctctcaggcactcacagttcttccccaggtcactgactcttccattctcctagacaactgtatcaaacttctcctgtctccccagatctccaacaacttccctccagtcttcactctcagctatgtcctgtcttcctatttaactgagaacacagaagcaactggaagataattccctacaattcttaggaccacatctactctcggaccaggatctatacctacgtattctattaccacagatcagactttacatcaaaatcacccagacggtttgttaaaacaggttgctggccccaaccccagagtttctgaatcagtaggcctgggaagggcctgaaaattagcatttctaataattcccaagtgatgccgatgctgctggtctgggcccacacctggtcctatctaagctcaatctctcttcttgggaatgcgaccccaagccctcccacttagagacatgttgcagaaattctctcctttacctcttgcctcattacttggcccttctttacttggccatcctgtcaactagcaaacatgttatttcctgaatcttcaaaaatacatctctcggccaggcgcagtggctcacgcctgtaatctcagtactttgggaggccgaggcgggcagatcacgagggcaagagatcgagaccattctggccaacatggtgaaaccccgtctactaaaaatacaaaaattagctgggcgtggtggcacgcacctgtaatcccagctactcaagaggctgaggcaggagaatcacttgaacccaggagatggaggttgcagtgagcggagatcgtgccactgcactccagcctgacaacagagcgcgattctgtctcaaaaaaaaaaaaaaaaaaaaaccaaaaaaaactctctagatcccactatactcttcagcttccactccatttccctgctcccctttagagcaaaggagttgtccttactccctgattccaatttctttcctgcctttttctctgaaagtttctccaatcagacttagttctctccccactcttcaaaactgtctgagttaagccaacccatgaggctcatattgccaaatcctatgcaattcttggaactcattttattagacctatcagcaacacttgatacagctagcttctcactacctcttcaaatcttcctccatttaccctccaggatgagacactttgctgatttttctcactgaacaatccttttcagacttttctggttcttttccatccagcctttacaagctacaagacttacgcctgggataccttttattcttcagttctctatctgtacttactcccttggtgatctcattctgtctcaatggctttaaatattattcataaggttacatttcccaaatatgtgtctctatagaccccagacctctccttgaactctagacttgtatatctaattgtctactttaataaacttgatatgtccaaactagattacagagcttccccaggcctcccttaaaagtcaaacaaacaaacttgttccatcctctgtcttccttaatcactataaatgatgattctaaataattcagaatcaaaacattctttctacctccatcattactgttatcatctctcacctggatttttataataacctggtctttctgctttcatctttgtcccccaacattttattctcaacatagcagccagaggtagtctttttaaaacataaattatgtcccatgactccacagggcaaattatatgtcagttcatttgatccctgggtgccaaaccctgcaatggttttcctatcacacttggggtaaaaaccaagttccccactccctctgattgtgtcttcagctgttgttcctcactcactccattccagtcttgctgaactccttctgttcctcaaacatatcaagggttgctctcacctcaggacttttgaatgtgagctctctgcaaagcttctctcccagatactgtcagagatcttataccaacaccttctttaagtctttgcccaaatgttacctttcaataagattttgcctaatcacccatttaaattacacctctcttcctaatcacttttccactttctctccagagagcttttcacctttgaatatacttctaatatactgcctattttcccctaccccctactagacggtaaacaccatgaggaagggatttttttatttttttttctattttgttaattactctatctctagaaactacaatggtgctgggcacacagcagatactcaatacatttatgtgtagaatttgattcttgcaaatattctttcatccagtttaggtggctggcgaaaactgaacatgtcttctagagtatctgggcccagcattgaaagacaataaatattagtgtgacatacaggggtaaaccattccatttttggctttaaacataatagaaggggacattattcttgagcttttttatgcctttcagtcatttatgtgcaacattaaaatattttgctacttttggcattcttccaatcccaccttgcctgctggactgcttccaattttcttctctctcctttcctgttctttttcacccaacagctgccatgtaccgaatgtgtatgccagactctttatacacattatcttatttaatccttacaaaaccactgtgaattagggagcattatctctgtttaccaaatgaggagacagttgcacagagaggtaaagtggcttgctcaagatcacatagttaacaagaagttgaagcagaatgtgtcagatcctaaagtccacgcttttaaaattatattatgatgtcaccaatatgcataatatatcttatatgtccagtttcctagtatttaaattttggcttttcaccctcaattatttttggagattatactggaaatgacttaatgacacactagatagtaaacttcatgtggattggggttacaggcctttttttttttttgctggcattccttccataccagcaccatggcctagacagagtgggcactcaataaacatttatagaatagatacttgctgacttaaatatagacatagataattatactagtacatagcttatttttagaacatatctttcattcataaattaaagatgacctctggaagctttaaagaagtaactttgttggaaagcatgggttttaaaagtattaatggacagttgatactacatgtaataagtacacaagtcctatgtcatcatccaaagtgatgtctcagttcttagagttttggaggcactgaactgaggaaagatgaaaaaatgatgtttttgctcctgcttggcattggcagaacatatttatgtcttactgacattaatgtctattggccaaattacatgtcagttcatttaatccctgggcaccaaaccctgcaatgctttcctgtcacactcagggtaaaaaccaagttccccattccccctgattgcatctctggctgtttttcctcactcactccattctagtctcacagacctccttcttttcctcaaatatatcactgtttcttctgcctcaggacctttgaacatgagctctctgcaaagcttcattttacgtttgaagaaactagggccttgaaaagacaaatttctaaatgacacacaataattagggtcagagttgagtagagaacccaggcccccttggtgcttaaaaaaataactgtgtttattgtacctcttaaattttttgtttgtttgtttgtttttcctgaaaagttgcagacaaagtttggacatagggaatcagctttaccctgacacttggaaaagctttctttatatgtcttaaattatctccttgttttcccagctgacaatgcgtaaactaaatgagataatatatgaaaaatcacttagactgtcctaagtgatttttcatatattatctcatttagtttacgacagtggttgctactgacaaaacattcattaaacagaactatcgttattaccaaggtcatttcacattttaagttattcttgttccaggtagattaaaaacttcaattaatcaaaaaaagaataaacctgaaaatcaatgtttcaaatatttgacacttagagaaccccctaaaacagcaatcttgttgcaaaaaaaaaaaaactggactttgtgcttttagtagcaatatcctaaaagtccacaagagggcagtcctccttacagcagagggccccagaaccgtaggtgggtggaagggaattgtgggtgatgaggtaagctaataataccatcaatgggagccattattaagatacttttgagtgataacgcatactatgaagaaaataaagcagagtaattagacagagaatgcctcgaggggaaagttaatgggaacattaactgagtggagaactgacctttggataaaaaagggttagccatcagtagactggggggaagagtattacactggaaaaaataggagggaccaaattggacatggtcttggtctacttgggggacagaaagaagggcagtgaaagaaagtgaagaaagaggtgaggagggaacattagatcatgcaagtaatgagcagctcccaggcctttctgatcctggagtttgttcactgaatcactatgctactttgaactctgaagaaaaagccaaagggcactgatcaagacattaaaagtggtattttttggaaataatgaaaataatttaggaaatgtctcagtgcttctcagtaaagaattgatcagaaatcacatgattttagaccttgaaattatgaggaaaaattagtgagggacatatatttaaatttattcaaaattttatgttctaagtctaatcaggtgcaggatttctctttatctacttatatggtactgtataataatcaaggtttataataatgtccattaaattattttgctaaggcaaagaatacttatcttagaaatgtcttcattaaaaagtattactaacatattttaaaggaaatacatcctaagatttatatagaaggatgttcatcccagcattaatgttaacaaaaattataaatagcataaatgtccaatcgtagattatttgagtgtattaatttgcttcaaaattattaaaatatcatttcaaggaatatgtaaggctacgttacatactcatagggtactgttagaggaaagacaagcaacaaaataaaaatgatatatgaagtttgaacccaatttttaagaactatgcacagataagcaaattagtataagaatatcaaaaataatatgagaatgaatgtctgtattttctttataatacttttttgtattaaaatttctgcaaagaatgcatctatttcacagtcataataatgaaattaaatatctggcattgaaattttaatcttccctaaactttcaaaatctgtttagtactgcattttgtatagaaattgatagggtttttgagatgacagggagaaaagataattttgtagagtgaagttagatcatagagtctctgccctcttttaacacttaatgaatgaacaaaaacatatattaaaataaaacaagtcaaaacaaagtgttgccaggagccacaaaaccaagaaaggagtgtaacgccatatcctcatcttaaaatgttttggctaaagagtaggaatagctgggctgtggcggtgtggctccagctcctccacctctgagacaatactgaggaaagaaagggagtgggccgaatccaaagaatctctaatgatgactttagacttgggaagaaatgatctgagggtagtgaagaggcaggcttggaaaaagtcaagaaaaacaccttagaaaacaggagctcttgtgtacagtcatgaaaccttggcagaggcagggctctgacccaaattagtgaaagagctgaagcccacagccacaggatccactgcagctgatggaagggactcgggtttagcacatcgaatgggatttaaagagggagccagccaagcccaggtccccagcaaaggcaacacactgatgttggaagctaatacccagtccacaaaatgtactcagtgaggaagatgaaggattttgagatgacatggagaaaatgccaataaaaattcacccatactctagtagagtgaaaaaatctggacagaccttccatattaaacataaataagatgaaaagatataacatgaacctatggatggaggaaagagaggaagacagaaaaggaggacaggacgaggaaggaagagagggaggagagaggtggaggagagagagagaaaaagagagaagaaatagaatagctccatctataaagaaaacataacccaagaaaaataagaaagtttcccctgaatacttaattaaataaaataagattaaaagaagattataaaagaacagaataagatgaaaagggatgaaaaggggggacagaacgagagaaacaaactgagaaccaaaatgccatagttacagaaataaaactattgaaacagtgaggaatataaagctaacataatgacaagaagaaaatttcataaaatagtcagtgaagaggaaaatgacagaatttgtagcagttacataagtgggtagaggtggagaaccaagacaatagaacataaggattagtgtttctagagatgagaaatataatagaaaatgtatgtaaaggtataatgttagaaacttttcctgaaaaaaaaaaaagacttgaatctgcagatcaaaaaaactacagtgttccaggataaagagtgataaacaatgactgaccactgacaaaaattctctgctagaccaaaatttagtcagcctcctgaagcctctcctgggctcatctatgcacttccttgtaaaatccagttttagcaaagaaccctgctaagtcagtttaaccaaaaccccttatccttaatatctgatcaccattgatatttgatcaggttcatcatcctccaccaaccctcaggtcatgtctaacactctagcctgtcttcagaataatcccggtaggttggtttagccagaatctcctgtacacttgatgttgcctcttagtaattttcatccactgaccacactctgccccttgactataaattcccacttgcccacgctgcttttggggttgagcccaatctctctccctgactgcaacaccccatgctgtggtcccggtacccatcccaatggtcctgaagaaagccttccttatcatgaattaacaaacatcattgagtaacatttcttcaacaccattagccctatcctagataaattatgaatttcagggtcaagaaaataattctttagtcaattaggcacacaaagaaagttctctataaaggcaatacttttgttcagcctatgatgttttcatgacattcaaccccaaagacaatgagacaaatatctacaaaattctgaaataaagtgaatggacacagccaacatcatcgagattataaaagacatgcattctcaaaaatggaggaacttaggaaattaaggcacccctcagtgattcttgaaaaaacagccaaacaaacaaaaaaactggagagtgaaatccagtagtgagcatcacctatttacctatagaatatgactaaacaattggtgaaattagaatgcaaatgttgtaaaccctgacaaataaaaataatgcaatataacaaaagctggaagatagtgcagcgaggtgggaagaaatgagatcctttaaaaaattgctgtagttaattaatattgtttcaagttgaaacagtagattaaaaaagacctcatttagaaaaatcttttaattttatggggatcttttgaaacttaacatcccttgggtgaagaacatttaactgaaattcagcaatttcttcaatttccttttagtttttctcctgacaaattcaagtaaaattaaacacattttaaaatggcatttataatgtgatcctatatttataaaactatttctatttacccatccttcctttctccttgttttctcctattttatacctatgaatggataaataatctagaaagaatgttcttcaaatgtttgtgcctgttatctctgggtgttaaagctttgagttattttctgctttatttcttacattttatgttatatttaaattttaacaggaagtgctacattctattatataaataattaagcaatatacattattatattttataaaagtgacatcttaaaaataaaaagaaaatagaaaatttcttacatacttttagcactggcattattaatgtaaattccccttctgggtaggcaccattagccatacaggcaacatggcccatgtcctcagggtattatatagtttgtcacagtgacctagtcccacagatggacatggaattatggcaatatcaacatattgcttcatgaccaacatattgcttcagtcattttcccacaattataaaatgttgccttctttctaagaaatgtcaatttgattaaagtcacagaaacataatacaaatgggagaaggattaaggttttaatgatttactaatgttatctcaggaaataagggcagacattcccataggcttattaaaatggatacaccacacacacacacacacacacacacacacacacacacacacacacgttatctttgctctgttgtccaggctggagtgcagcgacaccatcatagctcatcatagctcacacgcgcgcgcgcgcgcgcacacacacacacacacacacacacacacacacacacacttaagttatcttcgctgtgttgtccaggctggagtgcaatgacacccatcatatctcactatggcctcaacctcctgggctcaagtgatgctcctgcttcagcctcccaagtagctgggactacaggtgtgtgccactacacctggataatttttaatttttttttttttttttgtagagacagaatctcaccatgttgcctcagttggtctcagactcctggactcaagcaatcctcccacctcagcctcccaaagtgctgggattacaggcataagccacagtacccagccttaagttatttctgattaagggtaatggcatcagcttctgtgttccatcactattttattcaccttgacaagtattttgagcaaggagatgcccactttatcagtaagaaattaagtgtaatttttaaattttgacatgtacctttataatttctgcaaaaataattttggtccttccttctttggctttttctgaattgttttctcacaaaactcttagctttttttttgcaccatctaatgtatttgagcatcaaaaattaaactatgctatttaaggttttacaaatagtgtttactcagattgggaaataaactttttttaatgtggtcacactgatcagaattttatattttgaaaacataaaagctaaaagatggttctatgcaaaataaattttaaaaactgcaactctaaggcagtattgcatctttctttttaataattggtcttgcttcacatctttgaaaagcaaacaggccattaaaggcatgcctgatgtgttagacacttaaccaggtttactactggacagggtgcaattttattaatctttaaacacattttaatgagctatgggtatagtttgtactactaaactaccatgaattgctcactccctgactcactttaaaaatgaaaaacatgtgtcaggtcagagatgagctggaaatcccatttaattatcaaaataacaagaatgaaaagagatccatgttgccatttaatcaagtgagcctgcaggcttaggtgctaacattatgagcacctatctataatgccattactcagactggctagaaattagatacgtcccagcccttccagctggagcttaagagaagcattgttggcatccatgcaattcttgcaagggtcttgaaaagacagctaacgggggtcagttcatcaggtcatggagatttaaatcagacagtgtcctggaaatttacaggcctgggagtgggcagagtgaattctagcctaacttctgttcccaatcagccaggggctcttgggaaaatccttttgccctctggatctttttgtaaagtggagtggcttgactagtttatttctgaagctcttaccttctgtaacatttcttgttaattaaaaagaattgagttttcatctaatctcacacagaaatgtttaggattctacctatttagtgacccctgacaaggttcattacaatgatgcaagggtgtgaaaggctccccccctttccaaaataccttctcccttggatgctctggtctaacaaatttttcctttagagataacatccaaaccatagccctccctaggcatgtgaggataacttgtcactattttctcagacaaaattttttactggatattttcgttgaggatagaaaggcagtaaaaaagttctatataccaagaggatatttagtgctggaaccaaagtgtcattccttctttttttattcttacaaaatcaaacaaccatttgtttttaaaccagagcattttattcctgaaactgtatgcatgcggcttatgaaaatactaaacaatcagaacttgctcttttttctctgttctatctctcaggatcagcagctcaaaaaaacaggggaaagagagtaatgaagataagacttggacctttctagaatgtccgttcctgagtgtggctaaacttgtaaagcaaatggctgtgggaaccaatgctgtggtgtgaggttactacagggcttttgcagggcaaagagagggcttctctgatatcctttaaaacgaagcacactgaacttgatcagggatgaacagagtatttctattattattttttttcctgttagaggttctcattagaagaaaatacacccccctgggccctctttgaattccaagaagctcctattcttaccagaattagaatgtaataactttttagcttaaaagcttgtcctggctattcctcatagcctaatttcttaatcaagtatatactgtatgtctcagtatatactacatgtactattacaatagtatttttttccttgagaaaatttaatttaatttaataattaatttaatagtcagagtacaggtatgtaagctctagggaactttgtttcccaatagtaaaggtagaagggaaaatatttatcacatggtaaatgatgtagagaaaaggatacaggtcctaagttaatatttgattattagctattatgattatgatggtcttgggttattatgtttagaagatagtggctactcattaataatttagctccataatctttggatggataggattgcggacaatttaaaattttcctatagtctgggcatagggcttatgcctataattccaacactttgggatgccatagcaggaggatcgcttgagcccgggagttcaagaccagcctgggcaacacagcgagatctcttctctacaaataataattttaaaaattagccagatgtggtggcccgcacttgtggtctcagctgctctcaaggctgaggtgggagtatcactagagcccaggaggttgaggcaacagtgagtagtgatcgcaccactgcactctagtctgggtgacagagtaagactctctctcaaaacaacaacaacaacaacaacaacaaacaaaaacaaacaaacaaacaaaaaaaccaaccaaaaaccctctcaaagccccccagaaaaccaaataaaatttccctatataccatgtttgttaagtgcctgcaggattttgtcttagttctgaaaaacattgccaacaatttgtaatgcactcacatgttcccctcacttaaaggatactgatactaccttacccttatttgggggtacatcttttccctggcaaggaatttttgctcattgactcacacttttctcaaaaccatagcatgtaagtcaagacaagaggacagaactaattcatttctggtaggattaggtcacaattacactagtttcttttttgacatcatatttcacctagctgtagtcacttttgttgtgaccatataaatcatttcagatccttagcactaagcaatttccttttcaaacttcaaatattcattcgcaggattattttactcttcctatggtctttcctcctattaaagttcattgacccttcacctatttttagaccctctggatccaaaatagcaaagaaaattaaatattcagttttttaaaaaacaaatatcaatactaagtacttgttggttttgactcagagtttcagatacctcagtatatgacatcatcacctggagctcccttacccaaattctgtttacaatggaagaatccgtgtgaagcattcaaatgtacacgtgctttttctaatagaaagaatgtaacaggttgctatgaattaaacacacacacacacacacccacacacaccacaactccactctttctatccaggacctgccaacaataattttagtatttgcaggaggctgttaacttgcaaatctttcatttatttaagaaatactgagtagctacaatgtgtcaggcactctggcacacctttaagtgcttggggtaattcagtggacaatatagatttccctgcttcatagagcttacattctaacaggtgtccatttggaaatctctccaataagattaaagtggaatatgacattaattaatatctcttatcatctaccacagggttatggttataactgaataattagaataaattgtgcctgtcagaaagagtggtccctgctccacaacaaaatgagaagaaaaagggcaatgatatatatgcacataattccttagctttaatctcaaaatcctaaagcttgtgaagacagaaagttttttcataacttagttggtggcagaagctgacctgatttcatatgagtgtttcatagtctttattgatccaacttagtgtaaatatttgtatgcttcactgcagaaatattcatgtgtttgcaatggggcattcccccagatgtcactggggtagagttctacccattgcggtagagcacaatactatcttcccgaacccccccacccctcaaaaacccaagcaaacaaaactgaattatttctggcaaggattttggataaggaactatgggcctgtatgtatgtatctttttgaatctaccaaccatattttctcagaaaggcctatcctttatttttcttgctttgggggtaggaaaatattatttctttatgttgtgatagcataaatattggtttgttctgttttcagataactttatttagcaaaatagaaagattgtcaatcctctattttttttcttaacattatgctcacctgtgaaatgtgaaactcaggcgatactgacctgatctaacaaacttgttgcctagacattcatattctagacatctgccctattatttattatacttctttacaatgatccacttaaaaaactgaactattatatcactaccataaatggaaagcctgtatcacttgccatgaatagcatctgatggcacttacacaggcctaataatggtatatactatattgaaatactgtttatatggacttaaattatagaacgttcagaacagaaaacaaaaaataagcaattagggttacctagggaagcaaaatagtgctattttgaagagcctatagattcatttgtgttctctttctttgtgggttatatgcatgcacagtattaccaaatattaaaaaattatctcaagaagccaggaatgagtatgtgtctaaacactttttatagcctttgtaatgaacaattttggtgactttcactcctttccattttcctttccttctttcccttctctctttcttgtctatttctttttttaaattatcataatcaaaagcaattataccttatatatgacatacaaagcagctcaatttcacaggtgtctgcctagaaaaagtgaagggaagattcatcttatttggttcactacctcaatgtggcattgttgcttccccaattggtggttgttggttaattaaattttaagaaacactgagcctaatagaaaattttacttccagcaaaggtttcacttacatatcacatatattatttgcctttctatttattttctatgagagagacagttttttttatgttgtgttttatgagctttgtgtacttataaaatgtacaatatctgaactctaaattatgtgtatgtatgagaatttgtgcattcatctatttttccttatctatccatctactcatcgattgaagagaaaaatgagaaagagcaaagaagcaagtaagcttagttcttgatttacacggcagcttgttgaaacaggaactttgtatcttgggttttaagaaaaacataaatatttgtttggaaaaaatatagaaaacaatatatagcagtcatttttaaattcacacaaggataaataaaatgtcttattttcttcgtgcaaaaaagatttatagtcttgaaaaactaaaaattaaataaaagttttaaaaaaatgctctgtgcattttcccaaggcattaataaccacttctaagtttatgcaacattaaaattggccacacaaatgggtcccaccttcttcatctattaaatgaagttgaaacgaatactctctcaggacactctgaactttcttaaaaattctctgctttgaggggccagcctacagttaggcacctttgtggctaatgtatctgctgtttgaaaactttgacagttttcttctaaggggaagaggtcagggggaaaaagctgacatttgaggcaatggtttggagagccatgttttgccaccatcatcatgtcactgttttggggggccatacttctgtttcttgttagattccaacatgagcgagatgaaaatgtgtatttttgtttgggtttttgagagccatccaactctggtttttgccggcttcttttctgtccccttctttggactttatgaactgactgacaggagacagtgaaatgcattggctctcagttcttggtgtacagttgaatcaattgaggaccttaaaacgctacatgaaagactgggctatgccctttgagattctgattctacagttcagtttcacctccccataaccctctacatttcaaatatgccccctccaggtaattctgatatactccagaggctgaataactactggattttcacacaccacaggctttactcatttcccagaaactgaaatgtccagggactgcaagagaagaaagaagtgtgggaaatctccctgcagtcttctacttttttttttttttaataacctcctttccatgctcttgtagacagccttctgagttaaaccattatcatacttggagactcaaggacaagtttaaacatctattgtgtatggctatgctaagtagtattgtttttagcagttgctaaatcatttccccaaaatattgccagttagtgtataataattggtattcacattgtacaattggttgacgtatgaacttttaggtaactcatctgaaagcattcaccattagctcttaatagtcaattattcagtcattcatttattaacttaatcgtgaatgcattcaccaaacatttattaagcacttttcaatagtgcagtgattattagcagcctgagctcagggatcaaaattccagggttcaaacccaggttgcatcatttctcaacatttttaccttgaaaagagtacctaattttacaaatctacattttgttatctgcaaaaggaataatgatacagcctgcctcattggtgaaggtatgaggaaatgaatttgaaaactcttagcccagtgcctaggacatagtgactgtacagacatgttagccattattattaccacaatgtgcaaggcaggggactaggtcctgaggatgcagtgatggatacgattacatgacttaagactgtagaagggaggaggcaacaccaatgctataacagacgtggagtaagtgtgcagaaaacacctggtggacccagtgtctgctgggagtgggtaggggagggaaagtcgtatgtgctcagggaagcctgaatgatacgatgttggagcaaagtgttgaagaaagattcgtaatcaactacattttataaaacatatttactcttgtcttttatatgattaaatgtataccatttataaaagttatatgcaaacttcaaaataaaaaactacttaaaatatttaagtttccagtaatgatttaggaggaggggtataagttctcaattccatggctttcaaaggcagaagggaaagcaaatatcttacactggtaacaatcgtagctgtcaacgttgccatagaagagattcctgtgtcagggttggaagttggtctggaacagtggttatcaattttgcaattttgggaagggagcaattttgcaccttccatcccaccccagggttcatctggcaatgtctggagatattttttattgtcatgactgaggagcgggtgccacgggcatctagtgggtagaggctagggatgctgctcaacatcctacaatacacaggacactctctcacagcagagaatcatctggttcaaaatgtcagtaatgccaatctaaatcagtaatattcaaaatacagtgtacatcagaatcacttggagagcttgtagaaacccacgtctctgagtcccacccccagaatttttgattcagtgagtctggagcaaacccaagaatttgcatctctaacaagttccccggtgatgctgatgctgctggttgggatcccattttgagaatgactggtctatataactatatattccctctcaaatctaaaatctatgatttatgtgagttttttcatctatacaagattttgggtgaaaagttaccaaagttatatttatgtcatttaccaacaaaggttattcagtgagttctagaaatatgtagaattaagctagttataaagttaccccaaatttcagctgctgccttctggatgccttccctcaagagctttcctggccaaaactaatgttacatataaatatgaggtataaagaattactggcagtctctaagattcaagcttgttacaataaatcagccctttgacatttatcaaataattgatgttctcaattaaggggtgacaacattaataatgcattcacctgccaataattatggtatgatatttgccccatgcatggacagtttcattatgctgggtttttcctccaaataggcagaagtctagttctgttcttctaatctgatgaagggcttggggatttaaggtgggttaaagaaatccataataatgttagagaacagaagatatgcagaaaaattaaagggaactgaattacagattacacaacagaaagatttgtaatgccttgcaagtacatttgttcactctctcactaattattatttatttgataaaatatatgaagtatataaaagccataatgatgtctggctaatttccattttcaggactggcagaagcaggcataaagtatgctataaagaaactggaaaagaaatgagaaataatttgaacagtgttaaaattggtaagacttgctgagaagttatgtaatatattaaaaatcaggcagattttattctatttgtgtggtctgcaaatgcctggcccaaaagcaggggtatagaatatttgacctctagagctctgctcagcatctccaggaaaaacctatttttgcttctgaatagaaagcataatattatcatttatacaaaatgatgacagatttttcacttacaaagaacctaggattatagaaaagaaagccatatcacaaccctctatttaaattgcaacatttgagacaacaagattaaaaaaattactcatcacatggtattgaaattatctttctacttctctgtaactgtttccagatttttaacttcttgtgggcaagaaccttgtctcaaaatgcctataattccagtaaccagcacagcacccaacgtggcagctgctcagaactgctcactgatgaatatgcaccattcattccttacatttatattacatttatttatttattatttatttttagatacagggtctcactctgggtccaggctggagtgcagtggtgctatgttagctcactgcagccttgaactcctgggatcaagtgatccttccccctcagcctcccaagtagttaggactaccggtgcatactaccacgtccagctagtttttaaatgtttcatagagatggggcctcactatattgcctaggctggtcttgaactcccggcttcaagtaatcctcttgttttggcctcccaaagtgctggaattacaggtatgaacctctatgactggcttacattttaattttcaactttcaaagaacataatttgattggtacttcgattccataaatggagaactggaactatttacaatagaaaacttgaacatgttcgcttgcctgagagaaaaataaaaacatctaatattgaaaaacacctggaaagttcatgagagagaagtgaatcagtgaaagaagctatggtttctgcagtcattctcgggcactctctcctcaagcattgcaatgagttcttttttcttttttttgagacggagcctcattctgtcgcccaggctggaggtgcagtggtgcaatctcagctcactgcaagctccacctcccgggttcacgccattctcctgcctcagcctcccgagtagctgggactacaggcgcccgccaccacggctggctaatttttttgtatttttttttttttttagtagagacggggtttcactgtgttagccaggatggtctctatctcctgacctcgtgatccacctgactcggcctcccaaagtgctgggattacaggcgtgagccaccgtgcccggccaaatgcaatgagttcttgttctacttttagatcacttcaaaactctgtatttcatcctcacattgccttgtaagacagtaattataacactgaaaaattcctttttaaaccttattactctcccttacttatctcctggtaggcttcaagtacgaggagttcttaatctgtgatccatggaccatggtccccaaaggtctagggataaagctctgcttcagtagaattagtttcctttgttacgtattttatcttacacatttaaaagaattattctgtgaaggggtccatagacttcaccagatagttaatagggtccagcgcacaaaaatggttacaaacacttggctgccttagctcaaagataattatttattatctttccttcataagctatagaaccgggggaggagccaagatggccaaataggaacagctctggtctacagctcccagcctgagcgacgcagaagatgggtgatttctgcatttccatctgaaatttgaagagagcagtggttctcccagcacgcagctggagatctgagaatgggcagactgcttcctcaagtgggtccctgactcctgacccccgagcagcctaactgggaggcacaccccagcagggacagactgacacctcacatggccaggtactccaacagacctgcagctgagggtcctctctgttagaaggaaaactaacaaacagaaaggacatccacaccaaaaacccatctgtacatcaccatcatcaaagaccaaaagtaggtaaaaccacaaagatggggaaaaaacagagcagaaaaactggaaactctaaaaagcagagcgcctctcctcctccaaaggaatgcagttcctcaccagcaacagaacaaagctggacggagaatgactttgacaagctgagagaagaaggcttcagacgatcaaattactccaagctatgggaggacattcaaaccaaaggcaaataagttgaaaactttgaaaaaaacttagaagaatgtataactagaataaccaatacagagaagtgcttaaaggagctgatggagctgaaaaccaaggctcgagaactacgtgaagaatgcagaagcctcaggagcccatgcgatcaactggaagaaagggtatcagtgatggaagatgaaatgaatgaaatgaagcgagaagggaagtttagagaaaaaggaataaaaagaaatgaacaaagcctccaagaaatatgggactatgtgaaaagaccaaatctacgtctgattggtgtacctgaaagtgatggggagaatggaaccaagttggaaaacactctgcaggatatcatccaggagaacttccccaatctagcaaggcaggccaacgttcagattcaggaaatacagagaacgccacaaagatactcctcgagaagagcaacaccaagacacataattgtcagattcaccaaagctgaaatgaaggaaaaaatgttaagggcagccagagacaaaggtcgggttaccctcaaagggaagcccatcagactaacagcagatctctcggcagaaactctacaagccagaagagagtgggggccaatattcaacattcttaaagaaaagaattttcaacccagaatttcatatccagccaaactaagcttcataagtgaaggagaaataaaatactttacagacaagcaaatgctgagagattttgtcaccaccaggcctgccctagaagagctcctgaaggaagtgctaaacatggaaaggaactggtaccagccgctgcaaaatcatgccaaaatgtaaagaccatcgagactaggaggaaaccgcatcaactaacgagcaaaatcaccagctaacatcataatgacaggatcaaattcacacataacaatattaactttaaatgtaaatggactaaatgctccaattaaaagacacagactggcgaaatggataaagagtcaagacccatcagtgtgctgtattcaggaaacccatctcacgtgcagagacacacataggctcaaaataaaaggatggaggaagatctaccaagcaaatggaaaacaaaaaaaggcaggggttgcaatcctagtctctgataaaacagactttaaaccaacaaagatcaaaagagacaaagaaggccattatttaatggtaaagggatcaattcaacaagaagagctacctatcctaaatatatatgcacccaatacaggagcacccagattcataaagcaagtcctgagtgacctacaaagagagttagactcccacacattaataatgggagactttaacaccccaccatcaacattagacagatcaacgagacagaaagtcaacaaggatacccaggaattgaactcagctttgcaccaagcagacctaatagacatctacagaactctccaccccaaatcaacagaatatacatttttttcagcaccacaccacacctattccaaaattgaccacatacttggaagtaaagctctcctcagcaaatgtaaaagaacagaaattataaaaaactatctctcagaccacagtgcagtcaaactagaactcaggattaagaatctcactcaaaaccgctcaactacatggaaactgaaaaacctgctcctgaatgactactgggtacataacgaaatgaaggcagaaatgaagatgttctttgaaaccaacgagaacaaagacacaacataccagaatctctgggacgcattcaaagcagtgtgtagagggaaatttatagcactaaatgcccacaagagaaagcaggaaagatccaaaattgacaccctaacatcacaattaaaagaactagagaagcaagagcaaacacattcaaaagctagcagaaggcaagaaataactaaaatcagagcagaactgaaggaaatagagacacaaaaacccttcagaaagttaacgaatccaggagctggttttttgaaaggatcaacaaaattgatagaccgctagcaagactaataaagaaaaaaagagagaacaatcaaatagacgcaataaaaaatgataaagaggatatcaccaccgatcccacagaaatacaaactaccatcagagaatactacaaacacctctacgcaaataaactagaaaatctagaagaaatggataaattccttgacacatacaccctcccaagactaaaccaggaagaagttgaatctctgaatagaccaataacaggatctgaaattgtggcaataatcaataccttaccaacgaaagagtccaggaccagatggattcacagccgaattctaccagaggtacaaggaggaactggtaccattccttctgaaactattccaatcaatagaaaaagagggaatcctccctaactcattttatgaggccagcatcatcctgataccaaagccgggcagagacacaaccaaaaaagagaattttagaccaatatccttgatgaacattgatgcaaaaatcctcagtaaaatactggcaaaccaaatccagcagcacatcaaaaagcttatccaccatgatcaagtgggcttcatccctgggatgcaaggctggttcaatatatgcaaatcaataaacataatccagcatataaacagaaccaaagacaaaaaccacgtgattatctcaatagatgcagaaaaggcctttgacaaaattcaacaacacttcatgctaaaaactctcaataaattaggtattgatgggacgtatctcaaaataataagagctatttatgacaaacccacagccaatatcatactgaatgggcaaaaactggaagcattccctttgaaaactggcacaagacagggatgccctctctcaccactcctattcgacatagtgttggaagttctggccagggcaattaggcaggagaaggaaataaagggtattcaattaggaaaagaggaagtcaaattgtccctgtttgcagatgacatgattgtatatctagaaaaccccattgtctcagcccaaaatctccttaagctgataagcaacttcagcaaagtctcaggatacaaaatcaatgtacaaaaatcacaagcattcttatacaccagtaacagacagagagccaaatcatgagtgaactcccattcacaattgctacaaagagaataaaatacctaggaatccaacttacaagggatgtgaaggacctcttcaaggagaactacaaaccactgctcaaggaaataaaagaggatacaaacaaatggaagaacattccatgctcatgggtaggaagaatcaatatcatgaaaatggccatactgcccaaggtaatttacagattcaatgccatccccaccaagctaccaatgactttcttcacagaattggaaaaaactactttaaagttcatatggaaccaaaaaagagcccgcatcgccaagtcaatcctgagccaaaagaacaaagctggaggcatcacactacctgacttcaaactatactacaaggctacagtaaccaaaacagcatggtactggtaccaaaacagagatatagatcaacggaacagaacagagccctcagaaataacgccacatatctacaactatctgatctttgacaaacctgagaaaaacaagcaatggggaaaggattccctatttaatcaatggtgctgggaaaactggctagccatatgtagaaagctgaaactggatcccttccttacaccttatacaaaaatcaattcaagatggattaaagatttaaacgttagacctaaaaccataaaaaccctagaagaaaacctaggcattgccattcaggacataggcatggggaaagacttcatgtctaaaacaccaaaagcaatgtcaacaaaagccaaaattgacaaatgggatctaattaaactaaagagcttctgcacagcaaaagaaactaccatcagagtgaacaggcaacctacagaatgggagaaaatttttgcaacctactcatctgacaaagggctaatatccagaatctacaatgaactcaaacagatttacaagaaaaaaacaaacaaccccatcaaaaagtgggcagaggacatgaacagacacttctcaaaagaagacatttatgcagccaaaaaacacatgaaaaaatgctcaccatcactggccatcagagaaatgcaaattaaaaccacaaagagataccatttcacaccagttagaatggcaatcattaaaaagtcaggaaacaacaggtgctggagaggatgtggagaaataggaacacttttacactgttagtgggactgtaaactagttcaaccattgtggaagtcagtgtggtgattcctcagggatctagaactagacataccatttgacccagccatcccattactgggtatatacccaaaggactataaatcatgctgctataaagacacatgcacacatatgtttattgcggcattattcacaatagcaaagacttggaaccaacccaaatgtccaacaatgatagactggattaagaaaatgtggcacatatacaccatggaatactatgcagccttaaaaaaggatgagttcatgtcctttgtagggacatggatgaaattggaaaccataattctcagtaaactatcacaagaacaaaaaaccaaacaccgcatattctcactcataggtgggaattgaactatgagaacacatggacacaggaaggggaacatcacactctggggactgttgtggggtggggggaggggggagggatagcattgggagatatacctaatgctagaggacgagttagtgggtgcagcacaccagcatggcacatgtatacatatgtaactaacctgcacattgtgcacatgtaccctaaaacttaaagtataattaaaaaaaaaagccatagaaccaatttctgatgccatattaatcttattttctcccaagaatactggccatttaaccctaactacctggtaacttcctatgtctcaaatttaactaaaatgcccaagaaaacagtgcttctgctatcatataaacaattgctaaattatacctattcttaacctagagtaaaagtgattttgcattacattgattcctaaggttagagtctttttagtgctttataatgttcacttggagggttatgccttgttataggctaaatgtttgtgtcttcctctgcccaaatccacatgttgaagcactaacccccaatgtgatggtatttggaggtagggcctctgggcggtagttgggttagattaggtctgagggtgggaccttcatgatgggattagtgcccttatgtgaagatgaagatggagagattttgctcttcatacatatgcaccaaggaaagaccatgtgaaggcataaagagaagacaaccatatgcaaaccaggaagtgggcccttaccagacagtgaatctgctgataccttgaccttggacacccaagcctcaagaactgtgagaaacaaatgtttggtgtataagcaacctaatctatgatattttgttacagcagcctgaactatgacatacctcttcccatttagaagcctgtattggcaaaacagcttcaacaataccaacatgctttcataaaacaataactttctaaggaaagcattatattttttgtactctttttagcttggttcaagaagatattcatagttgggaggaaagaaagaaatcccagacatgctccatttcttcaccgttcaaccctgtcaccatcattggctaagaggcaagagaggaattttgtacataagagacttaatgcatatggtttaagatttcagcctcaactgttaggttcttctccaaacatctcaaaaatctgcatttggacaaacagctagatggcttgtagatatagctgaagaatgttgatccactcttaggctgaggacactcaattcaagctcgacgcatttcactagcagctttgtttattcatgttgaaactcagtttcaaagcccagtaaccatagtatgactagataaaatagaaattttatgtcaaagttttctcattgcaacatctccttctatgaaaacactatttttttaatacctttctttacctttatttctctgaggagcaagcatgtggcaatgagaagggcatgtgctacattttctcaccgttagcctgggcggcatggggttccaagaggaacacgagagtggggcttaaaatgacccttctcacttttaagtgagatgtgcttgtgtaaagtaagaagttgaagatcaagttagacagaagttgaagttgggtaaattccaaggaataaaatttaacattcacagataggtactcaagcaaccttttgaaggccccaaagcttgtggaaatccaggcttttgcagagtttcagaatatctaccaccacttgcagacccaatgcagtgggttctacatagatatcttacacacatttccttttcatattctttcctttgccactgaataactctgttcgtcccctacccagcgccttcagctttacccactctcctttaagcagatctgagacctgcacatttaccttaaaaatcagattcctagggctacaaggacttaaaagacttcaatttaggtcttgattgatcaaaaacagaaaaagaacctgcagttggactgtatgtttgtcacagtatttttatgtgcattattttatttaaactttcattcattttatgagcaatgtaggccaagagtggctttcccagcctagagaagaagaaaatcagttctagtgaagcataacttgtatgaggccactgtcctttagtttgtaagtgagatgagagttgttctgggattctgatatcctgaaaaatgctcttccagctcttcctggtcaacttgaaagggagagaagaaaactaactttcaacaggagcgttgtcccagctttctgcaattctagagaatgtttgagaatctttattatgacagcattcttttgatggcctttaaaatgtttttgggatgatgtggggagcaggaaagtttgaaggcagaacctgatgttgcattgtaggaacacaattcaaatgtaggctcctggactgattagatccagttcactttctattgtcaaatgataaattcccaccctactttggcatgaactttaaaaggaaacaccagtagccaaaggccaagaagagaaaggaacaacatttactcatataaatagtgaacactgccaagcacagaatttactgtgcacttgtcttggattttctccacattatagcttcacaaaagctgtggttccaaagttgcactgaataggattctgatttggtacattaacacatcatgataccagtagcacctgatacgtgacttcctctaggttttaagagcatcttttattctgtcccaaatatagaaggcaagttttctaccaagtggccggagcaggacaaattgtgacccaaggtagtaaaaggaaggctgggtgaaggccaagatgtggatgaagacagccagtggctggaagcccagagaagtctcagttcctggccttaacaagaaatgaagtatgattggcagctgcagagccaggatttctaaaccaacattgtgagttttccaccgtctacatctgaactatttacacattccatactacctagaaaataggctaacctgttgttctcagctgagagttgtgcttggacacaaaattctagaactaggttctgcaggattctgtctactttctgtgagtatgtgactgctctttttttttaaccccttgttattttttggctgaggctgtcctccattaatagatttaatacctgtttatttccactgctattaaaaaatttttctgaaggctgccaaaggatgtttttaccgtgttcccagcaatgaatagtcctgtctttttctgccgatataagcaagcctgtgattgactgccaagacttaaaattcccgggttgaatcaagtacactaaagcagtgtttttcaaactatgggtcccaacacataagtgggttgtgaaatcaatttagtgggtagcaagcagtgccttttaaaaaatgaaatgaagtagactggaaagcgtcagttcactgcgtttcttaagagttaggattgttttgtgaaacttttgtttgatttacaaacacacaccatttgtatgcttggtcgttatgtaaaatgtatttcttactgtgggctgtggtcatcaattggaaagccactgcaccaaagcaatgccagaaacactgaaagaagtgacttgcttaaggaaataaagcccttctgatttctgactgttgtccagagtgctggctaagaagagggaggggatgaggagcctcatgaaaaatggacaagagcccagtgtggggtttcaagccagagcttgctggccaaatgggaaggctggcaagtggacagacgagggcttcattactgctgcctattagctgcatgaatactaaggaatttttaaagaaatgaaacacgtaggatttaaagcaccaacaagatctttaggtagacaacttcactatgagaaagatgtttcataaactgtatcacaaatttctaaatgtttagtaaagacaaacacaagttcaaatgtgcttggatgcatattcttttaggttaaaacataaaaaattgccaacattcagtcattttaacctacaaaaatggcaattttatatagttttcccttcaaagagattgcattccatttttttttcttcaggtaaatagcaagttcatcagtgtctactcatccacttacccatctacctatctatccctctatcagtcttttctttttttggagttgaggagggagggaccaagaactaaaatacaagttgcctttcagaaatgacgtgaaaattaaaataccacttggctttttattatagcagctactcaaagaaaacctaattatttcgaggagtctgtttcttggttagtggatattaattgcagcctaggctaaaatatcgaaaaggctgtcacattttttctttcatgaaatctctctaacatatttttaaataccttgaggctgaagtcaatctccctacttactgacatgactaaaaattcattatatctatatgtatacctcagagtattgggatgttccctatcatggtgacaaacctaaaatctcttcacctttacttatagattcccccatccccagcaaaggcctccagtgtctttcatgaaaaacctccttacttttaaagtcaatgcctagctcctctcttctgatttttaactgtggcagacaacatttactcttctgggcattatttcctatagaaaagaaatgaattaggttgtgctttccctgtttcctcagccacccagagacatgtttgcaaggcaataaagttttccatagtgtctgagctgcaaaaaatgagccaagaaaaacctcaaaacactagcagaaagaaaaatatttggtgcttagttacgtttcttttgagatatgaaggggtggggttggggggataaatctttcaggaagtttactgggttactttaattaaatgcaaggcctgtctctctcttgggccatacatttggagtgtctgcctgccatgttctgcaaacaacggagaggcaccaggccgagaccctctttgggcctatctgaaatgtctgaattaacacgggagacatcttataaacaaaatgttctctccagtgagcatcatatcctgggcatgttcactgtaaacttcaaaaactatactcagcattttgaaacaaaatgattatgaatcaaagttcctccctagttatattcaaaggactttggtcattaaagttttgattctctgacaactcaattcagtttctcctccaagagacacgatgcacaatcaagtggttaaaataccttaattaattagatattaggggaagaaatgtatttttctgacaagaagcctgatttttctagcaattgttgatcctgggatggcattaaaatcagtcacagcagcagaattgcatagtaatgactaaccttgaaacctttttcttggaaaccccaaagcagtcgtctagccctagaagctaatatttttctatgctctgccaggcatgaaataaaataccttaaaataattcttggaattttcttgactaacttgactatagggaggtggcatctgttactcaagtaagatgtcctgttctcatgaatttccgtaccaaagagaagtggttcaggcagatcaacagagcccaggctttgggactacagaggactgtgcttaattaagcaaaaaacactaattgatcccctccaactgccctcccattttccttaatgtacctttccacaccttaccacctgagagcgttacccaaaagagagatccacaaaataggttcctgttacagccttcctctcacaataggagattagaagccaagttgtacttgaaatttgtaatttggatttagtaaactaaattcctatgatgcagcagtttaaagactttagaagaaagacacagaaaatgggaggccttttgaatattgagtcctgccacttccttttattagcaaatgacacagggctctgcctagacatatttaaatataaagtgcaaactcctctttgctttcaaagcttcatcagtgtttctgtgcgcacatgagttattgtccattgtcccttggcatctgtggaggactggttctaggacctcccttggacaccagagatgctcaagtcccttatacaaaagggtgtaatatttgcataaaacctacagacattctcccatatgctttaaataatctctagattacttatgatacataatgcaatgtaaatgctatgtaaagagttgttatactgtattgtttagcaaataacaataagaaaaaaggtttatacatgtttagtatggatgcattttttttccaaatattttcaatccatagttggttgaatccatggatgcagaatccatggatatggagggctgactctacatttcttgcaaaatataactggggctcttttgcacattgtcaacaagactgcaaattagtccaacattttggcaatatctgacaaaattccaaatgtacatgccttttgacactgtgattctacatcttggaatttatcctgcagacatagtcatttatgtaaatatatatgtatatatatatgttcattgtaggttttatgaaattgcaacattctggaaataacttaaatgtccattaacagaagactcagtaaataaattttggtacatctaatcattcaatggactaatatgtggctgttgagaaaaaagagtaacataaagtgaaagttatatagagaggtatgaaaaggtgccaaattttattatttaaggaaaaaatttaatctgtgttacatacaatgtgtgtgcacatgtttgtactatgtctgcaatatttctggtaaggtatacaagaaaatgaaaaaatgcaactagtggtcacctacagggagtagggctggaagatagggagggggccttctacatttcattttatatccttctgaactgctcaatgttattactatttttaccataaacatggattgcttttactaaaatgcttttttaagtgctccagggccatagtagctgtaaaaattaagtctttcagtccccagaagcatcagggacacatccaattctaatatttatatttttagatggtggcaaggctctgaactgagatgtaggtgctgaccccaaagtgtgctgtgctggtgccgtcctctaagctccctgtcctctccactgtgtgcatcaccttgtttcaagcccttctccctggctcgacgttaagcttcctgctgggggtcaggaaccatcttgtcctcattaatgacttcctggttctcagcactgtgcctggcaaatagtggactctcaataaatcttgtcgagtaaagaagtcagtggtctcatttcaactacagttctaacaggataattaaatgttagagttaagaaaatcaataacaataatagaatgctataaccaagggattttagctgcatgtttggaccagatccctcggctcctgggccctctcactgatctatggcaagggaatcttggactatacaaaacattggggtcccataaactacactgaggcatttcaatgaaaaaaaacagaactttggctaaagttaaaaaagtttaatttatttaaaatttagtcaattttatcaattttctaaaaatagcatttgatagaatttctcagctgcaaagtttttgtttgttgctcataattttttgcacctgctaccactcactggtctgtcccagaatcaagtataaaatataagctggttttacccaaaattaggcatgttacttttaaaagttcctggccatcatcattttggggtggtctgaaagggtatcacgacttctacaagctctgatacctgaatgaatttgagaatgttgagacgtgttgatcattaagctattgagctttccctagaatgtggagtcacccatcccagtatcattcaatcatactgcagagttctcccttcctaggctgtgcccctagcaagagaaagaaatgaaaatcatagagaaaggaatgaaaatcaactagaaatgcctttccccttcttactaagaaaactctagctcattatggtaatctgtcattttatttaaaattatatactatgtcaaacatgcaaaaaagaaaagaagacaatattgcaaaatccaaggacatgctacctcaattaatcaaattgtatcattttgccataatgctgaatgtagtgtttatctgtcccatgaacatttttattctgttacaaaggtacagtaatctattcttttaccaactaaaactttcaataaaatgaggccagatgaattcagttcattcaaatggaatttgggtatagggtataatttcctgagcatggcctgattacattcccaaaggccatctagggtagggaggcttaactaaaataggctgtgtccaggttgtgatcagtgcggcaaagcagatgccattgtggcggctgcagcatcaagtttagtttagactcactgttaattacccaccctactcagactctttcttaccaaccatcttgttttccttcagagtctgaaaatgcctggtacttggatttccagtgtggtagattgtttccacaaatggctgcaataatcactgccaccctgcatgtctctggcaatgtgactttgccattcctttcatcaagagaagtggactccttctcaattgagctgaccctgcggcttgctttgatcaacagagtgcataagtgacactgtgtggcttgagactatgttttaagaggttttgtagtttccacttttatactcttttggaaaccagctaccatgtaaacagtcagaccatcctgaggcagccatgctgtgaggaagcccaagctagctaaacggagagaccacgtgaagaaagttagatgcctggccaacccccaggacatcctggatgttgtagctccagcagatgccatgtgaagcagaaataccacattgctgagcccagcccagactgaagaatcatgagaggtaaaaaatagttgtttaaagccactaagttttagagtgatttgttacacattattgagtaactgactcacccaacctcccttaatgctaaggtatgagcccatgacccaattctgggcaattagatgtaagaggcagtttgctagaggtagtatgaggagggtttctggaagagatattttccttcctgtaatgaagacacatgtgacaagacactgcttctcttttggtctttggatgtggctgtgtgaacatatgctgcctagagaggtgactctgagcggacagcctgggaacaaaaggcaacacggagacaatagtagggcaacaagatggagggcaccttgatgacctgtcatgccacccaattaactaaattaaacccactaccttggagttcctgctttgtgaaggaactccattaagtcattttgggtctagaattctgtatttcaagtcaaatgacacaaatcttatttgtttgactctagggactagcaaggaaactttcccttaatgctagcagcatgctgctttctaataatacactggctctcagcacaatcatccaaggtgctaaaacaaacaggatagagatgtcttcactgaaatgtaagaaatcacctgtgaattcaataaaatccatgttagctttctgaaatactatgtccaaaaatgtccctgtaactatgataccaactcaaattcctcacacaattatattttaaatgctgtcctaggtctgaaaactcaccacctggaaaccagatttaaatatataacgggggctgatattctttataggaggtcaaacataggcacagcattgtattatcgaaactagctcaagatagaaatatgaaaaaacatttcacaacatttggaaaagccaagtaattaatatctaaagatggtaagtgatagccctaaccacatgcatgtatacttcgaagatgcaagaaggtacatttttctttggggactattttactacacaataatacagtataggattactagggcaggcatttaaataggcacaaatgtgtgcatctgaggttattgattagtatgcaactgcttcacctgacattaaattgagtgattgaatggtactttttactgtgacataacttagtgttttgacttaagtacaaagacaagtttttgttcagaagttaagttttccacttaagacaattattgtgccaggagttttttgcttgcaaattttatttcagtaagtttgcctgtataacactacttaatggctactctgcacttttgaattcaattgaaacttgttagccctcttcattttctttggcttaggaaaaccccgtatcacagagtgttaatgaggccagcttggggttcctgaggcttgggtctcaggtctaggccaactatgtatgaatccttgggtcagtcactgaacttctccagctgtcaggttccctatctgtaaagcgatggaatttatcaagcactgtccaatagaactttctgtgataatgtcaatgctctacatctgcactttccaatatgggagccattagccctgtgtggctaccaaccatttaattttatttaattttattaatttacatttaaccacctttggctagtggctgcagtaatggacagcacagataggtgatctaggtccttctgatctaaagattatttgctcctcctaccccaaatttccacttagttttctctttcctacatttgcctctgtaacaactctccagtctttttattttacttagaattaaaggtcagatatgcctttattgccattccagcctagagtcaagagcttagaattaactataagcattaacccacttcttgaaatggagaaaaggaccagctctcagaggctctttgatcttccattagagctcagttggagagtcaagagttatttggatggaataagatctgacatttattgagtcaaaaggcagcgttgatgtggcttcctattttaggataatgtcggcttcggttagaagcttgacttcccaaagctcctgctaataaatatggccacattgttaggacgggcaattcttttgcaaacaccgtctactgcaattacgtggtgtgacccctactatgtgccaaggcacaggactgagttcagaggctgagaatatgagtaagtttccctccagtaataaaagcctaggtctaacagaagagcctgaccagaagataaatatttataacacactgtgacacatcctatgaccagtacaggaacaaaagtgctgtaagagtacagagaacagagcaagccctgtcctcctttctggtgagccgggagagcataaaggaggtatcctgtggagggtgatcaggagttaactccagcaccaaggagggggaggatgttcctggcagaggagcatggctccttaagggatgtcagttaaatagggctatccacacactttaggtttgagtttcagggaactcagcaagaactgagtactgattttgtgacttcctgccgaagagccctttagcaaggtgatttctcaaataggtaaaatgattcaaactttgggttctgaatctttgttgatttcaaggagcaactttcacttccttcataaacaatgagtggccctagtacttctaaccccatttaactctacccgtatagtatgagaaatcacaaggcatatctgagggaagacatcttttgaaggcactgaatgccaggtagtatccatgggttagaaaggagacaatgaattaataagaagtgtaagtgatgagtgagtaataggaagcataaatttttccatcaaaacaaccatttcttatcaccacacagactgaatcttggaatacataccttacttccaacagtctactgctaacctctttgaataacaggctttcagtcttcaagacgtttgtttttctgcatttcctcttcctacagtgaagtcactgggggcagatgaaatataaaatgctggagtttgcctctctggcgagctgcagaaaggaatttctgcattattgtgatcatctatttcattgtagcacttagttgcttttacaaagcagttctcctgtccttgcccctgccatttagaaatttacaggctaaaaagatggtgatgacccagacgagttatgaaggccctataaacaaatgcatactcattacagaaacatatagtaagcacttgccttacgtggcatccacaggccagggaaatggtgggatgctggcggcttcgtcttgaggcagttaaatgatgtgaggttccctcactgttctcgcctgctgttaagtagctacaacagacttccaaactccttccctctgttttagagagctgttccacacttgatgctgcacattataatcacctgggagctttaaaaaacctggatgctcgggtcacacatcccagaccaattaaatcagaagctgtgggtttggacccagcccataatgcattttaaatgcctcaggtgattccaacttgtagcacgtgtaagggcccgtgctttagacttcagagcagtggctcctaacttttgaatttaaaaaatacatatttctaggccccaccccagatctactcaatcaccatctctggggggcagattttcatgttactttctaataaactcttaggtcagtttgattccagcccttagttgaaaaccttgttctaaagcatcgaatttctatttcttctttaatgttgtgcatatgaaatgtgagaaaatgaaaataggtccgttaaagactacatagaggatatttatttatttattttggtttcaactttttattaaagtgtcacatacttaaaaatagacacatgcagagattgaaagtgagtgccttgagaaaggatcacaaattgtgtcactggcacccagatcaaaaatctgaagcttaccagtcccctacaatccctcccttctaggtactatccacgccccatgggaaccacaaacctgattctaacatttctcccacctgaagttttatttgttccaattcggtacaattgcagtaaagttgacttaatttcatgcaaataattattcagatataattaagaggccaatagtattttgaggacaaatggcctaacacatcttgtattgcatttgtttatgattattttaaacaaggaagaagaaaacgaggccaggaagaaataccgtctctgattttcatagattgttagttactgggtacaattttcaaatactttttaccctaagccttgtaacaactctgtacagataagaattatcgtcatctctacttaacagatggaaaaatagagccttagggaggaagtgaattgccaagatttggcctcatgttcctcttacatggaaggcctttccctccattgctgcatgcacaccgtctctcacctttgtaacctcctgtaagaaatcagcatgaaaaagggtctctagacatgattatggattgtgactcatttgattgttttttaaaaattcattccaaaatactttatgaactatagttctcaaatcacatagataagttttttaagttaatatttttttttctgcttagaaaagtaattcaggccgggcgcggtggctcatgcctgtaatcccagcactttgggaggcccaggcgggcggatcacgaggtcaggagatcgagaccatcctggctaacacagtgaaaccccgtctctactaaaaatacaaaaaaattagctgggcgtggtggcgggcgcctgtagtcccagctactcgggaggctgaggcaggagaatggcgtgaacccgggaggctgatcttgcagtgagccgagatagtgccactgcactccagcctgggcgaccgagtgagactcagtctcataaaaaaaaaaaaaaaaaaaaaaaagaaaagtaattcaggttcactgtagaataaaataaaaatgtagaggaaactaagaatcatgcattataactaagagttctttaaaaataagaaagaccttaaagagcctgggctgtgtagttctccagccttgcctgggggaaggagaatgagtaacttgatctttggatgcttttcaagaaatttaatgtgaataacttatttgtaagtgtcctgtagttggtacagacccgatgctgtatcctatacaatatgcaaaaaatttgaaaagatcaagaactctatctgatctctgtttttcacagattaccaagtgtaactgcatttcccccacaattttttaaaacagtttctgtggtcataaaaactttctttttttttcctatttgttaacagaattggctgaaattgtggtatttagaaatttatcatcagtacatctgaattcttaacagaaattccaggaagccttgaggcttctggggaagtatgcttttttatttatttatttatttatttttttttttttagcaaacataccagagtttatacctttaaatgcatgtggttttctctggaggaggaagcagtgtactttttcagtgtgttcctattgctgaaaatactccaggggaattacaggaaagaggagcaggacagctttgagttgcacatcccaacactgactctcaattcctagactaaatggcataaaatttttctcacttactcagcaatgactcttcaaaagccaccgattacatctctagatctgtccagccaacacaaaacaatattttccctatgcctgagggagggcagaacactttgctactcctggaatttagcatatactcacaggcagtgccacctcctcacctgaggctgagcaaccagagacccagggtggctggttacacgtgactttgctcagttacaccaggaattaaggacaaagttgatacactattccaggtgttgcgactcaaaagaaaggaatttttttcacttaaaccctcaaacatggattcttgcatgatctaccaaccactctggccatgataaaacctaatactcatccatccatgtagttctcgaatctctatgcatacagtatataatatccatgatacacgtgcaccacatttatttcccaactattccccaatttctgggcattcgcttggtttccagattcttctttccctccctacaacaatgatgcaataaaattcctgtacacagaatcttgcatatcaatgcttttatttttatgggctagcttccaaaagctgggtcatatatgatatctccctgtgttttttattaatagagtttgccagattgcttttcaaaagttcaaagaccacaggaatgtattagactccccccatctcttcatctaactgcagtggtggatattatcgctcctttgaaatatttgctaattattttttaaatctgtaatacatatatttggtagatttgtatttggaatatattacaagcttgtatatgtcaatgaaaaaagttaaaattttactaatttgatgggaggggtatctcattgtagtgactgaatggtggacccccaaaacatatgtccatgtggtaatcccccaaaactatgaatatgacctaatttggaaagggagtctttgcagatataattaaggatctctacatgaaattatcctggcttatctggctggccctaaattgaatgacaagtgtccttataagagacacacagaggggagacacagggagaagcggtgagggccaggtaaagatggaggcagagactggaattacacattcataaatcaaggaacaccaggagccaccagactctggaagagatagggagggattcactcctagagccttcagagggagtgtggccctgtcaacaccttgatttcaaacttcttctccccagaactgtgagcatatattcctgttgttttaaaccaccaagctcatgtaatttgttactgcagccctaggaaactaaatatactcattgttaccataaacttttgtgtttgtctgaaaacttctgaggttgagcgtattttcatgtggttttaatgatcatttgaatgtgcttttctgtgagttaactacttatatcttttccccattttccctactgattcttatgaatgctgtggcaaagcagacattaacactttgccacatgttgtaagacacctatctagcctgtattttttagtttgtttatgatatgtttggtcatgcaattaaaaaattacatggtacagtatgcttatctttttatctatcccttattaattagctctgtattgattataaacatttccctgacacttggggtataaaattattctcccaaattttctctaaaatgtttgtggtaggcacaaagatggttccccaaaaagtccatgactttattgccgaatcctgtaaaaatgctatcttacatggcaaaagggactttgcagatgtgattaagggtacagattttgagatggggatattattctggattatccaggtaggcccaatctagtcacctgaatccttgagcggcagatgtcactatggaagaagggttggagagatgcaacattgttgactttgaagatggaggaaggaagccaaggagtatggctgacctctgagaatggcaagaaagttgattctccctcagaggctccaggctgaaacctaagcccttgtgaagcctgtatcagacttcttccctacagactgcaaggccctaacttggtgttggctaagccgctaggttggtgataatttgttatggcagcaatagcaaatcaatacatgtttgctgcttaatttaaattaatgtgtaccattatccacctatcatttacttttgaatgtattagcaagtagggcaacaaccgttctagatgtaccctccattctgttgtactgatcaatttgtttactcctttgccaatatccagttgttttgatatagtcacttctacacattcaagtacctggtaaaagacaagttagcctctgttcttgttttgttttttaaatagtttccctgggtttttatagattttgttttatgtcctctaaataatcatttcttgttgtatcttattaagtcttttaaaatttatgttgttatggtgaaaattccatctccatttgtaattgataattcttgtaaataaagtataccacatacaaccgtgtctcaaggcctttgaacttgctgttcactcttcctgaactggaatgtgcttgtcacagttgtctgcacagcagaatttgtcacaaacctcaagtttctgctcaaatgccaacttattgtaagtgaagccctccctaatcacctcatagaaaacaacacaccactgcctgccatccagtccatcggctaagcatttactatacttcttctctggctttgtatttttccccatagcacttgccaccatctggcttacctactcatttattttccattacccccaactaatatataagccctatgcagaaaatgatttttttcttttgttcacgactgtactagggaccagatgaatgcttattattcagtgagtgtttaataaatatttgttgaacgaatggctataaagaagacttactgatttttctacatttattttttagtccaacagccttgtcaaatattcttactgattgttgcactccagttttttactggagtccttccactcttacaggtatacaatcacatcatcaacaaaaaaggtaatatttctcatttggttgtattcattatgccagttacatcttggccaactaaaatcacagggacccctgaaacaaagatgaataatgttgatggaagcagagatccttatttgtttttcacttgataaaacaaatacaaagaaaaaacaaatacagagactcctccctgtgtctaggccctgtgccatgaatctttgctgtgaatctttgcagtgccctcatattttgagtctaggcttagtgaggtgagtgtttgggccaaagggtggtcagcaaacatgatgcctgaaaagtgcttctcacactagacttgctcttgcttctcggccgctacctgggctagcctgctgcaggaagagaatatgttgtggagtttttccaatgttctagtagaggccatcctcaatcagcccacagctagccagccccagacaccagacacgtgagcatgcccgattatcatcgcagagctgctgagatgatctatagctgaccacagacgtgcaagcaggcccagctgagatcccctgattcccactgtgagctacacatgttaattatcacttgtcactgaagtttgatagttatgcaacattactgggacaagagataattgatacattctcttacgtctaattttactacaaggagcctgagagttttgccattagaattctgttacttgttagtttttggtggatagtctttatcatgtttaagtgaaacagaaggatacaccgactaagttttttaaaaatggctgctgaattttacagatgcatttcctacatgtacttttataatctttttcctcctttaatttattgattggacaaatatttcgatagatttcctaatttttaacgatgtttaattccaggaataaatttttcttgatcatagagtattctttcttttgagatggctttggaatgtacttggtaatattttattccaaagtttgcccttatgtgtatatgtgaaattagctcatatttttttttagtctgtattttcttggtcagattttagaataaagattatattagctttgggaaatgattttgaaacttttggaagtgatcaaggagcccaaatacaagaaaggacataaatatttgaacgacatattctacacactcaatctaatagatttgtacacagaactcacatcatatgagttaataaaatagatttctgattgtccatggaatattaataaaatataaatcacaaggttaaaatgaacacctttttttaaaagtagatattttgataggatataatcttagatcgtaagcaaataaaattgattttaaataaagcaatagctagtaaatcttatctacttgaaaaataagaaacatcctttataatagctgtaagattcatgagaaaagcaaaattaaaatcataagctatctagtattaataaaaaagagaatatgttccatccaaagttatgaaacacagctaaagctatactcagaggaaaaatgtgtggcttatagctataatagcttcattactgaagaactaagacgttaacatagtactaaccttagtaagtttcatgaagaacaaaaatgtaaacctaaataaagtatgaagaaggaattaataaagatagatgctgaaatatagtggaaaacaaaaatagtagaaagaacaaatacattcaaaagctggttcttttataaaatatataaccatcttattaatatgattaaaggaagaagagggggaaatactaggattgagcaaatagagaaaaacatgcacacaaaaatgaaaatgattattaagaaagtactagaactagccccattgtaatagatgtgaaacctagaaaaaatggatgatttcttagcaaaacagaaattaactgacccaagaggaagcactaaaatgtaataagaagagacagaaatggtgattaaaagtctatcatttaaatggggggaagaagtatcaggattacataatttcacagctgggttccatttaactcttaaagaacagataattccaatgctatttaaactagtctagcccattgaaaaagacgaaaacctcctgagtttattttatgaattatatagatcagtggttctcacagtatgtttcctggatcagcaacatcagcatcagcatcatatgggaccttgttagaaaggcagattatctgtcctcccctgagacctactgaatcagaaactctggggttgggcatccaggactctaagatgattcaagtgcatgctaaagtgtgaaaaccattgctgtagaggtagctggcctacattttatatacaaaaggctacaggttgggtaggggtggtggatgtagcaccaacaccctagggttgggacttcctctagcaatagaagttgcatgtgtagggtaaggtcaagggggattacaattacagtattaatgttagcagctgcttatatagtggtagaaatcataagtggtaattgatccaaaactaatttagacatggccatttgcatactgcattctcattaccaaatgagaaaaattatattttcattgtaaaagcaaactggttataatgggttggaagcattttaatatattttaataatgaggtaaagagttatgtgagcttcacaccacaaatttcaggcatttcacatccattcttatctcatttccctctgtatctaccacaaaaagtattattattagctcagttttttagatgaggacagaaaggttcagaaaatttcaggaactttaccaagaatacctagttctatgcagcattcaaaatcaggtttaccttcctctaatcgtgccttggcatctcctactaaacttcttagaactttttttccaagactgggctgactcccaagaaatctgagtctatctcctcccccaatgggcttctaaaagtgtttcttccaatagataacaaacatacttcctcctcttgctaatttagacatgtttcaaagtaaaagtccttcaatttttgttgttgttgttgttgctttacctcagaaactaacaaatctttacccaggctatataatagaaaccattttaatattaatagtccagtcatttgaagattaagggcccggggtttgctttggcatgcagaaggaatactggttacctgcaattctggttttcagaaggttcataactgtaatagatagcagctcccccgaatctaaatttcctggcacatgccaggcctgcgctggaaagctcagatttccttgcttcagaccacccacagggaggaggcaggaatctgtcaacagtgtggtctcctctataaagctgccttccacagagggctctggttcctcacagtgagatgcagtgcacaggccaagatgattgggttgtcataaatatagattccctgaaagcaggaattataaatgggctggggaacaagggaaaaattatcccaaagaaaaatagcataaatattctttgtattttcctgcatgtatctggctaaaatcgactctaggaatggtggtggctgcatcacaaaatttgcaaggtgatcagaacagctgatctcaggttttttttttctaaggcatagcatactttggctactgggtcaagaaacaaagtgttaggcttacaccctctgcctccagcccattgctcaaagtctttgaattggcacattactgtaccttgcagaatgtgatacacaaccctgtaaccacgtacggttggagtttgatgaaacttctcaagagagctaaaatctatctggatgtaaacagttgtctctttactttcctacaattaactgatagagtttaataatcacttaggtaggcacactatttattaggagccaattaattagtctatcatatctggttctaaaaaaagtcatattttaaaagcaaaccacaattacagatcattctttttttctcaaaataaaaaaatgaatcatatgagagttcttggctgtttttataaatataataataaattataataaaatattaatgttactttcttacttggcaataatttttaattaaactaaacaagtatatactcactgatgttggcaagcaaattttgatatcctacacagtgccatgtgtatgctgaacactatctgaaaccatgaattagttttaaatttactgaagagaaataacatggtaaagtctgagctaaagtttatttgtttagaacataaaaggaacacatgctctttggagaaaaaatttaaactacagaaaagtattaaaaaatcactagtaatgcaactattcagatctctcaattcttatttcctttagttttttatgcatctgttttttatatagttgaaattctaaataaattcccttcttatttttttccacctaacatcataaccgaaccattttcccacgctataacctcttcataaacagcactttcaatgactttatatagttcaccatgtagatataacattaaatatttaacattctcctattgaaagatatttggctgatttccaaatacaaataatgccacaaataactttctgtgccaaaatttatttctgaattctggatggttttttttaggaaatattttcagaagtgttccagaagatcccaaaattactgctggaaagaatatgaatagttagtatactattgatatgactgcaaattgctgttccaaaccatttgcttaaagggtccttcaagaatttccctgtgactttgctctgtccatactcaaagatttctgccaggttccagttgccttgagctgaagtataaaaggttgcctccaggagtttcaggccattagctaatggcctgtttccatagttcactgtggtcaagttaagactatgagtctatatgggcaaccactgaaatagcttttgttgccatcgctgcagcctctgtgaattttgcccatccggcaaagaaagtgagaggttgagttttgaagaagggcaggctgtaagttgtcagaaaggttggggaagggatattaggtaggactataaaataagaaccaccatggcacatgtttacctatgtacaaacctgcacatcctgtacatgtagcctggaacttaaaataaaagttggaggaaaagaaaaaaataaaaattaaaacaaaagaagctctaggcagttgaacttactaagggagatagagtgtattaaaataatgatattatcaataacaataatggttagaaacaggcataactactaccaaagtgcaggctttaaaatttggaattctatgaaagaattagggaggcttaacaatacaaggttagggtgttacgaaggttttaagtgtctttgccaagccttgtttgaggtcctactatgtaaaatcactggtggatacagaacatccctctgttttgaaatataaagtagagtaggtagctaaataggcagaaatcattctggaatgaatgaaatctttgttataaaaacaaatagagaaaagtaaatttgaggcatgtgaaaaactgccttgttaaacgggagaatggaaaattgttttattaagaggtagattgcaatctttggtcttttgtgtagatgtgtacttagaactctatacttacattttcaaatttgtgttcttctttaaatacaccatagttaacactttgcccatggtataaactcaatgaatatttgctcaattttaattgaatatgttttctttctataattatttgaattggaaattttctaggtctttgaagtgaaactcttcttcatttatggaataggtgcatgttccccttttgtttttgtgcctctatcaaccaaaagttctagaatctttcttcctgggaaggaaagaagtaaactgtttattttctttgccatttaaactgccatacccatgctactcaggccccaaacagaacctctgcccttggtgctccctttgtctggaaagctcttccctaccctttcctctggctcccgttttttggccaggtctagctggaatactgcttcatcagagaggccatctctgaccacacagcgaaagtgggttctacctccttgtacttcacatttttgttattttctaccttacctccttggcctttttgtatatgtattatgatttaaaattccaatatttttcaaactttataagttgataatcagaaatgttttacattgattcatgcacacacacacacataactgcaacaatagtttgacaaaacaacacgcttaagaagtgttagcggaataaagttttgtttctttactctctttgagtttgctaattaaaggaacaatcacaaaagctgtttgtatcccattaacttgatctcataacccactaacagggtgcaatccaaaatttgaactattgagttgttttctgtctgttctccccactccttcccttcagcctacagaaaaaatgtaagctccatgaggtaataaaattctactgtatttgtcttatttctggtacacagttgatattcagtaaatatcttttgaacaaatcaatacataaaaatgaataattaataatgtcttactaagttcatcttccttattttgttatgcttttaactaaaaataattatttaagttggagcatcatttccttttttgataaaagtatttttggaatctaatttaatgttcagggatccattaagcatttcaaggaagacactgacattactaaattgttcagcaatgcacagaatttgaaaatacacttgaaaaatagaactttgatataaacttgtaaaatacgtaggatgtataccactgattaaataaattaaaaaactccattcccctattcagtgctgtgttgggtagaaaaggggtaagtgaacaaacaagtggaaaagaaagttaaggaagaacatagagaaaaggattgttttgcgcagacatctggctttgcttccccaaagctactgagtacgggggcaggcgagtgggcttgctaccctaaatgggagccatatatcacattggaagctccatgtcacaattcaattctacttgcaaaatgtttctctgtgtgcttatttaaaatctctctttgtcaatgtgatattcaatcatgctactacttactgtttaatctttgtgaacttgggaaaaaggaattctgttcagaataatgaacttttcatgtgacttatatattgttttctatctataagaatttcccatgataggaaacgatttaccaataacctttgctttttaaaaataaaatgatgtactttgatttcatttcttaaaaaggaaaggaaaacagaagagagaagacttccctttaattcaaaatctttctttacataaacaactacttcttccagaacttcagtgaccactcatttgctctacagcagtgattctcaaacttcagtgtgcatcagaataatctagagggttccttaaacatagattgctgggccccatccctagagcttctttctcagtaggtccgggttggggtcatagaatttgcagttctaacaagtttttaggtgatgctgatgctcctgatttgagcaccacattttgggactcactgctctaaagcaacgattctcaactaggggaaatttcatctctcagtagacatttggcaatgtctgcaaacatggtgattgtcaccattgggtatggggtttctctattggcatctagtgggtagaggccagagatgctgttaaataccctacaatgcacaggacattccccaccacaaataattatctggtccaaaatgtcaatagtgctgctgttcaaaaatcctgcccgaaaaggaactctctttctcatggcaggacattgtttaacaagagtttaagtaataggtaaaacaagagctacttatttcagaagccttcaactaaagtgggatgatgtcacagacattaattgggtggtgtctcaagcagatatctatggtcatctttctctgtgtctgtctctcccacattcacaagtccattaagcttataaaacaccacacagcctagacacttactcacccaaaatgtaaatgaggatctgtgtatggctgaagagggatgggaagccagctggaatgaggaaacacttttattcctcaaggggccacaattactttgtccaaagtagatagaattctgactgaggaaaatgtaaatcccaagcaggacagaaaaatggagttggaaaggctttgcagttaactagaagatgcaatatttcttttaaatactgtgtattaatgaaagaagaacttgcttgacatcttggccagggcttaagcaaaattaggagggcttcaatggttctctatgatgccctctcgtctctcctctccatctttcatagactcttccaaccatctattttcagaatttccagagcccatgctacaaagaaaacctgatcttagattagaaaaaagaaaggcatttcactagcagatgtgacatctccctatctttccctaagccccttttttacacctgagtccgtatcttagcaaatggtcccctgggaggtggaaacttaggaatcattcttattgttcttttcatttccacccctatgtcatccagttaatctccaaatgttgtgaattcccccttttaaatctctcttctggactcttcatccttgctctttcaatgttggttcataccaacattatttctcacctggattatagaacagccttgcaaatggcctgccaattttagcccctcttcatactctatccagactgagctgtctacaacacgtatgtaatctcactgcttaaaacctctcatttactagtagtaggtccaaagaccttgcaatggcttataaggctttgtacgcacaggccaccaattacttctcataccttgctcctcttctctccacttcctccatcttgccactgtgttgcaaccatcctgaacttttctgggttccatgaaagtgtcatgtttttccttaacactgtgtttttgcatgtgctgtttcccctgccaagaaaacttgaatgcttgcccttgccttctgccctacttcccactatttcaattctcagttaaatgtccttcctttgggaagttttcctgacctctcaagtcagagttaggtgccccacccatgtggggggtgttctcacggcaccttgtaaaactcctcattgtaattatcttctgtggtaattgtctgggtccccagtagtctgaaaagcagcaagaaagtaaagtcctcatgtctattttctttttatttttttcatcatcatagctcttgtacctagcactgtacctggcacagagtaaatactaactgtacttcctcataggtgggaatttatgaagtatattgtcctggaaaataatttaatgaagctggtgaaagagctaagttttgagatacaaaaggttccttcccagaggtccttgaaatcaaaccatgcttcctacgtatacgcccacatttgtgtggcagaatcattacataaaaccgagctctcctgctaattttgagaactgatctccttctatatccttcaataattttcacattctttttttctctattgtacatctacctagatcaaagaatcataggaagccagcgtggctcagccatggtgagtgagggggagaagaagagggggtgagatctgtgagtctgggccacatcacacagggcctggtaggccatgtggaagagcgaatattttatttttagtctaatggaaaacctttaaagagtttaaatcacagtggtgacttcatcactctggcttctttgtggaaaatgggttggaggatgatccaaaagaccaaagagaaagaccagttaatagatcattgaaacatttcaaagggaggatggtggcttgacccagcaggacagaaatggagatggtgggagtgtgcagactcaggatctattttggaggcagaataggtaggagttgctgagagtttggatttgggggtgagggaaagaggaagcaagtatgatttctaggttttgggattaaatacctgggtgaatggtgccgccatttactgagatgggaagacagcaactcccaattttcaaggctcagctcagtcctcacttcctccatgaaagctgtcatcaggtccagtctccaaccttctctctttcctctcaaccactcgggaaatcattgtctgcaccactcatcttttcaggagtatgtgctgaactcctcaacctggcgcacattccttgaaggtgagggacccctttcacatccagaaatgccttggatgtagtgctccatcaaatttgctgcttggggaattaaagacaattcccatgcagcaaacatccttgaagctgctaagaatatcctgccacccacgggactaaatgttcacatcctccagttcatatctcaattgaacattttaaaaagcccattaccaaaagccattgaaaaatatgtttctctctacttcttaaagaaaggcatttaatgtctattatatgctctattgttatttagtgttatcccttttcacttgatatatagttacttttcttccccattattaagtattaccttaaaatgcaacctcatttcctcttgtactaaatagaaattgaggataagtttctcctcactgaaaacactttgaaatatttcaagtacatttccttttctacactgttcattcacagtttggttcaaaggctttttttaaaaaaaaaaacaactttaagataccataatatcacctttcagttcatttttaaagtttttcagaaatataaatctgatgcaaatttggaattagacatttattgtagcttcccacacaaagctagaatgctgtctataatattcttaacagtaaaaagggaacataatcatgaagaacttatgcagaggcaggaattaggctttttcttgttcttcttttcgattcatgacctttgagaagtactaagaaaagtatatttttgttcataatctactgtagtactgagataggcgttttatacacctgctgtcatttaactagcccaatcacctaatgatagatttttatctccatttcacagatatttggcagggtttaatgatttgtctgaagacacacagctagaagaagcaggtctgcatccaaatccaggtcctggtgaatctaaagctcaaggtattttttctacacaattattcattcagactgtagggatgaggaagggaatcaccttaggaaaagcctagttccattgcagcaataaccaaactatttgtaaattcttccttaaatcaagccaaatcctgaaatttttattcactgttggtcctaccatctaaaacaagagatctttaaatgtattttacagggtcctgtgagatccctgctattatgtggcaattttgcatttataataaatgtattttctgaggagaggtcttttttttaaataacatcaaactgccaaagggatctgttatccctctttcccaaaggataaaactcttttcctgagggaaatacaggacaagtgtcttccttgctctgtgcttcagtccttctcatgcttaaaaatagctgtaatcactcctgcagtcttttcttctccagatcgcacattcccaattctttcagcctttctttgtaacatggaacaccccaaaccttcagcctctacagagccattctttggaacatattccaggtgtcccctcaagtatggtactcgaggaaactaaatgtctctcaaaggatggcactaggaatggattacacattttttattcatatattcctgcagggtcttatttcagaataggaaggtaatttaatttccttttacaattctccttaacatttttgaagtttaaaaaacacaggattataatctatatcgatgtattaccctccttcctctccctgcccccgacggaaaagcttgaaatttaggaattatattttctttgtcttttaattccaattcaggacacatgagaattactggacaagtacgtttctgtaatcccacccttaggaaggatacattagaattttaagagaagttgtccattggaagcccatgccctgatggacacgtcttgacccacacattaattgcaacacaatctccttcagtgttcacacacagagcatcacgggggtggtttgacacttaccctgctgtcctctgggcttttaggacctgccgacatcgctacatcctcagcatgagcttctcattctctacttccaagtcagatagaatgaaggcattctaaacaaataaaccacctgggacccaaagccacgtcctgcacttacgtggctaagctatcccaattatatgttcttgaaatgcaccttagatgcctgtggtgactgacgcttggctggcgtcatggctgtgtggattttgccacataacgcacccaggcaaacagctcactactccaggctgctctctctggctcaggattctgcactgtgcctcccggccttctataggagccagtattgcagcaggaagatgagcaaagcttgtggtaacctaaacccctagtgaaatgagactcctatggcactgggaggctgcctggacagctaacacctgacatgctaccttatccacatctacataccctgttacgattagaactttactctcctctcaactcccatatacttacaccagcctgataataataattgcagggagaagtagttcactccactaattatgctgcttataactggcacagagagcagcgataatttggcttaaagtaaggttttatgatcctcatatgtttaaagtttccttgggttcaaagccattatgattcaggcttgacaattgtgaggatgaatttcaaatatctccgtatgtttctgttttttttcttttttgttagaaaagcattattttgaaagtgctccatgtgacagctcttgtttgctcctgaggtgcccagctatgaattgaaaatgctttattgcactctttagagaacatgtttctgctggtgtgtaaggcctggaagctgtctgcatgccaaggcaatgccccctaaatgaagtcttacataaacctgacaaagtgtctttagatagaagcaatctcaatgggctactacagagtcatgaaaataactgctggtcaaccaccaaaacaaaatttggctgagcacatacttctaaaagcctgaatcataggactatcatgccagtaacatttcatcataatatattttttaaatatactggtatattcttttctctcctctttccatcctttccttccttttttctcttttcccttctccctcggttccttccttccttttttcctttcagaagacattgtgctcaccctctcccccttttttcttccttctcgccctcttgctctcacccttgttcctcctcccccaccacatgctacagttcagactctacatttaattgtcaactcacctgatgcccctagagtctacacaacctacactgcaaattttcatcctctcttgaattattgcaatgttatccaaaccagatctctccagagggtggtttatcaagtctctcctctacttaacaaccctcaattacttcccaccaggtacaagctaaagtcctacttctcagcttcacatacaagacccccgctcccagccccaagtaccaccttccaccagtcctattcctaacttcagtctccacagcacaccttaaaacatcctccaccccccagaacacttgacacctcccaaacaagctatgccttatcacaactcagaactgccctgtctgttcactccttttcgtgaaaggctgagcccgtatttcaggcagaagcccttccctaacttcctcaggcaaagttagtgactttcctcctcaggttaacattgcattacaaacatttattactatctgtctccccaaatcggttaagagtttctggggcaaaggtgtcactgactcacccaccaggcagttgctcaacaaaggtttgctgaatgaactttgttcctttgagtttatcctgtatattttataagtaaaaagaagccgcatagtatggggtctgtaagtatgagtttgtgggttcaaattccacctgtgacttgagcaggttatttaatatcttggtgcctcagtttccccatatgtggaaactttccaactctagggtgcttgtgagaagtaaacaagttgctacatagatggaatactgcatggaaaatcgaaagaggtgcatgctacctgagtgtttgttaaatataatggaggtaattctgataccccatggctgcctctgttgtgctcacggcagaaggttcccaacaccatcaggactcgcttgatttcaacgagcagatcttttattagaaatgtaagtgtctgccttactcctccaataaaaagagagatgctaacaccaagaacattactcaatcccataagaaaactaaaagtgggcttatgccacactcagagccattgcactggctagggtgttgggtctggaaggcatacaaaacacaacacaacacaacaaaacaaaacaaaaacctagttaagaaactacaattcaattcttagactaccatatatgggaaaattcacattggttctaaactgttaaatagaaaatatgtctatattcacaaaaagagatggaaagaagtctaacttcagccaggttcagtggctcatgcctgtaatcccagcattttgagagtccaaggtgggcagattgcttaagcccaggagttcaagaatagcctgggaaacatggcaaaacctcatctctactaaaaatgcaaaaaattagccaggtatggtggtgtgtgactggagtcccagctacctgggagactgagtcgggaggatcacctgaccctcaggaagtcgggtctgcagtgagctatgatggcaccactgtactctaccttgtctcaaaaaagaatgaacgaatgaaaagaaaggaaggaaggaaggaaggggcctaatttcatgcaatttggcttcaaaaagtgagtagaagcgaaaattcagagttcagagacagtcaaagggaagtatgattctttttgtttgcaggtaaatcaaaagggagagtctctgggttgaaattctgcaaaatatatttcacttaagtacatccttcatgatcagccctgtacacatcctggctgtatcttttgcaagtgcctcctgcatgtgccttatgctccagctgtgccaacaaccttcgagaaacctgcgcagaagctcaccttcacacctgtgcttggtagctgccttgcctgggatgccccccttctcgttgtaacactcactcaggtgtccacttttcctgggaagactttttcttgctctcttcaaggacctttgctatgagcctccaagccccctgaaaatacatacacattttgcaaagcatttatcacattgcatgacaattagtatgttcactttctcactccctcactagacagtgagtctttcaaaaaagagggggactgtgtctatttccctgttgctttctcaatgcccagcacagtgcctggaacaaagtatgtgcccaataaatgctcactggatattattgaacagacaggattccctgtgtatggagaggcaaattcattgccaaatgcctatggtagcaatgttgggtcctcccctgtgcattgtttatcaaggccatgccatggggataccacactagggatgtgggtgaggaattttcacatctgactaggctgagatgattgtacaattacacatcacttctctctagaaagagaaatagttaggattccttaaaagggttaggaattcctcaaaaaccattgcacatgcagtagcctgaaccaagaatttaaaaacttctacatgacattcaacgtttatgactcacccattttaggtgaaaatgcaaaggagtaggcatattaaagccacaatgagagactattacatacccattataatgactaaaatttaaaaagactaacattatcaagtattgtagaagatatggagcaactgaactctcttacactgttgggggcactgtaaatttctataaccactttgcaaagctgtttgaaagtttttaataaagttaaacatatatctaccctatagcctagcaaatcttcccctaggtttatatccaagagaaatggatatgtccaccaaaagacagtcccaaactggaaacaatccagttttctgttacacaagaaaatgaataaacatactgtggtatatccatgtactcaatactactctgcaataaaaaagaataaaatactgacatatgtaacaacaggtatgaatcttacaaatgttatgttgagcaaaaaatgtcaaatacaaaagaatatgtattatgtaatatgtaaaagaagttcaagaacagataaaaacatttatcaacggtgatgaaattcagaaaagtggtaatcctggtatggggcaggcagtgacagagaggggcatgggcaaacttcagtgttgctggaaatgttttgtatgttcttccaagtggtagttacatgggtatacaactacataaaaaaatggagctttatatgctttagcatgtgcatgttatagcacactaaaaagtttttcttcataaactcaatggacagatcccctagacgagtagaagggacaaaacaccccatcactcatataaaattcagagaatgggtcatatacacccttgcttgttcagggaaaaagatcagcaccgaataaaagctgacacatgttccagtggaactggcatggttgcggaacacagcattatggcaaactcagtgtattcaaacaaccgagggcaaagacatccactgctctggaggtcacacctgtagcatgactcccttttggggatgagtggacatcccagctacgctctctattatgggagtctagcaacagaggcccttctcagtcatatactttcagtcaagtcattgcttcgggtgccactttttgaaagtcacttcataaaagaataatgctaaaaccctccgaagagtgtaagcatactaaaaccagaagagagaaaataaagaaaaactttgcagaaatgtgagattaccctaagatgatcagaaatctcaaatacttgaagcctgctgtgtctgctatgcctgtccaatcgaaaggaaagagatgctccagaaaaatgtattgtctgctctttaccaaacagggttttggctcctaataagagttgaaccggattatcacgtgaggagctgcagaatttcttttactctttcagtgtttctcaacaaggacattatggcattcagggcaggacaaatgtttgggtgcaggactgtccttgttctgaatgtcctaaaggccagtagcatcccagccctcccatcactgtgacaccaacaaaatgtatgaacatgtttctgagttgagaaccagcactgatgttttggcagaagatttaattggcatcctgatggcctaatccaccctgaattagaatctacagtcagtcttctggttggtgtttctagtattaaatatcaagtgtaaatatctaatgttaaacataatattaataacaaattagtcaacatttgacaaaaaaagggggaggactttgctcaaaggtccaaatttccagtccctcaagaagtgactcattgaacttacccacccaacccttgctggcatttgcatttgcaatcttggacttgaggcctatgtggcaggaaggtcaagcagccaggcacttatttcctttctcctctgtccattgggtctcaccaattagactgtgaaaggaggaagctagcaaagaagatgacagaaagagccatctctttaaggcctggagcagagctcatctaagccactacccaggtctctttctcttaccaaccctttcccccaagaggacagagtttcaggtgtatcttctggcaaacagagccagggaagaaaaatcagcagaagaaaagtatttctttagaattatttattctaaagtccatgaaccttatcaaagtgagtgactttgcccagttttacacccccagtctccatctcaatgtgtaggcttaaataacataaccagttgtgttactataatgacctaatagcacatccctgcagactccacttcattcctgcatccattcagaggaggcccaaaagcagggtctcttcatctggtttccacatccctaggcagtgtatcccgaagagtgatatgaaagataagtttagggggtaggtttatgaatttttgaaagaatagtactaattttttttacagttatcttttgcttttaataaatgatacatttttcatttatagaaataacatagattccttttaaaataatttatgtaaatccaaaaggtcaactataaaaaaatgtgagactggggatgaaattatggcagtttgggatgatttttacctcaggagggtctaagacgggcttctaaggtttcataaattccttgaaaatttatgggggattgtatgctaatataatttttttttttctgggaggaaggtccacagttttcataaggttcccctaaagaaccgtgaatccaaaatgttaggaatgattgtcctagaatctatgctgtgatgttcaacactgtagccactagtcactaaccacacatagctgctaggcacttcatacttgcctagttcaaatgagatgtgctataagtataagatacacactagattttgaagacaccatgaaaaatagaatgtagaatatctcattaatatttttctgctggttacttgttggaatactattttacatattgagttagaaaatgcagtattaaaataaatttcacctttttttttaatgtggttactaggaaatttaaaattacagatgtgagttggatttgtggcttactttatatatttagtggacagtactgggttatagtataaggccaagaaaaataagataatctctgaagtccaagagaaattagaattatgaatatattttaaggcatatttataatgtaagaaacaagataaattttgagaaaaaaatgaatttttacaaaatattgatttggagagaaacaattatacaggtatacacttcactttgtccccttaatcacttagccaggaaaataaaccagtagtagaagcttaaactgttctattctttcaaattaaaactacagtttccatagattcaaatgaaggtagaaaacagtaacggttttaaagttcctgggaaaagtaggtaaatgatttaagtatcattttctttggttaatataatctatatccaccaaataacaaagagtttattgtatttgctttgggccaggcccacctcccatctctgtctgatggcccctcactaggataattaaaatgtctaagtcttttagaggaactcctgaaactcctttctttgcctggacagaagctttcatctctgggtctgcacatcttggggcatcacaatctctcttcagcatttcctttctgaactgaaagctgattccttcaatgtatagttgctcaggtgcaaaggaatattactgtgaattgttttcttttccattgttattatcaaggcaatggttcatctagatccttctactggaagtcatttcttgttacagaagcttgtattttctatggctgatcaatatatgagaatagtcccatgttcattttattgcatggtcctgcatctaatcatctaatctttcacagaaaagattagctccatctctcctacctaatatcctgccaccttttgtaacacaaacacgatttgggtgctaataaatgtatcagtcccagatcggtacagatacagagctcatgagtgaatttggccataagagcatttttcttatgagcattacattcatgcccacttgtttcccattcactcccattctgttcctcaaaaatctatagcagaaggcctattggtgtttagggtttccataaagtgatgtcattccgttgagctttaagtggcccacagataatgttaccatcatgttttcttcaatgagatgacttgttctaactaagtcaggccccaggcaaccaccattcctacgcacggtttttggtttttttttttttggatcctgttgtctctttactttctgggagcagcatttctgccctttaaaatggcaactgctccccaagccaagcaagacaggagctgttaatggctctgtttgttttcaaatagcattcttagggaggaacaaccatcatacaatacatctagctatgtggagtgcaagagctccacttgcatgttgacttgttgactcagccttctccaattttactgtgcataaaaatcacctgggatcttgttaaagtacagattctgattcattagatctggagtgagtcctgagattctgcattcctaaccagctccctggtggggccaatgcttctagccacaaaccatgctttgagcagcaaaggatcatctctaagaaactttccatgttcattgttctataatcctgtgagatcagaaacaccaatagttggcataagcagatgaagattctccccaggacctccactagaatactccagaagtcataataccagttgtagaaatttatctaaataggaggatttagaaattaagtatgggagtcaatccccaaatcatttcagtatcttgaaataaagcaatcagtggaccaaacttactatctaatagttctttcaaatgtttgaaatgttaggtttctctttgaatttcaaatgtttgaaatgattatgtgtagtcaaggattaaaccataagcagtactgttataaaccaccataatgtgctacatctgttaataaaagacctcctcttccagcttccaccttggtctgaacacccaatatgaaagttttctacaatctccccagccaccttggataccacccctgtgggcacttgacctgcctcagtctcaccccacgcttcatctcagtttcaactgagtcacaggtaggtcatttctacagcagatctactaggatcacacaccgcacatctcagtttctttattgaggacctgagaggtcatagaaagaagtcactttgttaactttatagcctcctgtcttctctgtggtgctttgtccagtttgctcattcattcatttccatccatccattcattctatctttctccttctcttctttagagtaatggccaaaacctccccttgtctacagcagaacagttccactgtcacccagatcctttggaaatttatctttttacttccaagcacactgaccaaggcatttttttccaaataaacagctcctttccttgagaaattgtgttgctagttgttactagatgtcatttgcccatcctgttacatccagttactttttttgctctaacctcttttttattgtgaaatataatatacatacagaaaactgcatacatatcaactttttaccttcaacttctactctctttgaattttaatggagaaatcagttacttttcattaacaacatattaaataaaaacataaatcatttagtaacatggctataattgtagtccacagatccaagatgtaaatgaaccaaggccaagcttaaatgagaacactaaaggtccatgtaatctgttggttgctaaatgggatatgctcaaatctttgtttcttattcctgatttccagaaaatcaagtaggtaaatgctcttacaatgagcagattcaatgctgtatctacttgctgaaaaatatgtattatactatttaagattacatgagaattataaaatatgtatgataggattttggattaaatgggaacatcaaaataaaatgaataaaatcgataatttcagcaggctcttatgtagtcagggtctatctcttcagactgtgtattaaattcttgcttcttgcttttggctgtctgtcttttataattttacagacaataagaagaagcagcagaagagaaagaagtcaaacacatagtctatcagatgaaattattatttattaatcattctcatgaaagatttgctgggggagaaaggttaagcttattactacatggtggtccctagattggtaggtagttcatcattgctgcctcagaccctgttaacattgataactaatggctggcatgatgcctgtcatattaaatgcttcctctcaaaggaagaaaaacagcactgaaagaaagtaattggttcactctcaattaattgcaaatggttttaaaagagcaaggagaggccgggtgcagtggtttatgcctgtagtcccagcactttgggaggctgaggcggatggatcacctaaggtcaggagttcgagatcagcctggccaacagggcaaaaccccatccctattaaaaatacaaaaattagctgggtgtggtggtgcctgcctgtaatctcagctactcaggagactgaggcaggagaatcacttgaacccaggaggcagaggttgcagtgaattgagattatgccactgcactccagcctgggcgacagagtgagagactctgtctaaaaaaagcaaggagaacacttgctgttgtctttgatgatcagtctaaatataacaatccctgcctgtttttcttcattgattaacttcaatttcaaaggtatgttagtgtgccaaatgtttgaggtagaaaaaattttccaacatgtaataaatcataatatagcaacagtccagaaatgataccaaattgccttcaataatgaaaacaacaacaagagaacaaaacctgctaagtgttgaaaataggttttaggactgatagccctccttccctccctctccctttctcctctttaattaaagtcaaattccacttattcttctaggcttgatacaaattctaatgccctcagtcaaggattcatagatcactgcaatccaccatcatcttttgctcttcttaatatcttgaatatgtgatatctgccccattcatctgtagttgccaaaatataaataataaataactagaatgattgttcacctttttgtgaatatgtatcctgatttctccccacctccaccaccacggttagttacaactttctttttattttatttttcgagatgaagtcccattctgttgcccaggctgaagtgcaatggcacagtctcggctcactgcaacctccgcctcccaggttcaagcaattctcttgcctcagcctcccaagtagctgggattacaggtgcccaccaccatgcctggctaattttcatatttgtagtagagatggggtttcactatgttggccaggctggtcttgaactcctgacctcaggtgatccacctgcctcggcctcccaaagtgctgggattacaggcatgagtcaccgttcccggccagttacaactttcttaagggaattggctgtactttttatacctcccactggcatagcatggtgttttgcatagagaaaagcttagtaaatatttatttgacaacgtgttttcccaaagggagctagtaaatagttgttccctctgttattaagcaaactcccaaaccagaaattgtttggccttggtatggtttcttcactagaagctgtccagtcttgtcttttttttttttttttttttttttttgagatggagttttgctctgtcacccaggctagagtgcagtggcgcaatcttgggccacttcaacctctacctcctgggttcaagtgattcttctgcctcagcctcctgtgtagctgggactacaggtgcgtgccaccatgcccagctaatttttgtatttgtagtagagtcagggtttcaccatattggccaggctagtctcaaactcctgacctcatgatccgcccgcctcagcttcccaaagtgatgggattacaggcgtgagccactgctccctgtcaaagctgtccattctttagtgtggacttcttatatggttgccattgagagtgttcataaaataagtcagcataacataggaatgaacaattacaaaaacttgtgtttagaataaaatcggtaattagacgattttgtgagagagatgaacattttttgatgaactattttgttcatccaagtaaatgctcagggaccccccccaccgccaccctcattctctcacttctaattgatgtatttaggaattaagaaatttgaattttgtttctaattcaatcaaagagttgctgtaagagtattgggaaatcctaatggtaagtgtttaaatcattcatcagtagacaatggaataaatcagatattccaatcagatcctaaaggatacatttatatggattaaaagttgaaaccctaggacaataaatgaccatataaaagcaattaatattcacttaaccaatagatactaagcacctactatgtgccaggcacaattctaggtacttgggatatatctgtaaataaaacagacaaaggttcctgtgtccttattctcaaggagcttacattttagtggatggaaactaacaacaaaataaataaactatattttatgtgaaaaggtgaaagatgctatgggatcagaactgtcaagagctgtccttgttggggatttgaagtagcaaatagaatggacctcaatgagaggataaaattcaaattaagactttgcaataggcgagggagtgagcccaacaggcatattggtgggacatctgagagtattctactgctagaacaaaggtaaacaagaaagtagaacaacacattggcaatgcatgagatggacaaagagataatatccttaataaagaaaaaaagagttcttaaaaatcattaaaaaaaatcaataccctataggaaatgggtgcatgacatcaacaaataatcctttaatgaagttcaacaaaaagtgaaaaatgtccaaccttacaaataatcagtaaagtacacattaaagcagcctcactattggggtttctagtttgttaagattaaataatgttggcgaggccatagggaggcagacattcttctacaatgctaatggaagcataaaatgacacaacgtcttgtaaaataattttcctatatttatcaatagcctttattttagaaacacttcttacggaaataatcagaagttaagacaaaatgtatatataagtatatttactgcagcaatatttataataatatataaatacaagtgattaatatctagatattatccaaactgaagtctgcagcccaggaaatatccatgagcatttgacgcctccacataaatgttccataaatacctcaaactccaaatgtccaaacccaaactcaccttctccagtccctattccggcccttagatctcttccccttgtcttccctagttcagtgaatgtcacctacttacacccactgcttaagacacaaacccaggactcatccttgatggcttctctcttgcttcccacattctatcaatccccatgtttcgtcaattctactgtaatgtttcttgaatacatccatcttctctattcacactggaactgccctagcgcagccctcaccattttatacttaggctaatgaatagctgcttacttggcctggtccactgtggccaatcttacctccaacctacctgtcttccttgccctatagaactctttctaaaatataaaactggatcaaacaattactttgtttacaattttaaaatggttccctactgctatcagattaatatccaaacgccttagactttcatgatctgactcttgatggtcaactttcctgtcctgccagcatgaatgtttcttcttttttttttctttttgagacagggtctccctctgtcacccaggctggagtgcagtgccatgatcatggctcactgcagcctccaactcttgggctcaaggtatccttccacctcagcctcccatgtagctgggactacaggcatgcaccaccatgcccctctaattttttgattttgtagagatggggtcttgctatgttgcctagggtggtctcaaactcctggccccaaaagatcctcccaccttggcctcccaaagttctgagactacaggcataagccactgcacctggtccagcctgaattcttaaactccatctattaccatcttcttacaaattacatttcatgtctttgcatattctacttcccctgcctgtcctcctatacatttactgttggccagacaacttctcttcacctgtgtagactcatctgaggtatcctatcttccaggaagccttgcctgactccatgcccccaattcatttttgggtttcattgttctattgatctctcaaagaacatcatgcatatttatatcataacatgtattacactgttgtgcacacattgctttgtttctttggtaattcttttgactgccacatctggctaagctgtagtactccagtgggcaccatttacacagtgaccaaactgcacaactgtattgaacagtcatgtatcctttccaccacagacagatcatctttatacatccatgcacaataattggcccagttcaagtgctagaatagacacatttatataacagacatttgtttaatgaaagaaaaagtgagcaatcaacaaaactctagttgtcttgatgaaaaattccttcagaccagtgattctcaaagtgtagtctctgaataagcaacatgcatcactggggaacttgttaaagtgcagattctcaggccccactccagacctactgaatcagagactctggcaatggaacctaagacactgttttaacaaaccatctagatgattctaatgcatgctttactttgagaaacaccgtcttagactgctcaaaactaaaagtaaagatttcatttcggccaggcgcggtggctcacgcctgtaatcccagcactttgggaggccgaggcgggtggatcatgaggtcaggagatcgagaccatcctggctaacaaggtgaaaccccgtctctactaaaaatacaaaaaaaattagccgggcgcggtggcgggcgcctgtagtcccagctactcgggaggctgaggcaggagaatggcgtgaacccgggaagcggagcttgcagtgagccgagattgcgccactgcagtccgcagtccggcctgggcgacagagcgagactccgtctcaaataaaaaaaaaaagatttcatttcaagggttcaaatcactttgcctgtaaggaagtcatttacttaattttttaaaaagtttaagttataaggcagttcagacattcaaggtatataaaacaatattacagacacccatgtacccaccattcagatctgcgggtatttgatccatcaccctaaaagaaataaaacagcaaaacactaccaacccatctctctctctcatctctcaccaagctaaccactgttttacagttggtgtgtgtttttcccatgcatgcttttatacttttactacgtaagtgtgtaggcatctacttattaatgagagactttgtccaggatgtcagaacagaaatcacaacacttgccccagcaagctgcatgggaagacacctggagtagccagcagccagtgccaaccaaacctgcccctctccagcatttggtgggaaaaaatagagctcacatgagctttacaaaatgcaatcagagggggttaaaataagaaaaccaagttatacttatttaactgttgctgactgtaaaagctaaaataaaaagtaggttttgccttgaagctaagggtgtcaaacacatagtaccaagaaagttgtactgacaaactttgtcatttttgtgtagattacacacacaagggatgtgtgcacctgccagtgtatcgtgcaccatggatataaagagttccaaaagagctatgatctttttttggatataaggagttccgaaagagctggctccaactgtcaacaccatagatgagtcttgattttgtcttctgaaaaatggcattacctgctgtcttatggcttaaaaaaagggagtgatgatgacttgagcgttaatttctttcttatttgggagcctatacgtttatgaaaatatgattaccaaactcataagtctactcctcctaaaattaaaaaattaaagacaaaaagaaagaaaaaaagaaggggagagagcagggaaggagggaataagaaagggaaaaagggagaacaaaacttaacaactattttctccccgtcctgactttcctactttctccagcttggcttcttatgatgacttcctactcatctttacaactggcttcttatgatgacttcctagtcatctttacaatttctccttctcacattctctttcaaagcctgtaatttagcctctttttccaggtgattcttagggataccaaagtgtgaaatcattgctattggtggtatggagccctagaaaagttttacattgttgtttttgttttatgtatgcatgtgtgtatgaatatacatacacatatatagtgtgtttatatacatacacacacctccgtgtatggtgtgtgtgtgtgtgtgtgtatgtttaaacatagttcacagttttggatggcagctaatgaataaacacattctccttggtcaatttactctacaaatttgatcacatgcatctattttctcctatccctgataccatgtcactaataccgagcttataaccacaaactacagtactcaaaaccccctttcatcgttcccctttttatccatcatacacttggctacaagatcagtcccttgaaagccccaccttgaccattcctctccgtacttgaagggcctccagtagctgcctaattgtgaccaagtctgctaggtgtctccgcaatgttccctcacaacgaaatcccactttcattccgggtggcaaggtacccagccacattttcccacttcctttgcaactacgagtcggtagatgagattgtagatagaagttgcttgatgggcattctggtaagaccccctaaagaggaaaaacacagctagtaatgggtgcctttttctacccctcccccattgttgctgttgtctagaatttatacatgaaggctagcaccccagcagttaccttgaaccaagaggaaatcttgaggataaagccatatgctaagaatagcaatgcagagtcatagaaggtatctgagtccctgctgacgatagaaccacgacccctgctttggagaaaaaaataaacctttgtctgtttaagtcactgtttttaatggttttcactatgggcagccccaaaataatactttgatctcttcacaaatttagctatttctccaatttggccaatgtattatgttggtatactttgatctattgcttctcttccaaagaacaggggcttgcagatagacccatctgagttaaagcccagccctgccactgtgacagtgaattctttaggcactgctcctaaccattttaccctaagtttctttgtctacaaacagagaataaaaataatatacacattggggtgtttgttatttttctttcaacctgcttttaaatcgttaatagctcaacagcaccaatagggaaacatttggggaaaggaaaaggagataaaactcaaacacgggctgggcgcagtggctcacgcctgtaatctcagcactttgggaggccgaggcgggcggatcacgaggtcaggagatcgagaccatcctggctaacatggtgaaaccccatctctactaaaaatacaaaaaattagccatctctactaaaaatacaaaaaattagccgggcgtggtggcgggtgcctatagtcccagttactcaggaggctgaggcaggagaatggcgtgaaccgggaggcggagtttgcagtgagcggagatcatggcactgcactccagcctgggtgacagagcgagattccatctcaaaacaaaaacaaaaacaaacaaacaaacaaagaaacaaaaaaacctgaaacccggatatattttctaacttgtgaacagctcttacaagcagtttggtggatgaaaatgcatactgtttaaaaaaaagtggaaaaatgtcaataaattgggctttaacaattgacattttaccctcccattctcatgaataactggaatctgactacacacatgttacattagccacttgaccaaggaagaagaaaagcaagagagagaaaagaaagaaataaatttcaagaactttggcgctagcaggatcagttgcccaaagtccccggaatggagaaacatatgatttatatcttgttattttccatttggttaaattgactcttaatgacttgaaataggtcctttcaaatggaattgcaaaaaagtaaattctgctcaaactcttacattgtgtaatttcatgtctgctctcatgcacattaaactaaactggttggagaaaaatctcttgctaaattaaatttggtttgatcaggaaatttgtgtgcatgtgcaggcaaagcacagtatgtgtgggttaaaaaaatgtcctgcttatttaaagtgttctttttcacgtatgattcagttttaccatagcttcaatagtgaactaaatttgtgttaatgtggatctgtgttgtgagtgaaataggctttggtcctttgttgggaaatcactcaaatagtagacattttgtcctttctgaagaaaaataatacagcctcaaaggctggaacatttgagcatctttaaatccttccttctccagctccacatgactcttcttgccgtttcctaacgccgtcatcatttcctttttcaaaaaccttttccttgctcatcccagtcccatttcgctcatcaggctctaaaacgcagaattggcccctgggtcccatctgtcctggcctatgtccttagctgtatttctgccgcaataattaccttccactttactacctgacttttaaaatatacaataacaaaattcaaatgaagttgtttcaaagaatttcagggcaaggaaagtgctttttagacggtcaaaatgccctactgcaataacacaggtacagggcccattatttcatagttcttgcccgttgaaagcaaaaagactgaattcacaagtagcctgtttgacaggtaccactgaaggcctttcaacctcagtcaccagaagttccactctgctaagatatatgagaagtctgcattttatagggcatttaaaaagcagtcagatgagtaggagcaaaggattaaaaaaaattatgaagaatttgaatttgatgaatatttttaaaagcacatgttaaagtaatgcatgacaaaaatgaggtttatatcagtgaagtagagattactgaacaacataaaatcccaaattaaagaaaggcatctttgggatccccgcaggatggggcctcactatggcatctcatttccccaggcaatgagcaatatggtcttggatggagagccaacaacaaccaattacatgctcagcgcctccagagggccccaagcttattttcatctttcctctctttcacagtattcctgattgcatcgaaattctggaaaggggctcaggagggacatttcttttgggggagtggctgaagctaagactatccataactcttagggtgagttcagatcagtgtgaccctgcagaaccatcctgaatgtgccagacctggaccatgtctttctgtacaatcttaggaggcaaagtccagcatagttaaaagcgtagaattccatgtcacctggcttattaaggaaataatatacaccagaatgggtatacaacatgtgtaacgtttgtcacgtgtttctcacttacggaattctttatatacatggaaatggatagagaagcccaatacctaaacagataaaagtccagctgcatgttgggtggtgacccagatggtctctccccaccagcactcctcccagcacagacttttaaggggcttctcagagccctaaaagctcagaggaccccatctggaatatggtgcctctctaaacctcctgggagctacacactgggagggcaatgattcttggcctctgtggtcagcggaatcaaatattgtcctctgaatctctactcccagaactcccaggtctcacatcttagccacgttacaggtttcattgcttggaattccttgagagttttttccttctggatttggtgattattgaacaaaaaatattagaacagcatgattttcaatcttcagaaactctgcgtaatgactttagactggatccaataaacagcccacatagctttaaggacattgatcaaactcaaatatttggctacagtattttcattcactaaatgccgaatttatgttttctttattttcctctttgtttttatttttaatggaagtacaatttatataaagtaaaatgcacaggtgagttttaacagatgccaggtagcccacggttctataaacatttccatcactctagaaaattccctcatgccccttgccagccaatcctctcttctccccaaggtaatcactattttgattcttaccaccacagattagttattccttttctagaactacataaaatgaattaatacagtgttcattcttttgtgtctaatgcctcaggttttcagcatttatagaaatctcttcttagtttccttatctgtaaattgaggagaatgccttgtaaaaagagtgtgcaagtattgggaggtgcccccagtttcctggtgggaatggaagacctctgaggtcaccttgattgaggtgggatgaagaagaggctggggactggggttgcaggagccttctcatctttaaacagaacagctgtccttttccatgctttacaaattgggggccactggaagatttccaatgggaaaaggagagggctatttgtaaagatgaaaaacacttagagaaccataggtcttgaagattcttagtgatctctttttcttgaacattctataaattacaaatagtgttttttgatatgagaactatggctggtcctctctagggagggctgggagacagaggcagccagacagggggccccaagggagggcctgggcactgagtgctgtaatactagcactggttacaatcagatagcaccaccccaacccaggcgcctcgacaataggccagaggccatgggcaagaggaggcacaaagacagcattcaaaaggcctggctcccgcagccagtgagcatttctatagactctgccagatcctgaccaagcctgaatgtcaccttattaccaaaaagccatttttccatagtttttaaactgctaaaaataataaacacagaaaggaaagttctgacacaaccttatatgcagagataaactgaaactgtgttgttataataatgaaaacaaactggatcctaaattataacccagtgatctgaatggttgcttgatatgaccacatacctcaggactgaaaggcaaattcagaagacttgctagtcaagtggatctttactgcacaggtgcttgtaccctatctgactcgctggaaccaatgggttatctaattctcatgctttttttttttttttttgagatggagtctcactctgtcgcccaggctggagtgcagtggcgtgatctctgctcactgcaagctccgcctcctgggttcacaccattctcctgcctcagcctcctgagtagctgggactacaggcgcccaccaccacgcctggctaattttttgtattttttagtagagacagggtttcaccatgttagccaggatggtctcgatctcctgacctcatgatccgcctgcctttttagcactcaaggaaaagacacatgggaaaggattgttggatcttcactgagcacaattttctggcataacaagtgaaaatgggctcttttctctcactgccctgttactcttcttttctcgagtgaatcagtatcattgcttttctgttatgtttttagttcatttaatgctttatattttttcggaatacctatagagttcaaaactacattaaataacaacagcagcaacactacacattaggagataattccaataatgctaaaaagggacaattaatagcaaagatcacaagtctgcaaatagtcaagctgacatctgaccttcttattcattaaatcatgtgtggaacttggcacccacgcaggacagccaaccagaaggaaatcgcagatctggaaaaaaggaaacacagaagataaatataatttgttgttttaaagtttcccaacattcgattaatctacaactgttcttatttctatgtttaaatagggtctggtttcagagctatctctgattttgaatagatgcaaatagacttagataaaatcttattctaaaggggagatggtttcagggaaagggactctaacacaaggactgtaagaacacattacaggcatgggacaacttttgtgaatctcagagatgtacatttctgtggagttttaggaacaagacccaagagctttggattggcagtctgggaagatgaataaaaggcaaatgtgaacctcaaactgtttagccactgtgcgttaaagggaatcctgctttatctcagtggatggttcctggaataggtctcaacatataagagctgcaattgagctgtcgggtggggcactgccatatgaacctgtggggaagcgatgggttcctcatcagggtatgaatgtaagcatgaagccatggagctgtctagattgtgctaaatgcaatcatatggtgaacacttctcccaggtacaaacaagatgagaaaggcagccaaacagaccacgacacctgccatgccgcagaggatgtcgccgagtggctgcctgcatggcaagtgacaagccgcttttcaactaactgcagtcctacaatttttgttgttgttgtaaataacgtagaaattttagaaaaacagaggttagcagggaaaacatctgggttcccactaccccaaatataaacattttgtcacctgtgctctaattttttttaatttaaaaaagggtatattttaaaataacatgaagaatgcctttttttaaattagaaaaattggagcataggtataatctccttgacaaccccacaccaagcccagaatgtgagttggtttgtatctttcaagaccactatttttcctttttaacattcacatacataaatgcatatcgaaggcaatgaacaatgtttgtgtatttttaatttacctatatgatatgaatctctgtttgtgtatcttttgttctacacttttgactcaatatgatggatgtgggcttgaaccacgctaatctataccagctcattccctttaactgccacattgagtaaatacatactcagttgttggcttttcacccaatatccaacgtttatggctacataaaagcccttgttatatcattaaagcgattgttggttatgtgtgggtgtgcatatgtatgtgagcataagcacattttctctgctcttgactctgggcttctgaagaagctgccctgtcttgtttctgcagtggttcttccaccctatgactccatgcagtggacactcagtatgttaaaaggaaaaatgtatttattaaaattgacttgcttattactaattttctttccttttaaaacaacattaaggtagactttggagttgtatttatttattttcttcaatatctctctgcaccgcccatttcataaaccttcaagtccaaaacctttaacttcacctcaccatttggctgacagtcagaaactctgataatgtgcggctgaagaccaaggcaattaagaagcttattcaaagaggattctcaaagactacattaacaaagccaggaaggcttgtgtttgtagcagttgttatgactttatggcaattatgtatacatatacaccattacccctgacattaatatataaatacaaaactatatatatatagatattttggatgcaaaaattggacctcaatatttttttttgagagtgtaattttgatttaggctttgagcaatatatctgaacttgactctgtgaaaaacctaaaaattctcatataattaataagtttgtatacacagcatttattaaacacacattatggactgggttgttctaattattttgtctaatttcacataaggtaatcctcacaatgaccgtatgaggtaagtattataaatgaccccgttttccagatgaagaaaggagaggagaagagttaagcattttgcccaaagtcaaacagtgcagaagaggccagccaagaatcgcacccaggcagtctgatgtcatgggccttgttctaaatgattgagaacagatttaggttttaaagataaaactgcaaagaagaaaatgaaacactgtcactgaggtggtttccaacttttgctataatacaaacatgcggcatctttttcatgctgtgcctccaaccgagaacaaaccaaattagagttcttcaagtagacaaattgaaagtgatttcccagtgatgaaggaaatttaaagcaacaagttcaagccccaaacccttccaacttaaacatacccattttcagttcttctctttaggaaacaggggctgtgaatttcttcatggctcaaaggagactgcctagttttgtttacacaagactcaaagcaaaaatgagaatcactccctgggacagctttagctcagaatgtgtgttctttgcacatttttaattggagcacaaatatattaacagtgtggttattttgtagtttcaaaggaatctgttttgtaactgattcatatttatatttggaatatagttatttctgggcatgaaacagttcattttgttaagccatctgacctgaggtgaggttggcactatttcccatgactgctcccaattaatgcaaattgaaggttaaaggataaataaagtccctttaacttggtttactaatatgttatttataaatggctctttactggcctgttttttgacagtaactttgtatgaatgaaattgcacagaacaaactagcaaatacataatgcatattttgttgcaaagcatttaaagggttaaatttaagtgaattcaattttaaaggggttaatattagagcaaaattaattcctcctccttctccttctcctccttctccgcctcttcctcctcctcttgctcctcctcctcttcctcctcctcttccaccttcttttctctctctctctctctctctcatctctggtttttcactaaatcatatgaagcctgagctagattgattgcattgtattagtggcctttttttttttgtaaagtgcttattcattcttttaaagttttattttgacagttaaatagtatcccataatatcacacttattgaaggccagtgaagtcttttcttctgctatccaaataggactacaaagcataacactgtgtaagtgccagttctcacacatacaagttaaaatatggaacaaatctcaatagaattggccattcaatgggaatgcacattttacattgtgattgtatttccaaattagattctatagaggttgtttcaatttatgtctacgtctgaaagtcctgtttctccatatctttgctaatatgttattaaacattatatttatctatttgatagcagataaatggaatcctagttagaattcacatatatcttgggtaggtaaagctgtaaatcttctgatacgtttaaacattatttgtatttcttattgtgtgaattttcctccctgtttccttccttctttttttccttccttcctgcgttcctttcaatgatttgcccatggttttctgctacgttggtggacatttttttattgacaagccatcacattatatcttctagagaaacaaattctttttcttttggctttgcttttgggagttttgtcaatatctatttttttttttctaatttttccctccttccctccctcccttccttattcctttcctttcctttcgtttcctttcctttctgtggtaaaacaattaacatgagattaccttttttttttttttttttgagacagggtctcactttgtcacacaggctggagtgcagtggtacaatcttggctcactgacacttccacttcctggctcaagcgattctcctgcctcagcatcctgagtaggtgggatgacaggcgtgtaccaccacactcagctaatttttatatttttgtagagatggggttttgccatgcatgttgcccaggctggtctcgaactcctgagctcaagcgatctgcctgcctcagcctcccagagtgctgggattataagcatgagccaccatgcccagattataacaaatttttaagtacaaaatacagtattgttaacaataggcacaatactttacccctccctgcatctacccttttatcatgtaactttgtagttcctctcactgaagaggttaagtctattctcctgtgctttttgattgtgtttttggccatgtgacttgctttggtcaatggaatgttatcagatatgctgcatatagaagtctgaaaaagttcttgctacatttaagtattttctcttgctctcctgtgattgccatgagaatatgccttagacagcttgttatggatgagaaacacatagcagagttgactcacatcagttgtctccaccaaggccaccccaggtcagcctagaccagccaagtcccatccatataagacagcccaaggaagatgagcagagtcacctagctgacatacagctgaccacaaatgcatgagtgagcccacccaagactggcagaatcacccagccaactctcatactcatgagctactgaatgctaatcatttcaaactatgttttgtggtaatttgttactatccctggtaattccaaataatgtcattatgcactagataactgatagagggcttatccctgttgcgctcaaaaaaaaaaaaaaaaagagagagatgcctacatagaaaatggtttaaaaaattcagcaaatatccatcaaacaccagctgtatcaatcagggttatccaggaaaacataaactggtttaagtatttaaacagaaagagaataatgcaggggattgattacgtaagtgaaggaaaagatgtgaagtcgaacaggggagaatgaggcatccagcaggaaacccctaagctatcgagatgagaatggaggtgttgatattggagccctggggtgggggtcattcagcagaaactgaaagctttaactggccactccagcaggaactgaagccacagaggagacacaactgttgtcagagatactgtctgaggcagagagagtggagaagaaataccctggcttctcccttccttcagtcctccgatcttcctccaaggccttccaatggctgaacccagaggaggcacatacctcaggaggcagcccctcagtaatacagaggcagggcatggagaggatctgtgggcaagcaggtgaatacacagtcatgctgtgcaaggtaccatacaaggtgttgctcagtgcttttgtgacatccttaaaaataagagaatcagaaaagatacagggcctgaaggttagaaagggcccaactaggtggaaatgagggaaagaatgcccaggctgcagcaactataggagcgaagtgcaggaaataccgagggaatagcaagtattctggtttggcttagaaggttgtgtgtttgggagagggaaacagaggtagagaatgggtgatgaggctgcaaaggcagaaacagtgctacagcttgaaagacttggttctaatccaagcagattggacttttgttctaaaggcaatgggaaatttaatggctctgagcaaaggataatataatacctgttgtgcattaggaatattagcctgatagaaatgtgaaggatcaattagagaatggcaaaccagactaggggttattaatttaagtgtagacctcagggaattcacaaccctccttaagtaatttgtagaagtttgttcgagcattcaatttcctgagagatggtgcatagctgttgcatggatttcagtggagtctatgacctctgaccccatcaaaactgtttaagcaccagaagcaaggaagtcatctagaaagcttctatcataatttctttaatgagggtcaaaaacataacagtggcaatggaaataaaaaaggagaaaatggaaacatttatgaggcatggactaaacaaataatctagctgaacctgaacagaaacgaaacaagcgcaagagtactgaaaggcttaactatgggcaacatccatctgttattctttttcttccttctataaaatagacaaagcaactcctgtttccaagataccataacaatttactaaactagaaagttctaagataaacataaagcatatatatcatcactgcccatctcccatgttcaccacagagatgactaatcaattgcaatctttctttactactgaatccaaccacaatctccaaatccttctcaaatagcacccagacaggcattgccaaccagtttaagaagaaacttacatgccatctctgctgtaaggcattttctagagctagtatttttattaatatttattgtattgactgttctttagtttcgtaaagatctagtaccagtgaatgggtatatttggcagaatgtattacatactgatatatatatatttatttatatattatatattatttatttatatattatatattatttatatatatatatatttatttcccacatgtgggaaatttaatcacatacagttggattactaactaggtcttacccaagttcatgaatccatttaatgttaattcaaagcaattgacacagattttaactaagctgaattaggagggaaaactgtatttacatgaaaacttactctattatacaattatcatagtaaagttttaaaaacagcacatgtcatcacaatcaactatgagcaactatattgtttggtaaattctgaactccaatcactggcaagtaggtgtatagtattgccaaaagccacctgtgttttaaaggatggtgacttttgggttggcatttgaatgtcactatggtgattttatttccttgggatgttttctatctgacatttgaaaagacatgtaatttcaacatagaaccacaataaagacagattcagataagccaaatttgttttctacttgtagttgatcaacaagaaaattactactctctacatcagcatgaagactttccctgctcccctgaacatcaaattctgacgtatgacctgttcaaacagaaacaaataacatttggaaaactatctatatagaaaaatattctcacaaaattgtaaaaaaaatcctctaatgtactaaattcccagcagtaattatttgaccatgatccacaataaaaaataatgttttaacctgtaacacacatatacacaaatatgtagggatatatatatatatatctccgaaacaaaagttccacaaaataatattcttactcctgtgatacacttggataccttctattccatttaactctaccctattttgttctattttatgtactatttcattttttaaaaagttagtaataatctgctaaattgatttcattacccactaatatagcccaaccacagtatgaaaaacactactgaagcaaaatgactaaagtactctgactttattcaccaatgtaaacatatccacaaaagaccaatcctgagcaacttagcaggggaaaaaaaaaatctcttggcttgctccctagtatcctggatgaagccaaggtttgctgagccaatttttgtagtttgtggttgacaatgactgaaaactgaaaggcagagatcaaatcctcactttccctctcaacacatctcttccgctgggtaatttatacggtgcaactatcaagctattcaattttgctgtcatttactgtcctttttccaacagcaatggaaacacagcatcagtttactgtcttctctcttaggtagaattagattattgtccctcctacccctttaaacaaggatggcattcaccacttcagagaatcattcctagaggatcgccaaacaaagcatggcagggaaaccactatccatgaaggagcaatagcagaatctggggattgaggctgtcagtcaaggttatatacaagaacaagctttataatggttcttttgattgagtggacacaattagaactgaaacaacataataataaaaacaaatagacactttaggcatgcagagtgcagcaaactactctgtgcctcaagttccgtaataggacaataacaatacttaatttatagagacgtgatgaggattaaattagtaagttcaatattaaaaatgtataaagtgcttagaagagtgcctggctcaagaaagcatgctgtaagtgttgtttttattattatgctggcccagggaattggcagatattggtctagttctatgctgaactcaatacaaaaacccaggaaaagaagggatggttctaagtgcccctagagttatgctccacatttaaagtgtcaaactgggacacttttgaggagtgttggattggttcattgtattgattgtggggatgctttaacagcgtatacatatgtcataatttatcaaattgtatattttaaacacaatttattttatgtcaatgagactttaataaagctaataaagtttgctttatttaattaaaattaaataaagttaataaagcagaccaaaactaaaagaatatttaaagaagtatacttccagtagaaggagaaatatcccagatgggagcttggaaacacaggaaggaatgatgaacaacagaaatggtaaatacgcagtaaatctaaatgaatattaactacttaaaacaataattgttatatcttgtgggatttaaaacataactagaattgaaatgtgagacaataatacaaaagggaggagtggtaagtaaaattaagtcccttgcattttctggaaagtagtcaaagtcacaacttatattatatactaataaattaatgattcactttgtaattcctagggtaaccactaaaagaagagtaaaagaataaatgactaacaagccagtagaggtgaaatatttcattaattcaaaatatggtaacaaaggagaggaaaaggaacagtaaataactggggcaaataaaatgtcaaagagtaatatgatggattataacccagatatatcagtaattgcataaaatgcagaaaaacagttcacaaaatctacatatactatattattttttaaatcccagttaaatgctgcttaactgagacacttttgatattaggacacacaatttcaaagaaaaaaaggattgaaaaaattacatgtaaattatgttaatatcagatactgtaaacttaatgacaagggatattactagagataaaaaagacatttcataatagtaaaagaatccaatagaaagatatgagcgctaaatctgaatgtacctagttattaagcctcaaaatatataaagccaacattgctagaactagaaaaagagataagaaaatccacaattaatgtgggagggtttaatacacctctctcagtaactggtagaacaggctattaaaaatgagtaagaacgtagataaggataaggtgatgaacacatttgacctaattgatttataacattacagccaacaattacagaatacacattgaacatttaccaaaatttatgtgttgataataaatgagtctgaataaatttcaaagatcaaaaatcaaacataagatgtttactgaccacagcataattaaacagaaatcaataataaaataactaaaaattacacaaatatttggaaattaagcagtacccttctaattaacccatgggtcaaagattaagcacaatggaaattagacaatattattaactgaaatagaagaaaacatgccatctcaagtgtgtgagatgcagctaaaggtgtgagtggagggaaatttctatacttaaatgcatgtatcagaaaaaatgacagccaaggatctaataagacagtcaatgatttaagtatccatttcaagaagccctaaaaataataccatattagggtcaacaaaagtggaaaggagaaaataacaaaggtcagaaattagtaatacagagaacagagttactgtaacagagaaaatcaatcaagccaaaaactggttctttgaaaatactaataaaatcataaacctatagccagatttattaagataaaagaagagaaaggaaaaattacataaaaataataaataataaaaaaagaataaagaatttttctttttctttttaaagaaaaaaacctttaaaatttttaaaaaatttctttttaaagaataaaaaaaagaaatcactataaatcctacagacaataaaaagataaggggatacatgaacacttcatggcaatatttgaaaatgtcaatgaaatggacacattgcttaaaaaaaaaccttactcaaacaggaaaaaataataaaaatgtgaatggtactatactcattaaagaaactgaatttgtacctacaaatctactcacacagtattctctgggcctaaactgctggagagtgagttctactaaatacttaaaggaaaaaccacaccaattttacatagttcattcaggttatagaagaagtgggatcatgtctcatctcatttgatgaaactcattttatgaggccagcatagtcttgatcccgtaacagtataagggtattataagaaaagaaaattatcaactagtattttttatgaatttggaagaaaaagtaaacaaagtgttagcagaccgaatcctgagataattttaaaaggataacacgttaacgcaagagggttttcttttaaaaatataaggttggtttaatattagctatcaatgtaaagcactctattgacagaaaaatgaaaagcatctggtcctttaaacggatgcattgatctattcatgataaaacactcagcaaactaggtgtatggcaaattttgaaaatgcctgaacagccctacaatagattgtgaacacgccctgccccagtgaccaggttgtactagtgtaataaggctggtccctgccacaagtcccccttctttccttcccctgaatgtcacctagtgacattcaaacacaccaatgaaatcccctcatgccttttccttgtatatgccttcctgacccactaaagaggcacagtttgtaggtcctcactctcttcgctccccagttacttagtgagcccgctcacctggcccttttcccatgcggccttctgcacgatgtgctgtgctttcctttctaggacctgcaagcataacagatcatttaattgcatatgcctctcatagtatttccatggccttactgaagtgatccttaaagacctcacaagggggatttactctccaatttacaacacactgggattggaagaaaacgctctcaatttgatgaaactgtataacaaacatgctaatgatgaatattgaaagtttcccctaagactaagaataattcaaggataatttctataaccacctctataaaacattatactagaaattgcaggctttgcaatgaggaaaaaaaagactgaaaaaggaagagataaaactgtggttattctttgaaatcataatggtgtatgaggaaaaccaaaatatcctccagataaattattaaaactaataagttaataaagccacaccactggatataagatcaacatataaaagtcaattggaattctatataccaacgacaaacatttagaaaataaaattcagtaaattataccatttatattggcataaaaatatcaaatactttaaaatccatttttaaaagatatccaagacttctaaatgggaaactacaaaactttactgagaaaaagcagaagagatcaatacatgatcatagattgggcgcctcaatattgtaaaatgtcaattctccctaaattagtatatagattcaatatacagtaatccctatcaaaatctcataagtcttgggtttttttttctggtggaaattagtaaactaattctaagatatatgtgaaatagcaatgagccaagaataatcaaggcaaaattgaaggagaagaatattagaggacttaacactaccagttacaggattataaatctacattaattaaaacagtatgctattgacacaggatagacaaatagatcacaagagctccaaagagagtacaaaaacagaaacacatataccatcattaatcattaaaggtgacactgcattgtggtgagaaagggcattgtcctgaataaatggtggtaggttaactggatacccatattgtaaaaaatatttttgtacctcacttcacatgatacaggaaaatcaatcccaggtgggttgctggtaaaaatgtaaaaggtgaaacacgaaatcctcagaaagataacatatgggaatatattcatgatttgggggtaaacaaagttttcttaaacaggacacaaacagcattaacaatagaggaaaaaagaaataagtaaacaataaatgttaaaaggaggtaataaaggaaaaggtaagaaattagattatattaaaattaggaacttctgttcaccaaaagacaccattatgagagtgaaaagtgggaaacaataattgcattacagatgacttacaaaggaatcatattcagaatatatattgaactccaataaatcattaagaaaaagataacccagtataaaatggccaaaagacttggatattctcacacaagaagatactcaaatgcaaaccaacatataaaaagtgctcgacctcattatttatcaggagagtgtgaatttaaaacacaatgagatatctatacacgtccaccagaatggctaaaattaaaaatactgccaatacctagtattggagaagatgtgaagaaactggaattctcatacactgttggtgaagtataatcattttgacagttctataatatctcctaaagctgaatacacatatattattaaccagcaacttcactcccaaacctaacagaaatgtgtacacgtggtcaccaaaagacctgtacaaaaatgtccatagctgctctttgcataataatgaaaagctgaaaacaattaaaatgttcatcaatagtagaacagattaaaacttgtaatacagtgcaattcaagtcagaaatgatagagtcttccaaacataatattgagcaaaatatgccagacacaagaaagtatattctatattaggccattatatacagttcaaaactaagcaaaattaaactctggttttagaactccagggagttcagtctctcctttggggacaggctgaaagccggtgtgaagagagtttttgcttcttgtcagtattgcatttcatgatctaaatggtgatcatataggtggatttgttttgtgaaaatttgttaagctgtatgctaatgatttgtgtacatctctgtgtgtatgtttcattttaataaaaaggtttatttaaggtaatttctttaagaaatatcaatacttttttttctacttagcattcataagaatacaaacatgtggcagggaacagtgatgggacctacagcttacatcagggaaaatttcagacataacatggtgctgtcaccctgcatgtagtatctatatgaaatggtataaaagaggaggctaaaagaaacagcattaagttttcaggattttctgtaaatacgctgcttagtatgttattcatttttttttcttggtgaagaatagcagaaatttttttcttgtgtatagttgtagatcagcaccccaaatcatgcaagaaatcagttttttctcttcccattggcttctaaaaaactcagccctaaatttgtgtatacccttagatcagtagttttaaaactttctttgccatggccacagagagaaattttatatcatgacctaatgcacaaacacacacataaatctgaaagttacgtaaaggatataatacccttactttgtgcaatgccctccgatattctgttcttgccttcacatcctaatcctttcaaaatgatgggcacttactaagatggtttcccaggccattaatgtgttgcaacgaagtttgaaaaacattgtcttctagacaatggtacatattaggcattcaataaaatgttattgaatgaacagtggtatgcattttgttaatttggcctaaactccaatttgttgttagccttgttttcctttgccttctcaccttttgttcttatttaggtcaacttcttatagtgtatgcatctttagaaattgtcttaatcttttccagaacaagtccttaaaacacactctcaaagtcacacagtaaatcagtcagagcagagacaggagagaaaaggtcatcccaaggcacccaaggtgctgggaatgagaagcttaacacctgtaggacagacacttcctgtcccacctctgtaacaatgtctgtagtgctagacacatgagagcagatggtgaccgggactaagtgcctggagctcacctctaaccttacagggaaccctatatactcttgctttccatgaagttctcttgcatttccgacagatgggagagagtgagccagctcattctgagaaacacaaagacactttttggaagaggaacaaagggttctgcaactgacaatgaagaatggtgtgagcatctatgtgtatcactgtgataaagaagctcatggtcttgagtttcctttatctctcttttgagggtgtaaagtctttctcaggccattgacattttgtgtcaacagaaaagctagcaaacatgttggaaggaactagttcaggcatgtgagaataaaccttatctttctaacacaggaacaaatttaaccttaataaaacttttattttaaaaacattcctgttagtactattaaacaaaacttccatacaaaagttcttggatcacttttgggcaagctgccattctggcttatcttcaacaaccaaagaaacgaaaacatgttttaggccaagcaccatggtccagttcagtaatgctgtccctatgaggatagggctgtgagctagagaagagaggtgaacgtgactggtcattgctttagctagaaagggtcaaaaatgacaaggaatgtaacagggcttaatggaccagaagccaaaaatgcagtctaagatttgccttcacagatgtctacaggaacatttgttttagcagtatgaaatcagaagcagcctgcaaatttcaaaccggggtggttggttttaaaaggtctttgcgcagccattcaaactcaaacctacaaacgcacaatgcaagaattcatcacaacaaaatattaaatgtaaacagcaggatgaaaaactatacacacaaaatatgaattcaaccatattttaagcatacacatatactacatatccatagaaaaagacttggaagaaacactccaaaatattaagaagagctataaacactggctagtgaaattaagaatgaatattcaatttcttttttattcttttccttgtttttcaaattcccactttaggtatagattgctttgattgcttgataaataaagctatttttaaaaatgtaatactatatttctttataaactctagttttttcattcattgattgacaaatatctggataaaattttgtcgattttctctttaatgacaacttcaggggttaaattgcaattcaacaaggagagcaggcagactgaacacaagagtgaatcacatgcagagtaaaagtgaaacatggattcttaccccccaagtatatttgcataaagaaaaaccaacttacaaaaaaaaaacctcttgtcagaaacactctttgtcttgtatatttttttcatgtgggatgtgtagaatagtttaaaactgtagtccataagtaacgctaaaggtttagatagcctacacacagtcagtgtaaatgtcacacagccatgaattgcttggtgtagagtttcacagttctacagcaactcatgtcacccagctggctacaggcaaaactgagcaatagacaaatctctatagacatttgacaaggaaatgaaggtcgcacaaagaaatgaggctgtgtattcaagctaggaccatagacaattcactgtgaattagcaagcacagaagcatacaagtcaaataaagtgtcttcatttttcatgtggtttctagttactttgtcactttcctgaactgtgcaggtcagtgtggatatcaccaaaggctcagtgttgcattgccaggtgcaggaaggaaaaaggcaggttaatctgttttatcatttatttctctgactttatatattaggcgattccatatgataaaaacaaaacaaagcaaacaaaggaaagaaaactcctataaaactttgtattaataagccccttaattttaaaaaataggtttgttttttatctcttaatctaaataatgcaatatttaataaagcacatatgcatagcaaattttaaacactaagatgagggcaagtcatctcaatctcttgctaagcattgctaaaattaaaaaaatcttaggaggatactaagtacatcatttacaatatggtagtcttgtgccctgatttcaattaaatgcttctattaagaattttaaaggttgcatagtattccatggggtatatgtgccacattttctttatccagtctatcactgatggacatttaggttggttccatgtctttgctattgtgaacagtgaggccattatccttggtaaactaacacaggaacagaaagccaaacactgcgtgttctcacttataagtaggagctaaatgatgaaaatacatggacacataaaggggagcaacacacactagggccttttgggtggaggataggaggagggagaggatcagaaaaaataactaatgagtagtaggcttaatacctgggtgatgaaataatctatacaacaaacccccatcacacaaatttacctatgtaacaaatctgaacttgtacccttgaacttaagataaaagttaaaaaaaagttaaaggaacttcaaatgctatcacaaattggacagaaatatgtttactttggaagaacacacaaagcataatgagtgactaggatctcaccattgggttttcttgtctatattgggaaagcaaactttttcaacatcttagagtgtctgccaatcttaggctaagacattggctactgaatttggaactgacacttgggctactgagagtacacactggaggaaggagaaggaaatccgaatggaagggtaggaggggatgagtttcggctctgtctggatttccactctcaaataaaggattactgtgtcaactcatgagtaaaagtgaagagcaaacttctaagttaattaaaagaacttggtttggaaacaagattttgaatcccccaaggctgtgaagactttcctttccatccatcctccaatgaggagctcacagaaggctcaagataaaaaagtggatttctccataaatccacattgatacagataaataaacacatgagtaaacaaacaaacaaacagaggagaagggaaaactcttcctcaaggcagaatggatattaaaactagaggtgaaaatttaaggaggaaaagacatttgtatggtctcaaggtatttaatttcacataacatatattaattacaaagaagaaaatagtaactttccaatgagaaaacccaacagacagcaccttaaccaagtgattaaaactaacatcctcaataatggagtaaagtggcatcatgtgcttcctgatatgatgcactgagaaggacatgagatcattaatgtggtgtttccttccaaaggcacatcacctgaacatatctttgaggaaatattagaaatacacactggagacattctacaaaataattggcttgtatcctccaaaaataccaaggtcaggaaacacaaagaaaggctgaggaaatgtttctgtataataaaggagcctaatgagacatgacgaccaaatgcagcatgatatcctggaatggatcctaattgggaaaaagaattgttaccaaagacatgattggacaatggacaaaatttgaacagaggatgtcaattcaataatagtatgtatcaatgttgaatttcctgggtttgataaccagcctgtagttatgtaagaggctgtgcttgttcttaggaaatacacaacgaaacacttaggaatgagggcataaaagacagtaaggtggctgacagagacttagtagtataaaaaaccacaatttttctacactgtaattccttcctggctataccagagagatgccagtgaggtcacgccaaatgggcagtgaggctcagtgcattcacctgaaggcagaaagggtgtacacaaggtatacgtatattagtaaaaacacatggcagggtcatctgtgggtctggaggagtttctataatcttagcacttgtatatcagagtctggcttatcatggaaactcctacaaattagctatatgaaaaataccttcattctattccaatggttccccaagtcttaactcattctggcaacaactctaaagtccagagtctcatctaaatatcatctaaatcagatatgagtgagacttgaggtatgattcatcctgaggcagaattcttctccagctgtgaacctgtgaaaccagacaaattatgtgcttccaaaattcaatggtgagaaagacacagcatagacattcccattccaaacagaactaggaaaaaaggagagggtgaaggatcttgagcaagtccaaatctagcaagacaaatttaatcagactttaggattgagaataatcctctttggtttgatgctctgcccttctggtccactggtgtggtggtggtccagcccccaaaactccaggtggtcctgaaccgcctcaaaggttccaccggacagtcctagacccaagactttagtggaaggctgtctggcctgttgaaactgagatggtggccctgatgatctctgaattgtctttgcaggctcttctccccttttcttaagaatagtacatgctcacagccaaatagttctatggtccaggccagtcaagtctaagaaatccaacaggcttctttcattctgtcctgttttgtctgtctcctttagttccaactggcagtgtctttgctaatatgatcccattctattcctggctttgctaagaccccactagaactgcccttaaagtctataattctagcatacacctcaaaactcttccagcctctaccccttactcagttccaaagccacttccatgctttcaggtatttgttacagcagcacctcaattgttggtaccaaaaaagtcactagtagggccaagtcagacatgatggtgaaaaccattttctatacactgggattcctccctggccatatcagagaggccccctgaatatgcagaaaagaaggaacgtacacaaaggaaccgaggctttccttctcccaccctcctgtcagactcccttacaccaaagatggtctctgattgccagtcatgagaactttcttcaggggagatgggttataggaaggtaaagacttagaataaattattctttggcaatatatacagacttagacttaaaaattttcagcacctagccatgattctcggtgacctatggccaataatttaactaaaaatgtaaaggctcttatttatggtgaggcacctgacctgaagattgaaataaaatgaggtggtatccttgactcagttttgttggttttatgtttttttttgtcccccaaaatgaacaccaatattttaggctcaaaatctcagagcttcaagggatgtctaaagataatttcattcaaattcctcttttcacaattgggaaaagcaaggagtcaagcagaaaggtaaagtgactttctcagtcttaatcttgtgccaggactggaatccttgtctctcccaaaaaaaaaaaaaaaaaaaaaaaaaaaacaaaaaacaaacaaacaaaaaaacaccaaaaaactcttaccatttgaatagaaataaaacattatgtggttaaaaaaatttaaaaagttcaaaagagcatatcatgaaaaatgagtctccatagagtttgtgaccctcattaaaaccttatttatcttcccagaaatgttcctggcatacacatacatatatacctatgtattctttttttcatagaagagtattcatattataatgttatctatctttctcattttgtttggcccttaatttgaactcttttcatatcaatatactcaaatttattgtccacttctgagggggttacacagtattccgttgttcttattccatttataattaaagcattcccctagtgacagacttttaggttgtacgctgttctttgagattataaactacgctgtactggtggaatgtatgtattttaacaatgtgcgtcttttcatacacttccgtcattttgtttttctgaaaactttgtctttagcaaccactcccctatcattctttacttccttgccttgcattagtttcccttgcagatttatcactgcctgaaatagtacttgattgtttattttttgtcatttatgtctgttgactagaatggaagctccatggaattaggaacttcgttttattcactactatatccttagcccagagaacagtgactggttcctggtagatgtttaataaatatttgatgaataaattaataaatgctttgcacactttactattagatattgtttttcttactaattcataagagtgctgtatatagtaattaaatgagcccttgtcatttgtgttaccaatatactttccagtgtatttatctgactttgttgatggcattatatttttgccataaataaatgttatatagccaaacataacataactgtcctttattttgtagcttttgggttttgtgtcttgcttagaaaggccttaggcactccagagttatttttaaaaacttgtctggtactttaatggtttgtttttatgttggagtctttgattcatttggaatttattttggcataagtagtagctgtgtattcagctttgttatttttcccaaatagcccattgacccaacattaattaaagaataatgcatccttttctcattattctgaatgtcatctttatcatataccaaattctcataaatatttacactatactttccagtccctattatattttgttcatttgtctgcctacttctgtgttggtatgaatttgttgtaattccccttgatttatagtgtattttaacatttgtgtaagactgggctctcctctttgtctcctttacactgatgttttcctgtcaattctcgcatggttatttttccataagaacatcagaaaccactgaaccagtcaatccactgtcaaaacattcccttaatattttactgaggtcagattataatatagattaatttaggaataaatgacatcaataaaagaacttagctctcttgagtcctgaatgttctttatgctctcacgacttccttgatatacacaaataaaatgtaattttcctcaatgggaagaatgaatgtgactcttatactaaaactaaaacaaaaccttctgttccagttatctattgctgtgaagcaacaccatgccaccccaaaatttagtggcttaaaacagcaaccacttttatcacgtctgatgattttgtgggtccagaattcaagcagggcttcgttggatggttcttctgccttcacatggtgttaattaaggatactcagtgaagttcagttggtggctgggctggtatggaagtacaagatggcttcacccacttgcatgacacctgggcaaggatgacaggaaggcttagctgagctgggattatctcccagagttcccagatgtggcctctccagcatggcagcttcagggtagttggaatttttagatggtgactgaggctccaaaagcaggtgttccagtgaacagggaggaggctgcatggcctttaatggtctagcctcagaagtcacttagtgtctcttctgctgtattctctcagtcagtgaagtcacaagcctgcccaaattcaaggggaggggatatagacctttatctcttgatgagagaatgccaaagaatttgtgaccatgtttaaaaaccaccattccttctaatagtagaaaactagacaattttctcattagtttaacaactctagacttttctacaatcttttttctacttccctcacttctgtcactggaaacattgccatgattcaaaactataagtattttatttttaaaaacacattttcagttgagttgtattctttgcccatgtgcgtggggacagccatggccctcagcatgactttggctttatctgtccattctttctgctacccacttctggccactttacagcttgctggtgcctccaccagagggtggcaggagcagagaaagtgaactcaaatttgtccgtttaaaaaaacttgttatttggcagcagttttgcataaaggcagaaagcaaattaaaactaaaagtacatattttgaagattaactgtgaaactcaaccactcattacaaagaacaccagagctggctattctttctattaatccaaggccttatttcaaagacccctaaagatgtgctccagtaatccccttcatgccttcctagattatgcctttcttttctaaattccagtgatagtagcaacatttattgattatctgctgtgccaggtgctttacacatgtttattattgcatttaaccctaacagcactccaagggtgggaattgttatgctgatttttaagccaagaacactgctgcccattgaaattagctactaaggttcacagagcgaaaatgtagcaaagtctattcactacacccttgtgtccagatgtgttcagtagaccagcagcatcagcatcacctaggagcttgttagaaatgcagaacctcaggttcattcccagaccttctgtaaaaagctgcatttaatacgcaggcgatgcatattaacattaaagtttttgaagccctgctctctatcctgcttctcaaacattcctgcacactggaatcccatggagaactgctttttaccgatacataattgttcatgaacaactttttaaaaatgctaatgcctgagcaccttttcttcctcccaattccaatttaactgatctggggtgcaacctgggcatcagaagttttcatagctccccaggtagttctatcatgcagcaaaatttaagaaccattgttttatatagttcacttggtactaagcatattctatatccggtatagttgtttatcatttttatacacatcatatgtccccaacatgaatatattttatatatcagctctctttacagagtggcggtttcttgcacaaaatatgcactcactaaacatttgctgctattgctgttgttgaaaatggtgcttaattggtctgtggtggggctcgaacatcagtatttttgaaaaaccacctcacgtgattctattatgcagccaaggttgaaaaccactgggttggctcctacagctccagctgatggttgctatggagaaatttgggcagaggaatgctaagtgtcctgatttttgaagaagatccttaaaacccagatttttataataactgttgacaacaaattcaggtttttgaaaaaactgtgtgaacaaaataaaccacatctgctggtcatgtgtgcctgcacatgcatgagcatacacttgtaaagggatatgggatactcaatatatttatggttatgcacttggaaattcataactctaagtctgaattattataaatgccaccactactgctgctttggaaaaacacaccatcatcattgcataaccatctagcttaaaaaagagtcaccatattgtttctgtcgatatacataatacacagcccaaaatagagattgtgaagtcttggagaatgaataatctgtgcctcattttgttctatgcaatgcctaaatatgccaacagaacaagaggatgtgtcccaaaaagagggggcaggaggcatttggaaattctgggaagaaagatagtctataagagcagggtactattgttatgaattctacccactgcctgagcaccactcagtgattaaggaaaaccaaagaaaggagacccaagaagaaaaactagaacaagaaataaaggtatgaaagagaaatatggccagaagaaattttcccatctggtttcttcaccactagtggctccttatgtatggatttgtttgccagagctaataaacagtgagggtctctaatgatgtgaagctgggtggtaaaggcactgggggcttacgtcatgcagccaatgatgtgttgagtgaaatataccacatgttgaatttgctggcatcagcaccttctgccgatttaacttatgggcagatgatagcaggcccaacacccaatactacttgcccatatccttgctttcatttcataaagcaagaataaaagagagtcagtatcaatatcaaaataaataccactagtaatattgatgatgttacttttaccaccaataataatagcagttatcaattaccgaatgcttacaatgggccaagcactgtgctaaacaccttacgtattatatctcatttattctcaaaacaatagccacactgattcttttaaaagagatgtcagatcttgctttcacctcctcaaaacccttcagtggctcccattttactgagtgccacaggcgaagtccctttcacagtctgcaaagctgtatgtctaccaactatccacccccttccctactcattatctctctgactccacctcctactcctcttcccctctcttaatccattccatctggcctaatgaaccttctatttctccaacatgaagcctctgcactagctgcccccttcataagagatgctcttcccctagatatgcacaagcatcattcctgtcaccttctcagtgagggtttctcataccaagctgtttaaaattgcatttccccattcctacattccccttcttcttttttctctccatagcacttatcaccttctaatatccaacactgtacttattgattttttaaatggactctcatccactggactgtaagcttcatgaaggcagagattttattctgttttgttgattatagtgtctccagtgcctaaggcaaggccaggcacttatctggcacttgataaacatttttagaatgaataaattaatgaatttaatcctcacaacaaccataagagataggtgctataattatcctgctttaacaagtattgggtatgaagtttagagacattatatttgcccaagatcacaaatgagaaattgttagagggatgtaagccaaggacatcaagacatgtataataacatttgtgacctgccttgttattttaacacttcgggccttacttagaaaatgatacatgtgacaactggaatctagaagtggacctatattgggtgcagctgggactaggacaattactgggagctgatgggaaaatgaagggaaaactccaaaattgactatttttatttcctgtggttagggtaattcttaatttttagagcagttgataccattttttggatgatcatttgtagaggagatggatcttctgaagtattatgatcatgggaaataaatcaaggcttagcaaactgtatttccttgggggtaaataagtcaaaggccaatttagatcttaaatcgcctaagacatttcatccaatgagagccaactgcaggaatttaagagtccaaagacactgtaggaaattaccactgcaaacatgtccccaggactcttaaaggcttctgcagaaagctcattaactctgtttttaatgtttcaaatactctctcatccaagaataaatcagatagaattcaactcatgccaaacacagggtgcctgagctagctaattgtgcctaaagcctcaggggaacttggtaaatattaagcaatccactggagctggagctttcagtgggtcaaagtgcttagtccacaacacattcatttgtatggtgtttggctaaaccaaaacgtgaagctcaagggatagaagattaaaatattttctctagatcaaaaaaaatttttcaaacactttttgaaggttgtctgaagaaaagatatataagcaggaaacatcttttggcaactctgtgatgagtttgacagacaagagtttcttatgtccttcatacaatttaaagacaagaaatatactagtgacttgacattttaagctcattaatttcaagtaatacacttcataatttccaaaaaaaagtcatgtctgtgtattcggctcgtggcaaaatctaaaattctatgcttggaacaaagaaattagaaaaatgtggcagtattctttctctaatatacataaaaacacttaaacagtttgtgattattttccatttcttatatgagtcccaaattatgcactttattactaaggatggatggagtctgagaagtaatacaaggttcaatccacatatccaaaatgactgtcttgaactgcaaacattagaattctacctaagtcttaatgaaacaaagtacatactgggttcagttataaaggccttgccactcttaatataaatgtttattcatttaaggctacacggcaaaccaatatggaaaagcatatggtggtaaaaaatgaaccaggagatagggggtagctttggaaatggcatcagaggagcatgagcaaaatgtaaacagagatcagctataatcaagagttcttatcagtatcctcagtcatttgatatattaatggaatgataacttgattatgccaacctgagtgaagtcatgcagtggttgaagtatggaagaaaatcacattttctaaatgtctactatatgtcaggcactttatatttttagtaataatagctaatagtaaggatctataatataaaaataactttccacaaatgaattccaattcttacagtaaaactatgaagtaggtgttgtcatccccattttacagatgagaaaactgagatctgaaaagattgaataacttgttctgtgtcacgtaggtagtaaacaaatcagaattcaaacttcattctaattccaaagcccaaaatctttctgcttcatcatccatgtacaaacaagacataataatttggtgtgatttacactgttctctagggaaagggctcttgggggtactcatgtgaaaaattacagggataaaaataaacaaataaaagaaagcagcctctacaggtaacgtttttcggacaaacaactgagaacaataggttttgaaaacttctcctaatgaggatattttaaatgttagaaaacttagttttgctttagagaaataccaaaaatcaaattacataattttcaataagattttagctcatagacatgtacatatctatgtgtaaatacctagctttttcatatcagaatgcccattttcaaaaatcttatgcacttatatgttacttccaaatatatacagaatatgccagaagtggattttgtataccttgtatattacaggtaaactgcttaattcaaaaacatatttctaaaccctgtgtttataagaaaaatcatttacctgccacatgtattattagcctggtcatttcttatccaggaacataatttcctgccttattcaccaacagttacttgaaagagtacactaatccagcaaagagtcactgcatcaagtttacccccctaccaacttgcaaaagcttgggagtgtgcaggaacaggcagagggcagaacaggcactccctctgcccatgtttgcaagctgacagactgcagggaggaaatgattcatgccacagaatctccagccaacttcgtgtcactggactttataaaaacaaataaactaaagcttttcaacagactggaactgcttaaacaactttagtaacatggctgctttataaggtccccgggcagttcaatctttagaaacttgggccatagataagatactttgtaaagagcaaatccattaccagcttattattgtaaactggattgtcactttgggaatcacaaagaaatatgataactgcaaacagcagcagtcaattgccatatggataatctttatcagctggaaaaaattaatttgattttcttagaaaccttaattttatttttaagagtttgaactttaaaagtttgaaaactgcatggtacaattactttatggaagtctcatcaaacagtataccttataattcttatgccttatatttccttccctattgactacttattttataatggcttctagaagctcatgaggaatactaattcatttagagtttctatttctcccaccaataatttcaatctattgtcaaagcaatgtaaaagaaaattcaagtaacttctatcacatttggaaaacttaagaggaggaaataagatattctaatcgggcgtattttgacttcaactaaatttattggctaaaatcctgtgcattttgaaggtcagaattgtttacttggctatgtccaatattaaccagttaggttaggtacatattatttgcatattgaaatgcattattaccttttccaaattaaaaagcaaattatgtctgacaatactaccctacccagttccagtttttggcagtagagtatacacatatgtctatggtacttatagctatcaaccatcgttgaatcagacactattcctatataacaagcattctctacttatactaattgtagccatcttgccttctgggaacatggagagaattgccaatcttagactagaaaggggtgaatcctagccagaagtcctcttctacttcatcgttacccccatgcttccaggcagtcatgaccaggtggtagcgatggcgggagtgagggaccaaggcctaacggctgctgattgctctcttcactcatgtctttgcccatcaacctatcagtctctctacttcctggaagcacgtgtactctgatcattttaaggatccggaagtcaagttatctgaactgctattcatcaggttttctgatttcaaatccattttttttctgtgactatagcacagcctctcacttttttttttttttttttgagaaggagtctctctctgtcaccaggctggagtacagtggcaccatctcggctcactgcagcctcagcctcccgggttcaagcaattctcctgcctcagcctcccgagaagctgggattacaggcacatgccaccacaccaggttaatttttgtatttttagtagagatgaagtttcaccatgttggctaggatggtcttgatctcctgaccttttgatccacccacccacttcggcctcccaaagtgctgagattacaggtgtgagccaccacaccattcctagaagtcaagttatttgtactgctgttcatcaggttttctgatttcaaatcaatttttttttctgtgactgtaccacagcctctcactttcaaataatgctaatcaacatttgaaaaactaatgacacattcataattccttcaacaaatgtgtgctaaacactagctggatggcagggactgatctggtatacaaatggtcagagttactaccttcaaagaactttcagcataggctggaagcaggacgtggagatgtttcacagcaattagaagtagggacagaggtcaacgaatacactgaagagggattgagcatttgtacatggcaagagatcggggaagccttcaaagtcagactggtggttaaacattcagtcaatttagagtaagggatggtaaaaacccttttatgtatcaaacctctttggtttagaaattacagacagggtagcaaaccctgtggtctttatcaaccacactgggattagcagcgacatgaaataacaattccttaggcttatttcctcaatggatacataccaacattcaggcttgatatactgggttactgcacagtctagtaagctagcctttgggttctgggctcagtttgaccaggttcaagtccttctatgccatctagaactgatagtagaaaagttgcttgagttcctgttttcaaaaatggaaattttcaaagcatgttacatgcactgttgtaacatgctttgttgctacatgcactgttgtaacatgctttgaaaatttcctttcttgtcagttaggctggatactctaaggcacttctcacagcaatacaagtagattacaacaagaaatgtttacagtactgccgggcttgcaggacatctctaaagggtacactgaactaaaacacaaagagtaagtggtgagaaatgcataaactgtgattgccatggggacaaatgttgaactaacattgtgatgagaagcctaagcctggggctcaatacaaggagggagagataaacacaagatttactttaagcccaaatccttaaagggactagaatagctcccaggttagcacaaaaacagttggagagccagagttggtctatgggtcatagttcactaatcccacatacaagataacaatgctacttaacatatgtaattattttatgatttataaactctttccccttatcttatccaatttaatccttatacaactcctgtaaggtaactaaaagaattatattctgcccttggtatgccactgccctgacatctttattttgaaaaaaaatacacggatgacttttctgtctggcatactctattacttcacagcaccctggggtcctctttgtgccccctgactttactgcggtattgtgacaagatgaccatggcaggatgtgtgtacagtgtgcacaagagtgtgcacaaatgaacaggaggagaagattcttctttatcctgtctaatacaatgtaccattaataagacattagtctaccactaataagacataaggcactagaaaattaatgttagatacaaagcaaagaagactagacacgaagctaaaacttcatagaaagaggagatggaaaggttgaagaaatgttgaaaatgctcttttgggtgcgacaactagcatcagttgaaataaccgcagaataaaatggtctgtttttgcctagttatgttgcatttcctttcctctaagtacgtgtgtcctttaccacagaagccaatgaaggccatgaatcaacacactgctgatgcttaccttgatgattctatttccctggcaatagccagaaagaataggaaatttatgtacaccaaaacttccaatgtccaagcacttcctcttcccactttgaatatgttataatgatgtcatccatctaggcaagatttactcagcattgtagaccaggaccagagctcagaaattttctcattaaacccttgcatttaagtggagtctatgaaggttcggaggggagagatcaggttataaacagtgatcatatattacttgttgcacagatgagttgtaaatatgtagaaattactttcaactcactgtaattcttttaaaattatttattatttaatttttttgagatgaggtctcactatgttgcccaggctggtctcaaactcctggcctcaagcaatcctccctcctcagcctcctgagaactcaccataattctataaagacatcttatatgtttgcattggaagacataaataaatgccaatgctggaaagagaagtaaaaaggtggagacagagggggaaactaacatcatatctactatatgaaacatatggcacacacttttcatgctacgttgaattcagttatcacaactctgctgggaggtttgactctcgttttgcaaaacagaaaattaagatttaacaacacatcccaggctctcagcttgtgagttgcagagctgaggtttgaactcatgtctatattgactgtaaagcatgtattattgcacacattgccttcacaacaaggaattctacattttgggaatgattatagaaagaaaacatgagtagaaaataatataaacaacttaaattgtaagacggcatacgatagaagtctatccattggtctaaatatcacactgcagcagtattttacccctatgctgggctattttttaacactcctctcctctcttgaacaaaactttttcaacaacaatcaaaaacatttcaccaccagtgcacactctgtttcactgttccaaatttaaaacacaaatgaatattctaggttgtcacacagtatgacaaaactgaaacaactgaagatgtatttctttgactgcacaatcattggctataatcatttattttgaatctatttaaatgcccaatacctagtagcccaagggttaaagacacaacctgtaccaaaagtactgaacatcattccaaagttttaggaactaactctggaaactaatgtgtggagccaaatcccatgttttagagctgactacataactaggagtcctccaaattgactttcatgtaaatttgtgtttattaaaagataagtattaaaagatgctagtttggagatgaaatatatgttactaaaactcaacagtaactgcagcagttgtttagaacttaaatcaacacaacacattttttagggggatattttacgactgagactgcttagaacggggcattataataataaaaagtcagctgacatttttgtccattttatcattgttgtaaaattattttcagataacttgtcccctttattgtctgcagtgccttggacagaccattctcaccatcctgcccatggtatgtcactgccctgaaatctttattttgaaaaaaatacgtggatggcttttctttctggcatactcccttacttcatagcaccgtggggtcccctttgtgcccctctgtcactggctttactgtggtattgtgtcaagatgatcatggcaggacgtgtgtgaggtgtgcacatgagtgtgtatgaggtgtgcacatgagtgtgcacaaagaagcaagaggagaatgttcctcagtatcaaatacagcactccaaggagataatcatctatggagtgacttcctgggaggatcaatgctccactatttcagaacattctctagtagtgaccctcactagtctggggacagtcttctaaaccaaaatggataatgatagggaatgctgggggatcacaccaggcacaatgccacacttcgggcactatatcactactcacttatcaatgctggctttacttctgacaaattcagatgggcacaagggctccccaagctaggagactgtttgattttagctttggctactctggctccagcttcactacaatggcattgctggtcaagatcccaactgaagtcgtcatttgaatttaggccaaatcaccctttgactcattctttaaagaggttaatagcctaacattaattaagctctgtttgcaggtaattttcaaaagagctgtagaaaagggaaactattatttaccccattttatggatgaagaaacagaggtttgaggagaataagaaacttgcaccaagtcaggaaaccagcaggcaacagagctggatctccaagacagttctgattcctaaatccattctcttaacctgtatagtatatttctgagcaatagagtggttagaacacctatctacattaggcagacatccaaactgacaaacttagcttaagattaaagcactcctcccaaaaaggtataggtttgtcctttgcaatacttatgaagatatttttacccaagaattctagaacctaggtaacatcatccagagcataggtccacataaaagagaaaggttataattgaaaatacaactattaaacataacattatgtttcagacatgattcctaccatgtcttcaggtaaagaatatcacattccttgaagtatacttgatggagattttatgtattatcttattaataataataatttacctgtaaaccatattatttgggaagtttcctttagatttcatctaaaagcctctgtagaaatgccggcagtgtcagaattactcatggttaccgttccacccacatcctagtgtggatgagtgttggccataatgtcaaagactgtctagcttctagccccttcactaaggagaaatgcagtttcagctcctcatgtgtgttgtcatagaatactagcagaagcatctccagggctggaagcaggacactttggaagctggtgctcaatgtattgctacattcagtggtcccaacccttggaggcgttgaaggcattttcttatattagtctatagttccattttaaagaatggttctaaatatgtttcaaggtagttcaacctacatttgatatttatgattcttcaaaagtatatacaattttgtgtttataagacgtgagtggcacttattctgtttcttgagggaaaacagggtcagttcatgcttgctcctcttgttctttctctatgcccccaataacaccggaaatcataatgctgccacttccagtggcatctgttttgctttggtaccttcacacatatttggacttccatgacaaatctgtgagacagatggagcaggtattgtcttccatatttaatacatgagaacactgaggcttaaaatatttaggagtaggagtactgggtgtataattcaaatcattctacaatggtgtgctccccctcccaaaaccccaatttatagtatttgctgattttcaggtgatagtaattctaccacagctaatttcaagctaccaacatgatgttaccacatgcagagttaggatgagatgtacaaaactggctctcttatccttcgacccctaccccagtgttctttatatgccatgaaattaagtatttatgatgttaatttaaacacatatctatcaccatgtcctggagaggatgccttacgtgtataagcatgcacaatatggagttcccttataagaaaatcagtcagagacatttcttctgcatccattgacatgctcaagttttgatcatcctactctggttacaatcaagtgtactagagaaggtggccctgaagtaatccagggctgttcctttacatagggatgagtcggagatcaacagctcatttcagtcaatcccattcacataatatcttctagccaaaggtctccaggtttttccatgcttctctaaccatccccattttacagacaggagagtccaatgtctcaggaaattaaatgacatgctcaatgtcacacagtacatagagctggagtcaagactggaatgcttccctactgcaccaggatgcttagtctatcaccataaaaaacaaagacttctgaaaaatgtggcagagttcagaacacctatgagaagcaatatagaatatcaaaagagagaatgttgtgggccaacagacattccacaaagcctgtttttgtcgtggtttttagactatgctccatggagcctcaaggggccgaggggcctagcaacatagaaagagatcagcctaagtgggcaagactctggagtcccccagcaaatgtgaattaaaaccctttgtattccactgttttacatactgggagtcagattaagatttcatttggaaagagggttctacaacttaaaaaaaaagttagaaaaccccaacaaagaccaaagtctagattgttaattttcaaacaaagctctttggtgagagttactggctctcataaactgaaggagcctctggctgctcttttctcacgatctggagagataatgtatgtgcaaacacactgaaaataaagaacgtgtatgcaaactgaagtcaacgcaggccctttaaccccagtctgatcctttctgaaaggcactgggtatttcagtaccatgtagatttttctatcatatgacttcccaaacatgcagacactccaggtcctcagctgacatcttggaggccagccatgacttctggctgcctgaacaagttcacaaaggtaactactcttcccacacttgctggcatgacactatcataggccacacagacctcgatgagccctctatgaaaatagatgaagcggctgggaataacaataagcaccaggttttcagacctacaaatatgcagccacttcatactgcattccacatgaaaggctgaaaaaactgttaaagccaactaaatatggcctgagaaggattccgtacttctatacttgagtccttgtggatgaactgtaacctagcttaatagtcagattgaaaacctaacttaggagtatgagcctgtaacaatcgctaagtcttggccaataccagtggccatactgcaaccattcatacactgctgagtgttcaaactgtgttcaaataaggcaaacgctaagctatcaccaatccagccattctgtacctcgcttccaatttctgtacatcatttccctttttttttggtttataaatcttctttcactacatggctgtgctggagtctctgtgaatctggtgtgattctgggggctgcccaattcacgaatcgtccattgctgaattaaactccattaaatttaattcagctgatatttttctttcatcaaaacaaagaaaaatgtcttaagtagccaaaataattcaattattttcagtagaaaagagacgtacagggaatgtactgagccaagtggtgtagatttagtttgtactatgctatattaatgtaggctccactcagaaccaatattaagtactaaatattgtcagagacaacattataagcatataaagacagacttatactcaagaacatatttttagacaaatattcatcctgaagctacaatgcaaaaatacataggaagagaatacatatatattgtctattactgttatggtttaaagtatttaaatgtttgtatttatgtataaaacatttagctatatgtttgcttatgtacgtgtatttacaatgttgttttaaagacgactaaaatgttacataacttcttgttaacataaatagacttcagggctgatactattatttaaaatgcaattaaatatctttaaaatattcaaaccatataaaatgactatgaattaaagcatttgtggaatcaaggttggaaaactaatatctattaggataaggattattaaatattttgcatttttctagattttgatgaagatataaagtgaggctaaaatttagttttgggcttatcaaggcctccccatttcactgtcttttaagatgatgtgtactaagagaaaatgcttgaatcatgttggttgctaataaatgcaacacattgagaatagctgttagtgccttactgaaaaatccttactaaaaaatgcaggcagagatggaaaatattcctctctattactctcaaagcttaaatttcaccatacttaccaggcatgtaaaaagttaatctttagcaaagcaaatgtgcttaaaatagtctattgttctcaacaagttataaacctggattataaaactgttaaacactagagacacaaaactcaaatacactaattctttggcacagttttttttcattctgttactttccttttataaaagctcaggttttatgactgacgatttaaaaaaagagagagagaaatggaatgcaaacttctatacagaaagccaagtgctaagagccatgttttaaagcagcatacactatcttttaaattacagttttggatttggctgctttgttgtaacaaaacacttcatgttcaaacattttattaatataatgtttagaaatataatattaatatattatatttagacatatattattatatttagacatataatattaatatattatatttagacatataatattaatatattatagttagacatataatattaatatattatagttagacatataatattaatatattatagttagacatataatattaatatattatagttagacatataatattaatatattatagttagacatataatattaatatattagttagacatataatattaataaatattactaattatattgatatacagaataaaagaaaaactaactcaaggaatatgctaaaatgtcctttaaagctaaattttcttagacccccccagactactactgatagaaaataacaagagtggaatatattctcaacatcatcacagccctgaaaagttgctatttttacctcactttacagacaggcaacctcaagcccagggacattgaggtctgctggaatttgattttcttttcttttcttttcttttttgaatccagatcttctgatcccaagtctttttcttttcctacttctacaaaattgtttcaacagatgaccatatcccaatttaaaagaaaataaggagataatttacagaaatatagacaaattaggaaaggattgaattattcatttctcacaaaggatttacccccagattaagttatcagctcctataactcctctagaggccaaaacttgtcctcagtatttgagaaaactttctgtaaatatgaagtagctttgtagatagagccaagcttggcgagtgatcaaatttatgtgtgcttcagttgcagtatattgaaaaaaaaggttttaagtgtgtctataatggagaaagggacgtaaacaactataaacatggacacaaatatttgaagccacaattttaggcactagacaacagtccacggctgtgatccttgagaggaggaagacacaggagataagctttatgtttaccttggctttttgccttggggcacttttcaaattgcaacctggggaagtggaacccagagagcagctgggtgaagaaaactgagacctgatttttgggtggcagatatggtaggaatttgtggagcaaagtattagagaggaagctgcacaagaaaagaactctagaaacatgtatagggggtttcttgagcctttagacaaatattaagaaaatcatatgtgagacctaccccaaacagctattctgtgagcagaaaagggtgtttgagggctacaaaaggtcagatgttggagttccaaccagccaaggaaaagagacgttgctgaacactctcaagattcagctgagactccaaaaaaaggcaatgccttagaaggactactctaatcctaaaataaagatcactctagatttgccctaagagaatctaaaaccaggcctccactatttccagctgatctgccagaaaattaaatgcctgccagaacaaaactcattactctttaaaggaagacaatgacatctaaagttttaacattgttacactacagtgtccaccataaaataaaaaattactacatatgtgatctggctgacatctaaagtgaatagctgctgtttctgcctgcccaaaatatctgtctcatacttttttttctttttgagacagggtctcactctgtcacttaggctacagtgcagtggcatgatggcggctcactgtagctttggcctcctagactcaagcaatcctctcccctcagcctcccaggtagctgggaccataggtgtacaccaccacactttgctaatttattttttattttaatttttgtagagatgggtcttactttgttgcccaggctggttttgatctcctgggctcaagtgatcctcctgcctcggcctccctgtctcctacttttaagaacacaaattcatagcaagagaatctttctgtcccccagggagcacattccatttggttcagccagggcccattcttactagtggccaagtgaccaaaggaaataggatgtcctatttcttggacacagggaggggcacatgacccaagttgggccagtgactgtcctctttggcataggtctataaaaatgttgtcattcaagctaagtgatgtaagggtgaggggctgatggcattatgtgtgctacaggaagtgagtctgttctagggatggggaaatagagatgtggctgtggtgatttcatttgtgcccttggatttagctctgtcaaaaggattttgcaaacctgatatggtgaaattcagaagtgttttagttctggattattaacaacaatagttctgatagagccttagatgctcaagttagcacacatgctacactgtgacccacaatgtaactttctagtgagagagtcaacatttgatagctgaaaattgatagtcctggctccttgttaaaaagctgtgtcttgggccaatctcttaccttccctcctcctccctgtacactgagaagagagaccttctagggctctttctagtggcaaaattccatgagtctatgaaataagggactttccacagtcagctagataacaggtttaatggtaatttacaaaagtgacttattcaaggcaacaaagaaaaggtgtaaaatgagagatacaggaatccagtggcaaagcttaaagaaaaagctcatatagcctctcaatgtcccaatttgctgattctttgaccaatttttctccttttgtttgcaaggttgaattagaccaattttatcctccagtaatttgggctcctgagaaattcactgtgagtgaggcagaaactgaatcaggcaggggcattattgttttctctcagcccagctgtctcttaaaggtttagaaaaaaaatcacacttttccagttcccactttctaatgtgtaaaattactcatgattatttaagattgatatgacaaataaaaataagaaaagattgtttgtgcaggtatttggataaatgtagtaaaattatatttgctcatcatctctgcacttgttaggatcaccagaaacgctaataaatctaatcctttaaatctaatggtatttactgatttgtcttaatgaaaacatgctcagtgggatattcctactgtatttgcaaagagactatgttacctatctcttagccttgtgatcacggtgatcatggaaaggctagttcttagaagtgagaaatggaaatatgaataaagataaatcctagtgacctataaaaacactgttatctgtttcctgccatgacggtgctcaaggttgggtgtatataggccattgagcctttcctctttagaaggggagcagttgagaaaggcttcagggagacacatgggagatgccacagacaggaaatatatgaactgagaatttccaactaaaaagctcattaataaacatgtatgaattattttctattcataaatactattctaggaaactaactttattaataaaaattttactctatcaattttattctcatgtatcttttgataaagaatattagggagaaatctagaaatatatataagcataaagaaaacaaaatattccaaaatccagcaactcaaatataactgtcttaacaattaggtacatacttttccagtttttaaaaaaatgccagcaccatttgaaagcattttataatcatcatctcatttaacccttatagcaactcaatgaggaagttattcatatttttcccactttattagatgagagtcgcacagccctgcctaatttcaaagactgtgcatttaagcactaaaccgccttcgatgcatatatgtaaatatataaattctatgtacatatacatattcatagatgcatttatgtgctcatttctacattcctataagcacaaatttgtataactgtaccctaaatgttataactatatatagtaatttataatttatatttctcacaacatatcaagcaaaggtttccaattaggtcacaggaagccacagactgagagataggaaaggtcaactgctatttgttagctgttgagctcccataagggagagtcaagggtacaaaatcttgagacgaacattgtctgacatggaaaaggacccatgtctcaagccaagagaaactcctaagtctgctcaaagtagaaaagtttttgagctataatagaatgtgtttgggtgtttgtttattattcgtgttgtctgagccactttcccccttttaggagtggaagggactataagggaagtccctattcagcatgaggattctgtaacaagtccctaaaattgagaaaggtgactcggcaagtagatttgagatccctactcagccccatagagctgagcatagtcaatgaatgttttataaaagtgatgcgtgacacctaagcttcatctacaactctacaagtgacaaatcaacttagatcctcactactacaactcaacagttcacagcaaactaattcttgttctctttaaaccctgttacttccaggttccccccttatcccctttcaaaaatcattgttaccaccactattgcaatctatctggcagaaaaattgggacctacctcttactctcccttcttcattcctccctcctctcctcatgtagtaactttacacattcttcctttttggtattctggcattggttccttcctttatatgcccattgccttggccctggtcaatgttcttatgatgttcttataaatattgtcatcattttactatgagcagcattaagaaggaaataggccactattaataattgttctggaacaacaggtttaaacttgattgtcctggcacactagatgtatgtttacctacttatgcaaccccatcatcctctttctccctctcttcatttttcctgcatactactgccacatccttaaacataaagtgtaagcttcctgctaaggtttttgttaaaatcaaatccaggctttatactgcattcagaataacttccagatttctcagtcaggcctttataatttggtgcctccttaaccctctcagtttttcttctgtgactcttttccatgaccctgccatttcaattaattgtgatactcagcgttccttaaacataccaggtatactccatttactacttctttgattgtacccttccccctcctctccaccagagaattcctatccctttcaagtccattcacttttcacaacagccctaaatgcttaaccatactgccctatgaacacatattctactattttagtgctcagaatatatcattctattctttacttttgtctctgtgtatctcatctagacaaataagaataagaaccacttatacctagaaagaactgtacagtacacaaagcactttctaatacattatctgacttgatcctgaaaaacagaaggtagcaattacttcttccagttttacagataagaagactgaatccaaaaggctaaaagatattgccaaggtcacacggtcaaaatttcctttgctggctgggcacggtggctcacgcctgtaatcccaacactttggaaagccgaggcaggtggatcatgaggtcaagagatcgagaccatcctggacaacatggtgaaaccccgtttctactaaaaatacaaaaattagctgggtgtggtggtatgcacctgtagtcccagctactgtggaggctgaggcaggagaattgcttgaacttgggaggcggaggttgcagtgggccgagatcacgtcactgcattccagcctggtgacagagtgagactctgcctcaaaaaaaaaaaaaaaaaaattaccatttctaaatttagtaaaatgaataaaaatgtcaaacattagacaaaatataccaacaacattcaaacaaaggaagagatacactctggtaaaaccatatttgaaagattgtggccaaggaacgggagatatgacaatacaaagacccaaagaccaacactaacttctagctccaaagcagttccaggagagaaaagcacttctaggagagttgaacaaatttggggacaatcttccaaatgccctgcaatccagagggcaggactctgaggggtcagtaggcagttagagaataagctttttggagtagaagtcctggctcactaccaccacattgacccacctaaggtgagaataactccttggaaggtgaagctataccaggagaagtaagttacatagaacttactgtctttatcaaaagcaaatgtttcaaaactctctccaacttatagaataatttgaatccaagagtttccactggtaagactgaaatatgaccttgtctttaaaaaacatagatcccggtataaaatgttaaataaaattgcagaacaaagaatagaacccaaattaaccaactataactagccataatctcagttgagtcctcttccctactctcaagcaaaagaaaagtcctggtgctacccaacccacgaagttcagttctcagagaaaacaaaaaggtctcggggaagaagctataaaagtcaagtatgatttacagatacaatctttagaaaaatagatggtctagctaacactttccacattaaatatgagaaagaaaaaaataaatgacatagcaactatgtaaagatttttcaaagcatataggaaagaggaaagaatacaaggaaaggagaaaagtatcaagcaaatactgataaaaaaataccttctagaaaaaaaaaccagtggagaaacagaaaaatatccactttgaatcataaaagacattacaaagaatgaatgtgatgaaagaataaagccaaagataagatgaacagataatagaatgactagaaaagagtgagtttggaccttcagatacaaaattaagaccaaaacaccacttttggagaactgataaattctaaatacaaagcgtcattaggaaaaaaaataaaataaagttggtaaattttgttaaatgcctttttggtatctaatgcatctatgcaggtgactgtatattttttcttcttttgctagtcaaaggattaatattcttaataaataaatattttacaaataaggaaaaatatcattaaacgaatggataaagattatgaacaagactggtaaacattaacaactatgttaaagttatcgatggaataggaaaccaagcaatctcaaatttggttaaaaggattatagcacatttgtaccatgaaacacaaggagctcattaaaaaaggcattattgaaagggggagggaatcttcaaaatatactattaagaggaaaaatgtaaggtcagaaaaagtgtagaaaaaatccacatagattaagaaacagaaaaacagagagaagccatctatatccttatcatctctttccaatcattactaaataatgtgtgcttcattttccaaaagactgaaattcacccatttttctccaaacacatgctagtccaagctactttcacgctagtccaaactgccttcatttttcccctttcacttctgcaacagcctcccacctgaattccagcacagcacttctccccttctatccagtctacactctaaccattccaggcaccctcagttccttgaatgagctatggtcctgctggcacagggtcttctgcatactttcttgcctctatccggaacattcccctctagtctaactcagtcttccattcttccttcagatttcagcacaatcatcccttcctcagagaaactcacgtactcttttatgttgtacttaatttataattatacatttacttgtttgcgattaatatctatttccttttgccagactataagctctaggaaagttggtaatatgtgtttttgcttaatattgaatcttcaacaaagtacccggctcagaagacaaacaaacaaacaaacaaacaaacatttcaatgtctctttccccatttatctaactatttacctgtttgtccatccctcatccattcatccatccatatatccatccattctttagctgtattaaaaatatctggaagaaaacattagccattattaatatctagggattggggctgagggaagaaatgggggtgggcagatacttgctctttattttaaatatgtgtatttatttgcacatttattaatagtaggtacactgaataattaaaaaataattcatataacaaaactactactttcttgttgatgacacgaaatcaagtatatcttaaaaatgtcttcagtctacaaaggtaattagtagtatcttcatatcctgtcactaggactataatcatgtctctgagggacctgcatactaacacaattctcttttcttgacaactcaattcagttctatttcaagtataaatagatcttctaataagcattcttctgcgtgtttgtatactcatgcaaagacatcttttttctcattaaaggtgttagaaaatttccctaggaaattcagtcacgttgtcaaagtcttttcacagaaaggaacaatgtgtaggaaacagattctcttgattttgattaatgaacaaaggaagctctaacctaatttgccttaaagcaccttttcttgatggaactactagctcctaccaacaattcaagatggtaaattctcagcaattaggaaagaattcttgaaattaataacttaagggatctttcttggtctcgatttctacttaacttaccggctagtatcttttggttacctttttagtttggagaattaacacagcagcaatatgggccataccaggtctttccacctttatacatggctactgtatatccttttactcatcagatttggttgaagaaatgggcctcagacttctaattttggtttctaaacagggcaagtctggatttagaatacaaccacagaatacctctgcagaatgagccctgtacattaaaaggaaaactaggccttttggtattgttttcaagttctctaaattgttatataagggagacgatcttatctaaccatttatcaaattctgcattcttatgtgtaggatactgttacaactttaagaacttctggagacgaagatgagccatgaagtgttataagaaatcattcacagcaaagaaatctcattcagataacatctagcagaacacttgggggtggagcaatggtgaaaggaggataaaatttggtagggatttgattgtgtgaaaatctatgaccacctttagaggacagacatccataaaatcattcaccctcagtataatttccacccttagtataatttaccattagtttaattagaatgtgccacttctaattgcaaaagtccaaggattagtcacttgaataggaagagttcttatacaagggacctctggaaaaaagtcaagattacttcttagtactgtagcacactccaataaatacatttcagaatttattgatatggaaacattgtacttaaaatccatgcacccctgacctatgtcagaataggggttacatttggaaagagatattgactgtgaagaggcataaaggaggtagcctcctgggttttggaaatgctctaaattttatctggcttatggctccacaggtacacacccatgggaaaagtcattgagccacagattgatgacttgtgcactgcatgaatatactacttcaattaaaacaaaatttaagtaaaagtataatggttttctgagaaagaaggttagggaactctgcattgaagaaagtatttttaataagaaaaacaatgcaatctgattgtcatttctaaggtctaataaaattttatgatataataagaattccattacaaataatgttttgcagatgtcctaaagatggggccccattaatagcagcaggagaatgagaatgtcatttgaaatgctcaattttattaatgatcaaatacagacaactggccatcagcctgctacttgggagaataaactactttgaaaatttttataacagaaatttctttccaacctccactaatatttaaaggagcaccaaaattattaaagcattgccagagaaaatcaactacactgcaattcacacacacatacacacacacacacacacacacacacgcacggcatttgtgcatgctgaaggagcaaggagcagctggatgtgttgtcacactctctaagtgttggggaattgctccctccttttccacccagcataatctgcctttaaatccttgagagtttggactacatattgtaaacatggatcctacaattacattatcattagagtacaggtagtaatgcacactcactctagcaactaagaactaaataatatcagatgatggcttaacaaataaaagcataaacccagaagccaacaaatgactgagacaactggaactacctgagttcattaccatcaatgggaaggcaggtctgtgttcccaaatggaactggcctatagagcttctagaaaatttccagataaatcatcacgcatgaatcctgcccttttcctggaacattttgcccaatcttaaatatcaactcctaccctaaactgaaagttcacatacttcatttcacagaccatagccacagtggcaggttacttcatgtgaaatgacaggatgtacaatatgactttcttaaaaattacttcctttatcctctatttaaatgtgtactttcatacttgtcagcctacatagtgtttcttcaataacctcaactcgaatccagccaaatccagcatccacctaaacttccaaggaggaggttccagagtctcttctagacagagcctcctgaggcccacgcctccatttccacagtctgaatctgagctcctgctctctctacatgacatctttaccttcatcttgcattctcaatatcacagacaaaaacccgagccaaggcaacaatcaaattgtcttctatttctttctacttgccctgttcttaccctgcttgcaaagtgcctccccaatatttaggggcctgctcctctctgcccaaccacctctagtccctctatttacctgtctacccttcacagccagagttgctgtttcaaaatacagatattaccacttgtttgcttacaaccttctatggctccccatttcacaaggaataaaaaccccaaccccttagcttggtatttaaggccatctgcaaggaaactacggtctaactttccaaagttaaccttcacaccatgcttttcacctctctaccttacgttttagtcatatctcccatatttcctcaaactcaaaacatcatcataccttggcaaaaacagttcccttcagtttgaatgctctcctctcccatgcatatttcaacatcgatttcaagtgagaaacagtataattttgtgataagacaccagaatttggcttcaggcaacctggttcaaatccaagggctaccattttcttgtcatcaaatcttaagcaaggtgcttaaacctgaacagaaagcctcagtttcttcatatctatacaaagaggaagataacagcctctatattgcagggttgtggagagaactaaatgagttaaagcacagaaagcacttaacacagccctttgtacttattaggcattcatattagctattattgttatggaccttcaagtcatcatcattattatccacctcaagatttttctgccacatcaattggaattaatacctttcttctcttatcctctctccagcatgctctccatggctctacatataataattgtcaaactgtgacacatatgatagttatttatggctgccttacttcacagggaggaatatattccataaacagttgttggcacaaaaccacatcttaatcatcagcagtgatggttgtctacccagtgctttgcatttttttcccctcagttatgccatcattcattcatgtcttccaaatctacaatcatttaggcctgcaacctggacagtagattaaagtcctcacttccccatttatgtacaccaatattcactaaacctttcagagtctactcccttaacacattataacctgaccctctccagcccagttggcattactttggtgagctgttgttcacaaagagtattataattgtttctaactacagatttttaatcaaagtagcctcccaaaacaacacttctgatcacccctgtgagaacacctaccaccctgaaattgtctgcttattcatctgcattaccaactaaataccaaacttcttgcacgcaggaaacctcttttgttcaaagtgagtagcttggtgcctggcatgcagtaggctatcaaaaagcacatgttgcaaaaatgagtgcatcattacattccattacaactctgtctgcttaggttgaaactgtatccttagaaatgctccaaatatggattgtaggccacaccaatatagctctgaggttgggtcaaggggttaggaattcctcagggggtttaggaatcctgttccactagcttctgtgggagacatacaggccagcaaaagtagggaaagagacaggcccagagacaggatgggaccaggagaaacaatgtgagatcatctctcttctctagggcatgattgtcaggtcagttcaatgttgattgcaacctcatccttgtgttcaggggcaacacagtccatgcagaaaaacctatctacagctatgatgggtattgtcacgcaccacccagatctccttcagtaagatataactgatttcccagctactgagagggtggctgactctgatgcatattcctttggctgaagagagcctccttacccaaagtcattccccttcccaagcaacccacgtccagtgattggttcatgccaaggtataaaggcccagccccgtcacccaacttggaacaactctgaagggctaccaagtttcactgctctttaaatgttagcagagacatttactgagactccatcacagtccaacttctccctctatccacactccacacctgcttccttcccattcctaccacagacagctatctgagtaaacctcctgcttactacactgtctcagaatctgctttctagagcgcctaacctgtaacagcctgagataaagcatatagaatggaattttaagacagcacacatcataacccaaaggttggtccctagaactgttttgtgtggaattcatgggggtaaaacactgtgaactagttgccaacattaaaaaataattttcaaaaagccaaagctctggcaagaatgggctggtatttgctcatggcactgaacagctgtagttgagggatagtgttccatcttgatggctctcactggctacactgtgtgacagtccctactggcacccttcatttatttccttacctgcccaaccctgagggcatttgagctgatggttcatgactgatgccaggattcccatccctaacctcaaggcaggctacttccttgattagcctactgcttccctcaacaatttatatctctcatctgacttttcccacaaaatgtactctctgtgggctggttctgtgtagtagtaatcttggtagctctaccctagcagatgctctaggttggtggacatagcagctgttctaatcatgcttgctaagtgaataaaattttaatagaaaactcccatctctactttgtgataactgagtagtatctattcttctgcaatattctgaaggagactgtgtgactatttggatgtttgaagatgttttcctgacgcacagaaagaagctgatctctccttcgcagaaagcatagccagcagtgtgttttcaaggtgtagggatgaatacagatttttggagtggttgaaaccccaggggtagtaagtagctcatatcatagaattcctttactgactgaagtccccaagagcaaatccctggagaacttagcaatgcagagcaggtcttggctgtgctgccggtgtgtaggtaaatggcttaagtaattgctgtccttgggcagtcagtcaaaacgcaagagttgagactataaaagggcaagtgctcccacagagtaaaaattataaactattgttagacagaataatatgtgactgctgacatttcaccttttattattatagcaacgctttaagaaagaaatgtagttaaggttgtcagaatttcattttaaccccctccttcaaggctgttaaaaattcactcatgctgaaacttgcctttcaggttctcagcgagatttgtgctttgtttttaatctgttgttctctaatggaatgcaaaatgtaatttgggggaaagggtttttccaaggatctttctacaaactgcttcctatctcaattccccccctttttttttgtctgccccattctctgccaaaaggttagctgtaacaacaaaaacaacccaaaagatacactcaactgacagaggattaaaggcttttggcagtgcttataaaaatagcttcagcaataagcaatactcaacaagcaggaatctgttcagtggcagtcactaaaggcaaccacagtcttgaagtgccataaatgtccacaagagatgcagttgaatcaacaggtatttgtggagcactcactgaataaaaggtagccaatgacagtataaaaatgtcttcgtaggtgtgacagaggggacaatctgctaggaaggaggaaccagagatgtctcaaggctatatttgtatagcaaacccactgctttagaccatgtgctcttggtactcaaagctccccatacccctacccataagccatctcccactgatgacaacatgccagaggaagggggaaaaaggcaatgattcattgatcagctactaggtgctaggcagaatgctaggcactttataattataaggtactgtgaagatataaagaggcatgagccctctcccaatccccactctccagctgaaacacactttaggtatattcaccggagcataagtggttttcgaacactcctatgcttgctttgcttatcttaaactaaagcagctgtccagctagacttactatgttgatcagcacatgacatatcagcatatataatatttacttttgtagacatcccgccagctctttgataaatgtgttaggtcttgcatgtgccatcattcccattatagtaatcccacaacttgggaaaatgctataattagccttttattattataagcatttctgtaacactttccatttaaagatggcttaacaaccaactctactctgtatgtctcacaaggaatcagataagtcaacacttggtagctttgctttatggccttgaatcctcaggttcaaggttcaaagaaatcaagagttattgtagtcagctcagacttaagaccaacacagctgttttctttttagccagcctctcagcctgatgcccagctgcttcccaatctttactttgtaaaaaaaaaaaaaatatatatatatatataatattatttttaaattcttggaattaaaaactcataggtagaatattggccccaattctccatttttagtatgaataactcacatcttgggcttttgccaggtattgctgggatgattttggcagatctaaggcagccctgcagacaatttccctcagctggtgaaaaagcaaagctgaatcttttcagggtccatttctcccagcctgcatcacaggcagagtgcaggtgcactgtgcagtctggcagaaggagcagtggtgcccttgggacaggtgagcaggggaagcaggttggtcttgggaaacttctttggagagcaatatggctgctcagggatgtgcatcatggccacaagaaggtaagacccaggtggttctggtttctcagtatggaacatttagccactgttttagaacatgggtggtaaaatatggtcaaaagcataaaagaataattataattcagctacagaaaaggtcttgtggagagttgtctctttctccttagagtcaccttgttttatctaccagtcttgaatcatgctgtcatcccacatttgtggcaatgaaaacgtttactctcctacatcatcatctcataatctttatgatacttgctattaaatctggagacagttattccttgttaaacttagttttgaaactagaatcttcatggctccatagtatatgtgtaatgattgttcaaaatattttatttttaaacaatggtaaatgttgctaataatatttctgccagtaccaagaaagacacttatctcagtttagaatatacgtataaacagggcattcatttccatttaaattccaaacctaattaatttctattattctgtttactcctctttaagcttattgggtcagctggtccgtcctccattttcaaaatcgaatacttcctctgtcctctccttttcccccaaatacaactgccccatcattgtcatcatcatcaccattattgcttgagcactttccatgtgccagaaactgtcctcagaattctacatgtactaactgacttactcttcgtagcggtaatgggaattattatggttcacatcttagagatgtggatcctggcacacagagaggctacataattcgcacagggcagccatgctgaaattggcatgctcacaatctggctccaaagcaacgctactttcttctgtgttctactgccctcatggtggcgaccccgctgagaattttgccatttccaaagcacttttatgtgcatctttttattgaatcttacaactacacataaggttttgtttaaactggaaaccaccattatattacttccaagtctggggaaaatatttaacattttattatggtttaatttactgagggtttggctatttttttcccagatgaaaattctaggttttatcgagaattctgtttttctattgatgttgatacatatttttggggtatatgtgatattttgatacctgtagacaatgtgtaataatcaagttggggtaattgagatatccatcacctcaaaggtttatattttctttgtgatgggtacattacaactcttctacctatttaaaaatatacaataagctattgttaactataatttccctgctattctatcaaacactaggacttattccttctatataactgtatttttgcaccccttaaccaacttaagtaaaactatggacttcacctaaaaaatttaaagttatattcaactgtaagtcatcctcaaattactcttcatggattcttttctcccatgataaagccaagtcctacacttctcaaggggatgtgttgacctcagcagaaacggggagtgtatttaaatgtcttaggctataactgactgcatttcaaaatcaagtattttagtctttacatagttatagttatatgagtaacatttgtacttatatgtttagatttatatataccaggccaaattcctgaaaggattttcatagatttagaacatatactgcttggaatttatatgtacctctattctcctcttttgatatggggaataagtactttattctactttttattatctctatttatacccagaaagttttttaaaaggacatatataataatgtgacctaataaaaataaatgctattgaattaatttccctttttcatgcttacttgtttgtagttttcaaatgtgttgttcccaatttttgacacatcatcaagcagacttctgagtttttttctgtggaaaacaactggacttagttccatacaaatacaaataacacagatgtcactaattgaatctatacattgtccttggaaggaagtccttccctgccttgcttgttattttacatcataatctgcagaacatttcagggaggcccatgaaagagaagatcagttatttttatatcatggcaatggaagtccttaagacgactgaatacccactatcactcaaagaaccatgccagatcccatcactccttgcagtaacttctgctgaacagagttttacacactcgtcttgctcaaagcctttttccagtcacataaatactcctgctgaacaattaacctttcacagaaaagtagctgaggggagtttgggcttaggttcagcttcttggcccataaatatctgcataaacaagttctaggggcacctgggagaggtcagggcacagaccaaggtcacaatacattccattgcttaacctaaccaaatgacatagaccaagaaagcgtttccaaaaacaggcagctacatttcatccttgcatattcacagtaaagaaaataaatacctgctgttttaaacagctgggtacttcactgaaatgctgacgtatcagcaaagtcatggacagtagcaatgttttacttaaggtggcaggaagaccccaaaaggtgaggtcctatcctctgccaaagaatgaagactttacaaccacttaaggaacagaataatgtaggagatggatctgatgtgtccagtggtaaatccaatgtccatttttgctaatggccttttaaaatctttgaattcaagactgaaaaaatgaggtttgaaactgggggtccaccatatctcctttggtattgaaagggagggaggaataaaatatattgagctcccaacttggtccaggaattttacatttgtttttctcagttaatcccacaatgatcttcaatagatatttttatttctatatcatagaaagggaagataaggctcaaagaagttaaacaattcactgaaaataatcgaggttgtgtggtggggccaggatttgaactcagatctataaaattctgtgcctattttccttgcttgtttcttgaggtaaaagagtatttgcccagagcctttatgggatgtgagagaagtttcaacatagtctcttagagtatatattaatgtgcccctcttaagccaggagtgcagaaggacattagagaagtacagaggccatttgtgaaagacaaatctacctgagtgagagccagtacttttagagctaaagagaggaaagaacttgacttattccttgacttgggctctccatctggtggcctggctgatgagggtttccctacttcctggggaactgtttctaatcctacctgccacctccctacagcagcacagaacattgggtatggatcatacatctctactttggactttttggagggatgcttcgtctgcttttaagcagtttcagagaagaaaatgtcataaccttcctagaagtaacttctgactcaaaaatttcaggaagggtctttcctcactcaaacaggcaggagcagaaagcaatgaaacatcatcaaatagcaccacagcattcagcaaggcacttcctgactcacaggtcacacactgtagtttaaatgtatttgtgtggattcgtgcaataaaggaagaacaattcctttgaaaacctttaatgcctgatatcacgcttcacttaattcctaagtgtccccctgcaagcagagaaacctcagcttactaaatagagactatgtaaatgtgtttgttggtagctccaagtgtgtgtttagactttataccagtgtatagacactctggcagagagcagaaggaagctggaactctctggaaatttattattggcatagatgcctcatgagccatgccccatgaagtttgtcacattgatgaggaggctattttaaaaactcactctagaatatccacatgcagaagaatgaagctggaacccttcctcatgtcatatggaaaaattaactcaaaatggattataaacctaaatgtaagggctaaaactataaaactcctagaagaaaatacaggagaaaaatttcatgaccttgggttatgcaaagctttttttagatatgacaccagaagcacaagcaacaaagaaaatataaaatttgacttcttcaaaattaaaacttttgtgcttcagtgaaggccttcaagaaagtgaaaagacaacccacagaagagaagaatatatttgaaaatcatatatcttataagaaatctgtatctaaaatacgtaaaggactattataactcaataatgataaaacgaataatccaattggaaaataggcaaaggatctaaattagaagtttctccaaagatgataaacaagtgggcaaaaagcacataaaaagacgttcaacttgatttgcagtacacgcaaatcaaaactacagcgatataccatttcacacccactagaatggctatcatcaaaacaagataaaaacaagtgttggcaaggatgtagagaaattggaacccttatatgctggtgaagggaatgcaaatggcgcaaccactttggaaaacagtctggcagtttctccaatagttaaacataaagctaccatatgatccagcaattatactcctagatatatatccaagataaatgaaaatgtatgcccacaaaaaaacttgtacatgaatgtttatagcagtattattcataatagccaaaaagttagagcaactcaaatatccaccaactggtgaatgggtaaacaaaatgtagaattatatggttccgtttatatggaatatccagaatgggcaactgtatacagacagaaagtagataagtagttgcctagaggtagagtgggagaaatggggactgactgctagtggatttctttttgaggtgatgaaaatgtaaaattgattgtggtgatggtgacacaattctgtgaatacactaaaaaccattgaatgtacacttttaatgagtgaatagtatggtatgtgaattgtatctccacaaggcatatatatatatataggcatatatatattttttctatatatacacacacccacatacctcactatagaccttagttctcagctacggctgccccttaaaatcatctggggcatttctcaaatcccaatgcctgggccataccctagaccagttatatcagaatctctgtgggtagaacccagacattttttctttgtgcaggtgattacaacgtttggccaacggtgaaaacactgagttcctttcaaggggtaaaatgccacagtattcacttcactctgtgggtgtttctgcctagtgtttcaatagatgacatctttgaagtgaggtgttgcctccaactcttgccagttttcactgtgatgctaattgtcacctgcagggccactctatagtagagaccaacacttgtgagaagacactgcacctcctttcctggaaagaaactatgcaccactgggtgagcgctctaaactagggcctccgatttcctctgttttcacaagtaacctgtgtgtttaggcttccatggctctttctttgaaatctttgtaaagcagtgttcaaaaaggtgttttgaaataaaatgcacagaaccaaagcatttatctaattacttgaggagtttcactttggttcttttcgtttaaaatcccaaagtttcacaactataaatttaatgctgggaaaatgcaatgcattggatacaacgaaagtggaagctgtgtctagtgctttcctggctatcaataccagatataaaaatgttgaatgaccaactgcattcttttaaaaaatttaccagttctttttttgctattcttaagcacaattggaaattcaaataccagtttatgtgacttaagaaatgaaaacagtatgctccccagtctaaaagtcaggacccagggaaacaattagaactcagcatagatattatcatttaaattcagtttagtgacataaaaagacaaaatattttaaaacattcagatgttgttaatataataaaaagtcagctctgatgaatttttaaacaagtggaataaaacattatgaactgagggcaaaaagagcatcttggaagattacaaacactgggtttgcaagagaaaaattttgaagattagtttgaaatagacaccccagaggggcccatcaaaacaaattattgccattgatgtgatatgtaacttggccatatagttgcttagagatttgctccaagtttctgaaaccagactcataacataaaactccatcatccatcagcacatacctaaaaaacgttttttccgtcttttgctctttcatcctttagcacacaatattgtgtaagccaagaagccatatgttccttgcagtcacagagtaatttttattagcattaacatagacaatcaagctggcccctgcatgaatgcacatcttagcacctttagcaagtcttttttttttttttttctgagatagagtgtcacactgtcgcccaggctggagtgcagtggtgctatctgcctcctgggttcaagcgattctcctgcctcagcctcccaagtagttgagattacaggcacctgccaccacacctggctaatttttttgtatttttagtagagacggggtttcactatgttggtcaggctggtttcaaactcctgaccttgtgatccacccacctcggccttctcaaagagggaagtggagctcatctggtcagaacaaaccagctgctgagggaaacagcccacataacacatagagagaaatccctctactggtggcgtcagaccgaagaattctctctagttgtcaagctattgtaattgtagcctctgcaagaaagtaaaaatatacaacaaaacaataattcaaagccaaaagtatcttctatcttatactataactgcttatgtatcaatggacataatgatgttgaatagacagactgaaaatacttggtaaataccagtaattaactctcattttttaaaaaaatggattgaggtggggcaaagaagcatagaagagggaaaatgtgggcaatcagaaacctaggtcattgaaaatgaccccaaaagatctaattaaactaaagaactgctgcacagcaaaagaaagtaccatcagagtgaacaggcaacctacagaatgggagaaaacttttgcaatctactcatctgacaaagggctaatatccagaatctacaaagaactcaaacaaatttacaagaaaaaaacaaccccatcaacaagtgggcgaaggatatgaacagacacttttcaaaggaagacacttatgcagccaacagacacatgaaaaaatgctcatcatcactggccatcaaagaaatgcaaatcaaaaccacaatgagataccatctcacaccagttagaatggcgatcattaaaaagtcaggaaacaacaggtgctggagaggatgtggagaaaaaggaagacttttacactgttggtgggactgtaaactagttcaaccattgtggaagtcagtgtggcgattcctcagggatctagaactagaaataccatttgacccagccatcccattactgggtatatacccaaaggattataaatcatgctgctgtaaagacacatgcacacgtaagtttattgcggcactattcacaatagcaaagacttggaaccaacccaaatgtccaacaatgatagactggattaagaaaatgtggcacatatacaccatggaatactatgcagccataaaaaatgatgagttcatgtcctttgtagggagatggatgaagctggataccatcattctcagcaaactatcgcaaggacaaaaaaccaaacaccgtatgttctcactcataggtgggaattgaacaatgagaacacttggacacaggaaggggaacatcacacaccggggcctgttgtggggtggggggagtggggagggatagcattaggagatatacctcatgtaaatgatgagttaatgggtgcagcacaccaacatggcacatgtatacatatataacaaacctgcacgttgtgcacatgtaccctagaacataaagtataattaaaaaaaaaaaaagaaaatgaccccaaaagtccacatatataattgtgtcaaaattatgcctccctcagtctacctgaagggcataatggtgacaaaagtgaccaatttgaggttataattccttttttcttttcaaccaacagatgaactgggaaaaaatgtattaccaaaaggcagcactagctatatgatttatctggcccagagcaaaatgaaaattcagggccctgtttaggaataatgagaattgtaagatggtgacagcactgcattaaaccaagtacagagcccctctgagcttgaggccctgtgtgactgtgcaggttgcagtccttgaagctggccctgtcaaaaggtaacaaataaggaaggcacgggtctgtgtaaccctcatacgatcttctagctagtttagcttctcttggaaaaatttacatatttacagactcttctggctgaaaaacagcttaagaatgacctatgtcactttctcatttatagaaacaaacacccagagaaattaaatgacttgtctaaggtcacgcattgaatacagagccagaaccatatcccaggtgtgctgactctacactgacattcttttccttataccacattcttggtctccagttgaatgtaaataatcagaaaatattaactaccaaaaaaggaggggaagaaggtaggggaggacgttacctcaccagaacttttttctctcaactcttctgctcaaagaataaaatgcagttataaaaactgttttcaaattccttttctgagtcaacacttccaagtcctggggtgaagacaccaaatgacggcttcaaacactgaagcaaattctctttgctgagagtttgcttgagccctaggagttaatgaccataggccaaggtggttattagtggataggcaacacgttagtaaactaatcagtgttcctgtacaaatatttaaaataattccaagataatttgaacttcaatactgagctagccaaacacatttgtaatctgaacccaaggttctaatgagttactgccttttggatgtccttcaatgtgagggacatttttagaaagattaccactttagtggaaacaaagcctgatattttaaatgtaaacatgagacctagattttttttatgcaaaacaaaatgcatctcctttcccaactcaggtatgtgtacaaatttagtacatcaaaatatctgttgcaaggacacagtcattgaatgataccacacaaattaaacataaatgaaacagcaaaagcttatgaaaaacactcaaaaagagttcaaggtagactggcaatagcatgatgcaatgaaaaaaacaccttgcaggaaggcaaaagacaggcgtccaactccttcaaacgaggcacagtgctactagctgtagggccagacagatctccaggttgaatcgtaggtctatatatatttcattgttgtaagccatggctaattcaccagcaaaatggggttgatcctaaagctaaatggctagatcagatgcttactaaatgtctctgtaaactctgaaatccgtgattcatatacctttaattttaccttattgagttgcccctcagaactttcactgggggactaaaattagctttgcaagtccaacactttccacaacttcatgctctgtaagtagtaataagaaaaaacaaaatattatctggcttggatagatttttggcataattacaggtctggtgtttggaaaatgagggccagatgaaaatggtgcagagacatgaataacccaaagtgtctgagactacagtacttacatctcattaaccaccaattatcacattcataatttaacacaaagaggaaaacacaaacgagcttttaaaaaaaaagtccatcccttttatatagacttcagtttacacctggcctctaaaggcacgattaatgcactaggttgagaaagggagtagttagattaagcaataaaaacacttttgataacatgtgaggctataaaaatggctgggctaaagctattagccaaagataaataataccctgcaggaggaaaagaaacagctttttctggatcataaggtctggcatgtttttaaagaccttgctttcactgaaaatgtaatatatccatttaaagagactttttttgcattcaaaagattatctcatgttcaagagctttgtcaaaacatgggaggaaaaatactccctagttatttattttatttcgttattgattttactattatcactaggtcttttattattattgctttctaaggattaccactactactagcaatgctgttactgctactgcttccacgtctatcaataactctgcctagcctcctaatgaggatatagttttaagtttagtgttcttactgcatttctaaattgcagtgaataacattttatgactcaacccccttgtgtcccaggctggctctccacagtgagtctgatttgcgctacttcagtgtggtccctggaccagcagtttccctaacacttgggagtttattttagatgcagatttctggctccttgtcagacctacagaataagacgctctagggtagggggataaatatgtgtttaaaaaagctcacccaaagattctgatgcacaaatttgagaagctctgctcaatagaggaagtggcccaggtgttagagaagaaagagggctgggagagaactgaggatgaacacctgagctaccacctgcaggctttaccttgtctgctacagggcaggctgccaaagccaaggaaaagaaagcaaagtctgaggcagattaagccaaggagaagaaagtaaagtctgggacaggtttttagaaaacagagctctgcccccaaccccaccatcaggatgttacagaggctcctgccctcagctttggccgacacaaggagaggcaccagtagaacttttccccagccactgtttgattcttttgcctgcagaatattgaaaattacaagactccttatggttcatcaatgtaggcatatcagatcaaattagtttctaaattagtatttcttaatatgtgaggtttatgcatttcagggtgtcattgatccccaatctgaccaaatcaacaccttgaggggttgccacaagctctctaatgcatctgtgcactgtcaaatttgggaactgctgttctacttttttggtctgatttgacacttaatttgggatgaggtttcaaaatattcaccaacccttctttcttccttttttttttttttttggtaacaacatatttcctcaataacaaaagtagaaaataaaaaacacaaagaagaaaattaaaatttcctatcactcattttgataaaatataaaatgtatcaattaaacacaattaggatatacaatgactacattatcatcaactaaaagatactaccatttatttaactaattacctatcattaaacatctagaagctgttatccaggttctcagttttataaataatgatggccaaatgaccattatggtcaactcttataatttttgacccagaaatgtcaactccgcctttttatgaagtatttgatacgcactgccaaattatctccagaaagacagtaccaggttagaaccacaccatgctgtaaattgataaagccatgttggagacaacttgacaatatagatagaacaattgatcacctagagtgaccttatttaaagaaatatttaaaatagtaaaaatttggaaacaatctaaatattcgttaatccaggaattcatatatttgtcacacagcaataaattcatacatttgtcacacagcaagaaaaatatatgagctagatctatacataacaacatagatctctgaaaaacagaatgtcataacattgagtgaaaaaatcttggtaaaagcatacatacagaatggaatcatttatgtaaaattttttcaaaacaaaataaaaatatactgttgtggatctttacatacataggggaagtacaaaatcatgtacagaaagaatactcttacttcaacataacggttaatctctgcaaaaggagactagggaagagatgtaggagttttagctggatccataatattaattttattaacaaacaattttggagcaaataagataaaacgttaacatttctcaaatctaggacacagttctcaatgtatccgagaaattctgggggactccaagcctcttgtaggatatctgtgaggccaaaattattttcataatactactaaggcattactttttcactgtgttgacatttgcactgttggtaaaagcagtaaggagtaaatctgtggcacgaatcaaggtagcggcagcacctgaacacgtagtcattatatgtctcgcaccatacaattgcagaaaaacaaaataagccagttccacttaaaaatgtccttgattaaacagtaaaaattattttaattaaatctcaaccattaagcacaaaattttccaagtgacgaaagggcaagtatacatatggcactgctgttgcagatagaagtttgagggttgtcttgaggaaaagcacttgtgtgactgattaactgtaagctgaactacctgctttcttcatataacataatttagtttttcttgaaagagtcactgagaaacaaactttgattttcagacttgggtgtttcactttttctcaaaagtgaataaagagtctgtcacttcaacaaaaacaactgaaagtatttgtcgccaatgataaaattcaagctttcaaatgaaaattagaattttggaaaattcatatataccatcgtgggcttgatagattcccatagttaaagactttactcagatctgtggagatgtaataaatagaatcctgaatattgtactatataatgaaatgtgtctacatctggaagatctgcataactcagtgaaccaatatttttaaatcaatgcatggtattacaaaatcatgcatgagtaaaagatccattgaaagtgcaagataaacaaatggattttaatgtaacagggtacaaaaagttcagtgatagggtttcaaactccatattgcaactgtccttgaagaatctacaacttgttgagttttggtgtagtatcaaagcagaattttcacacttatcataaaaggctaataaaatactcttcctttttacaatgccataactgtttgcggattaattttcttcacatacttcaacaaaaaagcataccacaatagaatgaaagcaaaatgagaatagatatgagaattcagttgacttctattaggccagacatgcaaaattgtaaacaatgctgctcttctcaatcattttttgtttttgttatttttcctttgcaaaaatttaactattgtcatgaaaaatgttatttatggcaacatataaagaatttattattactactttaaatgaattaacaaatattttaaatgtttctcttgtaatttctaatgtggtaaagaaacattagaaacattaataaacacaatttctttggagttctcaacaatttttaagaataagatcaaataatttgaggactgccaatccagggctagacagatctccttatattattttctaattaattaatttcttatttatgtatataactaaaataaaagtaaaaaagcctaccagcagcatatgaggctatgcattagtctataaccttaccaaacctaagaatgatcattaaagaaaaaacaagcagaccttgtgaatccaagagtaaccaaatgttttatcatgattttaatttgcctctttcactgtgtgagtttgaacaattttatatgtttactggtgactttagtttctgttttcgtgggttgttttcttttatttattcacttgttcattcagcatatatttgttgagcatcctgtttctcaacaagcctcatgttgagcatgcttgcttttaagtgtatctggaatataggcagcaaacatgtcacaggtctattgcaggcgttggcacgctatattctgtgggccaaatttggaccacttcctattttcacaaataaagttttactgtaacacagtcatgactgtttgtttacagactgtctatggccgcttttgaattacaaggacagagtttagtagtagcaaaatagactgtggcacctgcaaaatcaaaagtattaactatttgccctttacagaaaaagtttgtgggcctttggtctattggattcataggaatccagtgtctttactacatatttgtaatactactttatatatttaaaaattatgtcttgtagatgttttcccattgcatttgtagccatttaattttgtttacagtttttttcattgtatacagctttgtatattatgtagcaacttgatcaagtcttttcttttgatataattattcttaacctttttggaacattgattactttaataattcattgactattttgcttttttttcttccacatgaatttttaaagtattttgtcacattactgaacgaatcgcccagtaatttttatttcagttgcattaaattgttggattactttggggagatttatatttctaaaatattgattctttctgtcaattagtatagaatattttcttattaaatgtcatcttccaaattattttatatatattttaaagtggtcttataaatttctttttatatttagtcctagttattttctattttagagttgctaatgtgatatgtgttttttgtttattttctaattgattatgactaacaagtacactttgatttttaagtagatactatattaaatgcttgacagttttaatagcttttttcagttgattcttttaaattttcagtacagacaaatggagatttgtttcacttccctaatcacatgaccttttttccttgtcattatatttgctagacttttgagaaaaattatcattaatttatattccttcttatttctcattttgaaatatatagagaattttataattaagtggatatttaatcttttaaaaaagaatcttttaaaactaattaaccttctatgtttgttacattaagagtttttatcagcaattatattaaatcaagtactttggtcacctataaaaatgatagaaattttctcatttaacctattgatagcatctattgtaacagcagatttctctagtagtaaaaatttcttgcatttttaagaatccgctcttgtggtcatggtttgttattgtttataatgtctgcaagactaaatttgccagaattttacttggaatttttttaacttgtgagtttgatttataagggtttggtatcatctttgttaggtttgcttgtactcttaaaaaaaaaaagaaattgagatagtcacatgtttttctatccctagaatagtttagagctgttaagatgatatacttaggcaaattataaataacaaagtgagatacataaaataagattaaaaatgagatttggtataaatgtactccactaaataatagagagagacatcacaatcatgcagttgaaaacagcaacaaaacaattggaatcagatttagattttaatttcttggtaagtggggcaacagtgaagtgccatccaaccatctacataacaggtgaatatgtaaaagaataaggttctcctgcaattgagctaattaagttaacacttctaggtctatgggaatagccactggaccaagaccaattatggagcttaatccatgatattagcacatccaaagaaagaaaaggtcaacttctggggcatggccactttagataaactgaactgagaaaacaaactttggcagtgggtattgggcactgtccacaagaagaaaacacagagctcaagagctagaagcatccagttatgaaaaacgtgtcctctagcgatggcataggcatttctccaggccccaccatgccctggagaaatgtccctcaggaatacgaccctttgctgattccatgtacatgtcaactttctgtttatgaattccgcaattgctgctgatcctgggaaaggttgtgggaggtgcctagatccacagattgcaaacatttttttttccggtaagaaatatcacccatatattttcatgcgcgattcattcccaaacatattttcaggggatgtgtatataataccagacctaccagctgacactgcacttctttatgatttgcaattctagtgagttagtgtgacatttttaaaaggataatttcaaatccattttaatttgtaaaagaatgaaataattagctgatttcagtactttgaacattagaaacaaattgcatacaagagaccttgctgctcatggcaacctattcatatgaatctagaccctcttactgggtcattgagaactgttgcgttggataatctcaaaggcattttcattctatgaactgatgtgccattttgtctctttgtaacttcctagcatggtataggaggatttcttagaggagttatcatttggccaccatttacttttctctttactcttgtctattagccaaggtaccaaaggatacagaaataattgtaattctcatctttggtgaaatttgctagtgacgatcaactgctctatcttgagcactcatgagggaattcatggataaaatatatcgaaaatatttgactcataaacaagttattcgtatgaatgaggtccatctttaaagttatgccttttcatatgattaaaaagtatgccatcttttaaaaagtacagctagaaataaatattaaaaggagaaaatgaatacaataaacattctgtcagattgaacaactgaatttgctaatactattttttgatgaatgatagacatattttgatctatagggcagaaaccatcaaataccagcagttttatctaacatgtctcaaccattaaaggtttgtcagcttattttctcttagaagtgaatagaaatatatccatcaatttaccaatgacaagaaaatcagactgaaacaaattggtcttatttttcactcaattattcagacataacgctctgagaagggagtaacatttgtttcatgatttgctgtcatttggcttctcttcctgcatcagaatgaatgaaacaatattgtaccattctgctgttgtgatcacaccaaatttcgacatatgtttagtatttggctctaagtgccactatgtcaccaggttcacacttggatccatacttgagtacaagtgtgagcacgtgcatgagcatgtgtgtgagctggtatgcaatcatatttggacatttgtttcctgctaacagaaacccaagcatatgtttgagaccaaagctttcctttttgacagattttctgtgattagatgcattaagaaatacaatcagcattaaaaattaaaggaggtgtgtatttgtaaacatcaactgtgattatggcaaagacctttacatcaactaaaatgtgtctgctggagtcacaatccaaccaacaagacacattttcatttactttataacacagttcaaatcattacagaagaaaaaaaatcctttccataaaaaaataaaaatggtgaaataacacagggcttatttgaacattaaactatactctataaaaatgtcagcctaactggattacttccatcaatgctgcaaaaatggaatcagcaaatgagattttgatggtggcagttgaaaaaaatttttttggtatttcattcttatggtttatgaggttactaaaaccctcaatgtaattacagtttgacactttctatcattttttatttatagtcttctaaaggaagtggtggaaattccattcttcaaaacatcagtgaacatgttttaggtacccgaaatgtcatagggagtgaaatacgatgactcaaaacatgaaccaatccctgactacagatttaaacgcatgaaaactaaagataaaggccccactgtaagttaaatttgcacagacaggctccactctataggagtcttggtttggttgatatgaaagatatttgggtatcatttttatttgttttaaatcaagtatgatgaacaaataaaattatgttattattggaaataaaaaataatgcaaaccctttgtgataatgacttctgggaggcaatatagcatagcagttaagaatatgggctctggattcatacagaactaagtcacattctggctctgtcatgtgttagtatcagctgtattatcctgggcctctgactaacttctacccctcagtttccttagctgtacaaggagaattacagtagctagtgtatgccatatggccactgtaaaattaaatgaattaaatgaactaatccatgaaagtgcttagcacagtgcctgacacacagaaacacttgaaaaatattaggatttttaaaaagaggagaacatcatgcattttgaaacaagagattctgaacacaatactaacaaacaagcagttgggaaaatgtggtacccatgcagctacaactgtagaaaataatgtaaaaaatacccctgaaagccaggattccatatgttcctgaactcactgggtaagaaacagtccatggaaatatctgtagacattcctgcattcaaggctcaatctgtctggtttacctattgctattcattcagattatttcaatgtgttaagcagacctttgatgaggtgaggtaaatgccaatttctaaaagctattttctccataggctatgaaagttgattgcattttgatgaatacattttgaatagaagagcctgaaactgaatatctattcattaccagaatatactaccaacactgctggtaaaattcctatgcctttcttgataagccagaagaaaaatttagaaagcagtgagaaaggaaaatcattagaaaaataatattaacctccagaagctccctactgggaaaatgtggcttgggattggatgagtatgatcaaaattcaaagaccaggggtaaatagaaagaagcaaatgtgtcttcattctgaaattgagactataaaccaaattggcctagtttcatgggtctccattgaattccatgcagtaggtcagcagcaaaaatgcaaatattccaaaagcagaattgagtacaatctttggaataaaaaatagatgcagagagccgtatttccaaggtggctacattttgtataacacatacattaatattaggaaaatttgtcccagggatccctgtaaatacccctttgacaataaaaaacaaattttaaatgcaagtaaaattcagtctccatttcaacacttatacaagtcttcccatttcaatgaagaaaattacctgatgagccattatatttacataatggcaggcaaatttatgctcatttgacccattcctttaagtgaactattaggaaataatttcatgagtggacaaaatgtacttacttcaaatgcatggttaatactgcaaattcaaaagcaaagtaaaagttatttaaataccttctaaaactgcagctatcctatttgttaattcacaacaaaatttttaacaaaaaagtctttgcctgaatgatctatgttggctataaagggagctctgatttagagagtactcttcattatgtgtttctgcagtgaattggtgtaggaatataatgcggatggttcatcatcatcaaagagatatgacctttacttgtccaggctaaatggtcctgggagtgctgagtcggcaacattctctgttctcctctttcttttgaccattggctgagtgtggtggctggggttagcagtgcagtctgctgctgtgaagctggctttttcttctgtgaagctaattgaaactgcaacattggcctcattatcatcttgtaaaacccctctgagctaactggctcagacagccatggttatatgctaaagtcaaaggcaagatgattcatagaatgacggtcttaaaatttgggccattttctcaatatcaaaaaatattagattaaaattcagggcataattcatttgcatgtaccaatatggttatcaaatcgacaacttttcaaatttaccatcaacataggttaagtagggacaggtgagccaaaagagatctctgagatgttttactttgagcaatcataatgtcactgttcttactatggtcatatttaaatcacatggcaaagcagaatgccctggggttaatttttgtgagcccaatgatagtggaccattgtgcaattaattggaaggctcgagatctaccctgattgtattactaatattataaataataataataaatgaataaaagttaaatttattacgctacatgctgcctgactacttttatctgaatcaataactctcagtggggacagttttgtcccacaagagacatttggcaatacctgggaacattttttggttgtcacactaggggtggggatggggatggagaaagaggatggtgctactggaaactagtgggggatgttactaagcatcctacaatgtgtaggatacaacagagaattatttaaccccatatatcaacagtgccaaggttgagaaaccctgatctaaataaccaaatcagaatgcagggatctgatcagctgagtagcatcgggtcattactgtggctgagggagaaagaaatcagcaccctgaaagagtttgtgtcaaatcaagttttcaggacgtttctaaatacagtatattatttagcaatgaatttggagataggataggtgcaggagagggaaagatataaacatgacatgtacagagtactccattatgagttattaaaaaatattagtgctaatttatagcaataaaggctgatattaattattggcaagataatccatatgctagctaatttgcttttataacatggatgacagcattttatttaaacaaaagtcttatctgatttagagacaaatgagaacttcatgacctgatttgcttatatattaaaacatagcttaaaatttcaataattttagtctctcatattggccaaaaatagatagatgtgataaaatacatgtcttccaaataaaccccagtttatatgagaagctttaaaaaattacaaagaagtcatcacaaatcaacagtaaagagatggattactcaataataatgattttgagataactgtttaggagcttgggaaaagtttggaaaaagttatctcacttctcttcatgtatcaaaataaaagtacagatggattaaagagttaccaaacaaagctaggagaaaattaaatgcactggctctccaaatataggaagattttctcatattctcctactgtgtcaagtgggagaaatacaaaggaaaacctcagtaaagcatcccaacataaatgaaaagggatatttacatttgtccaaactccaaattatcaaattatcacaaattatcaaattcaagagcaaaccaccaactcagaaaaacatttacggcacaaatttaaaagtcactatttttacaatttaaagttcatacaagattattaagatatttttaaaaagcattagccaatagataattggtcagaggacacagaaaattttaaaaatgaataatattccatttaaaatatgtgagaaaaaaatctaattgtattaatgctctaggaaatacaaatttaaataatataccattttccacttatcaatttaccaaaaaaaactttaaatacaaaggagcagttaaagaggctttcttacattataggtggattgtaagttggtacaaccctctggcccactgaactcacttctaaaaattaaggaggaaacaatctcaaaatatggaagaacagctttatacacaaaaatgtttactgcaatattattttaaatagtcaatttcttatgttcaacaatagttgaagtgatcattgtgatgcatccagcaaatgttaaggaccatttgaaaagatatttgcaaagaattttaataaaatgaaaacattcttgtgttacaatatgaggttaaaaagttgctcaggataggtgtagtgggctgaagggtggtctccccaaaaatatgtccacattctaatcctcttcaaagaattctatatggtaaattctttggggattaaaaaaagggagaatatgtttatatttaagtattggcagcagcatttgccacatatatttagaaaaataaagaaatccaaatgccactcaataacagtcttaatattcacaattgaaattaaaaacattgacctattaactttttttttctttttcatctctgattttttttatgatactttaagttctagggtacgtgtacacaacgtgcaggtttgttacatatgtatacatgtgccatgttggtgtgctgcacccattaactcatcatttacattaggtatacctcctaatgctatccctcccccatccccgaccccacgacaggccccagtgtgtgatgttccccaccctgtgtccaagtgttctcgttgttcaattcccacctatgagtgagaacataccccatggaatagtatgcagccataaaaaaggatgagttcatatcctttgtatgaaggatggatgaagctggaaaccatcattctgagcaaactatcgcaaggacagaaaaccaattacctattaattctacaaaacaggaaagataaagatcacacaagtttgttactgttaattgagcgtgactccatattttaaaaattggacctccatagtatatttgcattttcagttatgtttcaaatagatatatagagagtagcaattcacttgtataagcaaatggaaacagtgcattccatcaacttcaccctaatagcaatggcactggtgcaaagagggaattcaggaaagacattgcataactgaaacataatatgcagccatgaaaacacatctttttaaagagaaaagtctgtttgcaagaacaaaaatctgactgtgaattctttatattaattcagaagatggtaaataatcactcccagtgttaagcatgtcaaatttacttgacaaagtcaattcggcagaagcccaaagttaatggtaagaacgtatttattggttctccttcctgagtccttccaggcatgttaaataaacagaacatatctatgtgttaaaagctctacaatacaatcaagggaaaatatgcttaaacacttgtgtgataattcaggccaaaaaaaaagttaagtaaaatattttccttagccatccggacatagccaaattacaagatatttttaaaaatatacaaacaaaaatattgccgcttcaggatatgcttcaatgttcccagagaattcagttttgaattttgtcttttagaataccgaaatctgcaacagccacgtaattcctatactaaatgatcacttaaaggggtaaaatataaaacatctcttcagctgtattctggagagagatgcattatattaggaggaaaataaagaaaaacaaatatttgcatgaatactgtattattagtaaccttaacaaatggtacccattctggtagaaaaagtgatttcctagaaaatctgtctattttctaataaataaaatgtctaaaatgaaacggcattagctgaaactcatctctaaaaggctcaagttaatgtgttcaaaaacacagtattttccatggcatttttggtgggcaagtttccaccggtctttcaagtttctgcacatcttgtgaatagaggttctgactgcctttgttccagagtagctttccaaaaatgtatactgaagaaacttgaagggtagagacagtctcttgctgcatcaaaggcaaggcatacttaaacatcccattataaaagattcaggtttggtaagctcagggtcccttccagtaatgcaacttgctgcatgtacaggtgttccctggatctctgtgcattaccttgtgggaattgggactcagggaacaggcataggaaaatgctgatactccagctactgctattgctgtgactaacaaactctccttcatatctgatccaagaatatcattctttctgccatcatttatgaaatgagataagctaatttgttagcttgcaaacagggtaaaaatcttatcaggcaagagtccataaggaatctatccccttttgattttgcaggattgactctacaataaatttagtgctctctaatcaagttaactgtttctgcctagttttggataaatacttgtttttatttcaaaggaaaaggcatggttgtcaacaccacagaagctacttttgttaaggactgttactgaacaattttttaatgaattcaacggcacatgtagttgagaaaaaaaatatttcaagaaatccaaactataaggtattaaaggactgccattctcaaagaaccataaaaataattatttatttcaaattaagggattccagcagtctggaacaatggtagtagaattatagagttcaaacattattcaagtatcttgtgcctttttgctatggaaatactgaatggctagtatcctaacttagtgaacttactgagttgatacagatccagacagactcagttgatacttaataagtgaactctattggattttgtatgacggacccagttaatgcttaatgactttagtttctgaaccactaatctagactcatgatccaacaagtatgaatatgtattcatggtgctcatggaatggaaatttgaaatccaaactatttcagaagagttgttacataatataattatgttgtatattcaagagtgcaattgtgaaatttcacgtcaatgaccttgaggcaaataaaaagtatgttaataatactgccttatataaacgtacttttaattttttttcccctaagtgctttcatatggagtcaaggacctgtaaggagtagatacaacaaaagacacagggatacaagtttagaagaagagatacttgaatccagagtagccagtatccgctatcaggaaggcacacagaatagaatacagtagccagtagaagcgttctccagggcaatatgtgtaaatggctcgctgatgggatgaagatatcttcaagggctccaagtgactcctaaacttcactgggagctgcttttcaggaactgtacttgtaggatgaagtactaatgaacagtaaaggggattaaaaaggaggaacaagggcaagaatctgtttgctttccttggagtctgtccaatgcataaagcgctctatttataaaagactaatccagttgtttaataggtgctgcttttggtttcatataggattctcccttcagaacagtctattcctctgctccaattctgtattaatcgagcaacctattaacctcgttctatccctgaatgaacctttcaggctagaagggataaaatgcagtttctgaaattctgatacttagagcacttggatcagagtcactttgggctgctaaaaatgcagatttctaggccctgctccagactcacagaatcaatctcctaaggtgagcccaggaatctgcactgtaaaaagctccccagttggataatgggctgaattttgagactcaatagactagatagagtttatttctaactgctttgctttagacgttaatgtttgtgaacatggactcaatttgtccaataattctctttatataagaaagcagatatttcttttgtgtcagaaagaaaagtagcttttacaggctcaaaaggcagcttttaaatatatatttcatttatgcatatttatcctccattgactcatgaaattttaaaccaacacacacacacacacacacacacacacacacacacacacacacgcgcaacgcgttatgactgctttatctgactggatgcccccctattagtaaagcacattttctacagctgtttaagagtgaattcattaaatacatataattgtgtatttatgcaagtaggcttgagagaacacgctaataatgtaaaataaataagaaaggccaggctgtcagtgccacaatacactgttcctgtctgggcttctaattccagaactcccacaaacagtacttaagtctttgacttcttaattttaaaatatcattgaagataagaaacttaggaaacagtttccaactactgtgtttgcaagatatgtcactagggatttagttatttctttatcaaggaccttttaggacgattgatgtatgatgaccttggaatgtgccttctctaatgatatctcatcatcactgatataatgttagcgtattagtaagtctagggttaataaggcattcctcaggtataagcaactgagccttggtgaacttcgcacacgctctcataagaaaatgattccacattggaataactatattgattagctatacttcaaaagagaaagtcattctagctttgacttctctcccacaaatgtcattgagagcttgtcgcatgccagcactttatatttgttttccttcttaattctcatcaccacttgtgccactggttgagtaagttctatccttatccagattcacaaatgaggaaacggggatttagaggaattaagtaattcagtcattacctgtaatcagtcagaggactagtcaagtggcagagtcacattcaaacccaggttgccaggccaaaagcctatgtgctttcaacaatactgtccttctctcatgtgactatttgtttgagttggagtacctcttctaaggccttctaaatacttctcataatcttttttccttccctcctcctcccatatcaacttagtgttgtttaattatctcccagaagatgacccttgcttaaagtcgattctacctttcaacctttcagctcttgttatagcagtctgcaaccctgttcccctttcatggtttgcacattcatgtgcacattcacatgtcaagggtatagggattaaaaaaaaaaaaacctgtatttctgtaaccttgcctagtgttacttggttgaataagctatgaccataagacttttaaaagactttttttttttgtccttaagcttggtttatctaggtcccaagttttgtttatgtagacctccacccccacttaacactgaagaatttatttaatcaaactatttgtattttacaaacccctactgaattccaacaccatttgaaaactggtgctcattcctagtttagattatgatatggtaaatgaaaatattgccgatttaaaaaatataatttttcttacccagtcttataaagcaatggttctcccacttcacatgcacaccttcatccccaatcactaaggacatttgtgaaaatgcagattcctaggccttaccctccaaagatgttgtaaataagtagggtgaggcccaggaatctgtagtttaacagagcttattatgtaattctaatacaaatattctgtgatccacatgctaagaaatcaacagaaatataaatgtttttcatgtacatagggcaatgccctcaattagctggaaacttcttagctaacttttgggactacatttttttcctcataggtacaacaaatttaacacttacagtaatggctgttcagtcatcccacaaatatttctggaaagactaccttaatctaggaatggtgaatatctaatagacgagatatgaggcacatctatcaccccccatacctgcagtgcccatgacagacatcactaataaatcatgggcattcttgtcagctcagcatagacccatgactgtgaaaccactcctaatcaatcttagagcaatagctaggacatggccactgggtctttgcccatagggcatcgagataaaaagaaagcaaaagaaattgagaaatattgggaatattggcaaaatttagagctttctcctttcctcccttctcactgagtaccctgtactatctctgcagcttggtggcaggctcaatgctatcccaggtcagcgaccctagctactggaggcagacagctaaaggcccatggacaggtgagaaaattggccaagcaaagaactttcagggtattgagataaaagatccctcctctattctcattcctatccttcctcttacttaaggacctctctccagatggaaagccaatctaggcttcctgccctgggcattaaaaaattctatttagggttcatttatgataaaaacctttttactatggctttggatcttccccttttgattcctatttgagactcagagaagccaaatgacttagccaaggttatctaaagttaaaaatagaattcagttctctggactccgagttcattgctctgcagagatttaagaaccttgatgcaatctgcaattagcttataaaaataacattgcatagtcctttgtccagtaattctgaaataacttggtcatatttatatatcacatcttctatctttgagaatctttcattaggtctgtctcaaccagaaataagttttgcagacagcaactctacattattgtaaactatatgcctttaataatatttaatgtatttctgcagaggtagaaaattgcctcattataatacccccaggaagagtaggtatttattatctcaaccatggcacagtctggaggggttaaaagaataagagcactgaaggccctgaatcgaggctccacctcttcccagctgtgtaaccgatgcaagttacttggcctctctgagaacctgtttatctataaagcgatgaacttatttatcttgcagagttttcctagaagtgaaattagttaatgggtataaaaatgacataaatttatgcctggcatgtcatagtgcttagcaaatgttagctccttctttctttttctcttacacatgttacctcagtgtctcccaggaccagcaatatttgtgaggtccagtgaaaaacaaaaatatggggccatttgctcagaagcaattaaggacttcaagatggaaccagcagagcagtcaactcagcatggggcccttttgaagaactacccaggacacatgtccacgtagtccagccctggcggtgggattatctctggaatgaatgctctctaatcttctctgtggctttgtttagtcagtgctgaagttcatggtgagcacttgaagtagcagcacagggtgagaagtgtgttagattcaacctcagctattctactttctatgaaacttccacacctcagaaacctctttaaaaagtgagcaaaggacatgaacagacatttttcaaaaggagacatacatatggccaacaagcatatgaaaaaaagctcaacatcactgatcattagagaaattcaaaacgaaaccacaatgagacaccatctcacacctgtcagaatggctattattaaaaagtcaaaaaataactgatgctggcaaggttgcagagtaaaaggaacacatgcactgtcggtgggaatgtaaattactacaaccattgtggaagaaattgtggtgatttcccaaagacctaaaaacagaaataccactcaactcagcaattctatcactaggtatataccagaaggaatataaatcattctgtcataaagacacatgcacatgtatgttcattgcagcactattcacaatagcaaagacatgaaatcaacctaaatgcccatcaatcatagactggaaaaagaaaacgtggtacatatacaccatggaatactatgcagccataaaaaagaatgaggtcatatcttttgcaggaagatggatggagctggaggctattatccttagcaaactaaggcaggaatggaaaatcaaatacttgatgtctgacttataagtgggagctaaatgatgagagcatgtggacacatagaggggaacaatagacagtgggcctattggagggtgtagggtgggaggatggagaggatcaggaaaaataactaatgggtactaggcttactacctgggtgatgaaataatctttacaacaaacccccgtggcagaagtttacctatgtaataaacctgcacatgtacccctgaacctaaaataaaagtcacattaaaaaaaaaaaacctctttaaggcttgtaggagtctaataataacactttcttcatagggctctggtgtaggtgaaaagagattaaagcaggaaaaagtactaacccagggccctagcactgaggacttatgtgttggctgtcattatagtgtctttcttgtctttctttcccttatacatctcccaagtcttcaggctttactaatccaataggttgtatgtatgacagtttccacaggacgtgccacccaggaccctgccaaggcacccatgcccagagagaaaagcatgcaaaatggacagaatctccatcattgattattttaatgcatggacacttcagaactaagcatagtgaattgcctttattacaacataaaatgatgatgatgctattaatgaaattaatggaagtaaaatatctgtagcttgtagtggcaatttgttttctaatatatttgcatcatcatctcatttaatgatcccttcctctaaagcaccctgtctgcagattacgttatcatctccattttacaggtgaagagatgaagtttccaagacatttagtgatttgctccaaggcgcatgctaatctgattcctagtctagtgttcctttttccccatcaacaagaatgtggttaaagtagcatttatgtgtctgtctcatctattcctgtgcataattgctttactacttcaaccaacaatgactatacaaataatttcatgtagttttcaaaaacaaagggaaattggacaaagtagtaaataactcattttacatttaaataggcttgaggagcttgggaaaaatgttaaagtttgagattctatctaattgttcacaaagcctgtgctatgttatcacagtttccattaaaagtggtcatttgagaaacttagtatcctggatggataatctcccagagtaaaagacccactaagaaggaattgtggtcatctggacttgggacatgtatttcattggtgcaataattatgggagagttgtcattttccaaccctgttttggaggtggaggtgagtggaaaaagccatgtcagccctgcactgcctgcctctgaactttacatgaggaaaataaactcccttttacttccctttattttggatttctgatattcccagctaagtctaatcctgatacagccactctcctcaatttcctcctcagatgaaagcttagatttccatttctggcaaaatgggagctaaaagacagatgtgcgtggcgaatgtgcattcacttttttcagctgctgctgaagattcttcacctccctggcctctgctgaacttacttgtggggacatgaccatattggtggttctactctggaaagttcaggccttacatcaacctcctccagaatccaacaatgaaggggtgacatagaaaataatctccaaagatggccaccatcaattttttccttccctatatgcacatgccaccccctcttgaaaagaggggtctatttctcctcccttttaaatctagggtagccatgtaactttgaccaacagaatgtggaggaagtgatgttctggatcttgggacttcttatccccaggcttgagagaggactggaagtttcctttttgaagccagcttctgtgtaaagggctgactaacctaaaaccaccaagctgtgagaaagccaaaactagctacgcagtgggccacatgagaagcaccagctcaccatataactaagtaagtccttcttggggcttctatcacagcccagccaccagcagaataagcctgagtcggtgacccccaatcaatgaccaatgaagcaaaacctgcctggccaatcctacctgaagtcctgacccatagaattgtaagaagtaataaatcatcattatctgaagccactaagttttgggatggtttgttatataacaatagataactgaagtagatggggaaggatgagagaacacttctgaggtaaagaaagggagaattggtgagaaaaccctactctgctgtcagtttctcctggctcccagtctcccagcactgagattttttttttttaaagtggaaagcacaactattatttccatagacaagtaaactctgcattcccaagaattaatctacaatgcaaatttgaaacacaacttgttcagaaggtggcaacttattcaatgcccttcaacactcattcttgacatacatgtgatgttgagcgccactgttcatttatgtgtcagactaatgccttatatgtgaagcagacatgaatatcaggttagtcctgagcaattccaaggacagcaatagtactatacaattgtctgtgtactatatctggtgtaacatgattatgggtaattatgttaatcagtactttttatggccatctatttattgaatttggtttctttctaaaagaaaaaatgaataccaaggtatatatgatctactgaaaacctttacttatttcaccacaaaaggttctcagaggaaaattctctgttccaacccagcagaagacaagatatttaaatagagaaatttttataaacgtgctttccagggacatattaagcatgtcaatggagaatcattttactaaactatctgcttggttactgagaatcatcaaagcatttatagttcagttaacttaagaagaggacttcagttttttaatttctgaaattagtacagctttttaatttctgaaataaatattagaatagtagcttgaaagggttttggtggacaaaagttttcaaccatgattggctgctagaagcatttggaatcctttcattcccgcccgtctacccaccctccgcccaccttccagaggtttcagttaattgttctggggcggacatcaggcaacaggattttaaaaaaatactccataggattctaatacctagctaagaccgaaaacattgttgaaagagtgtgggctttgaaataatccctaggattgaattccaagcatcaatagttttataaccgaggcaaatggcaaagccatggtaagtttctatggcagtggttctcaaagtggggttccttagtaagcagcattggcaatatctggagaacttactggaaatgaaaattctttggttccacccagacctactgaatcagaaagtctagggtagggggtggggcccagcctccaggtgatcctgccacaggctacagtttgagaagtactgtgctacatgataagaattataagggctgactccatgtaccttcactgttcctcaatatctacataaattttcacagcctagaattcttctctctctccttgtcaaggtatcttgttttttaaaaaattgtaaaagcctagtagcaaaacttcaaaaaagtaaatgcattgttttatttctgattctttaattcacttttattgtgttttaattagaaaagcagaaagaataaaaaactcctactttgcaatgttattaacatttgatataaatttggtttttacaagaaaagatcaaattttgcatactgttaaataaacttcttaatcttctatttcacacactgcatcttttacatgctactatttaatataatatttgtacatatcaacatatcatatttttggtgtagacttatattccattatataaatatgccataatttatttaatccatcctttatcagttgattataatttttgattttataaataatgttcctattaattattttaaaattgtttacatccatgatgccattcttgggatcagttttcaagatgtggtattgctggatcaaagcatacagtggctagtgatgcacgttgacaaattgtccttaaaaaaaactgcacccttagcaagggatgagaatgccaattcttttgtaccacagttcttgctatatattactagtttgtttaatctttgtcaatttaatacaaggatgacttcatagggtttttctttaatgaagttaaatctttttgccattgtgtttttgtttaatgcctatttgtatttctttattctcattatttgtccatttttaaaaaaatgtgagtacgcacctttttttcctattgaattgtaaatgctccttatatattaaggattacttttaccaacaattggaggtaagaaaaatatcataaatactcaattgagtaatatcagaatgagttaatttcaatttattattaataagaactataaataatttggttggattacactattgcaaatctggcaacaatcagtatccattttcctttcctaggcctgagctatgctgaacaaaatttagtccttctctgattattagagatcttgtggtgcctatgggggattattctaaattttccattgtgcaaagagaatgagacacagaaagcccaagtcctggctctacaggctaccagttggacaacctagactggggcaagtaatttaacctctcagtgctttggtttcctcatctttcaaacagaaataacaaaaataacctctacctcatatgatgactatgagaaacgataagtgtaagagttaagcacacagatttcagagcctttctggatttgaattcccactctaccatttaatagctattgtcttggcaaagttcttaatccctctggtccttactttctttacctgtataatgatgaaaataatataacttacctatcagggtggttgtaaggattaaataagtaaaacctatttacctacctatctatctatgtgtctatctatccatgatacctgttcacctgtcatccatatagctacctatcgataatctatctggcatttagaagagtagctggcaggtaataagcacagtaatcattataattaaataaaataactttatgttatgtcctttcttaaccacagtccctcacaaatgtcactggtagggactataactgctataggggccaccacaatattggtagttatataaaattgggttgaatctctaccaaacccaggacatactctggaaatgagtttctgaataaggctccagcatcaacttgcttttttggtgattcacctcattttattaaatgtgaagggcaggaaaaccaatctggcttttgttagctgaataatgactgcaaagctagccatgtgaatcgatttttttgcttccatcctagaaacccaccttcagcagacaagccataaaaatagtgtacccgagatgctctaagacaggtttatgtcgtttcctctcacaaagcagaacactgaattgatttttagattaattgtctatagctgggttaactaaattctgtgttctctgattcatgctctgtactagctcacaagaaaatttttggtcttaacacttaatatgaatcataattaatgcaaaagataattaaaagaatctctcagcattttggtcattttatcagatgaaactcccacttttatccccatgatttacactgtataaaagaaaatatacccatatggaatacgcttgtgaatcaaaaacaaagccagtgcccaaaatacaaatcaaaaacactgtctagaacaacaggcttcaactaatgaattaaaatgattgctggtttctttaaaatattaagctcatcgatgcttgccaaaaaccccttggctagctgagggattcaaactgcattgttcagctagagtttgaaatccttccattcatcattgacatgtgagagacaagacaaggtttttgacaaaaaggggatgaggcgccagatggtttccatctgtatctccattgattgtacaatgaaaacccaccttccctaatcagaaggctgtgccatacatggaaaatgaatacccagtgtttttaaagaagcacaatcaccccttcccaaccatagatgtataaatattaatgaacacaatctggttctaagcaaatttagcatgaacttttagcaaccctcccttgacaacttcctctctttttaactgaattaagcttctaagttctgtgattaaaaatagcaaaccctgcactgaagttggatctgtgactgaggtaaacctctcccttccagctagtaaccagttaacgtagctcatatgattgtgtgctttttataaccaaaaaagggtcttaatttgaatggatgcttagcaaatatgaatagtgagatatagaatccatacaaataagcagaaaattgataaattaacctatcatttatgccatgactatttccaaaactacttgagcaaatttagagattattacacacaatattgagatagttgttaaataactttatttctgtaaaaccctgtagtacatcatatattgactcatattttaactttcctgtaagctaatagagagtattaagacagttttaataactaatgttaaaaagaaaatagtagattcctttcttggatgtttgaacttgaatcatagtatcacagtatctttaaccaagaagatttggttagtcttattctttcttgattcacttcctgaggttttccttgaaatatcagaagagacttagatttgaaaatttccattaattccttcctttgtttcttttctttttagttcaaactaggaaggtttgcatacttgctccagcttatgtgcctttaatctgttgaagcaatgcattttccaagaagcatattccatgttttcaccactaatggttccctgtggatcaaagtggtaagtctttaaagtaaaatatatcaaatcagtccaaagataatatgaaaaattaaatccatatactaagcttcagtcttcatgtgactggaaggaattaatctttttcctctcctacaacatgcattgtcctcctgctgtcaataaacaaaatattattgagtacctactatgtgcctggcattaagctaagcactgaacattgacacattggacagtgttgctattctcaggcacagatgctatttcagagccatcctacagagattggctaaagaatgttctttgctgtatgatagcaacattgtgcacagagctcatatgtatttccattgcaagtgatcaagcctgtctcttagcccccatttgccttttgggaataagcgctcagtggaacttgccagtgttaccagcagtgttgctgtttgtttaaggttcagtttcaccaggtggtggcaagtttttaaaactcttcctagcccaatttgtttgtcagcatcatgatcagatatcaggataacatcaataaagcaggagcaaaagatgagctaaagctgcagagaaaatgctgagcttatcaaaatgcgtttttggttatgttcgaggcaagaagaacaggaaaggctagacccacagcttgagccagatggtgcaatgttagcattagacaaagaggaagagaaacaatgtctctccttgtttcttttgtaattttcatcaagaagaatactctccaaactgcaaaaaagataccttaaatggttcattttagtaggaaactgaaaaaataagaagattgaaggtaagccaaaaaaaaaaaaaagtaagcacatatatatgtttaagtctctaggctcagatgcattggatcttcagaaataatgggaaaaaacaaacaagcaataaataattgttttgatatataagaaaattaaattttttcttgattatcaaaagaaggagctggggcagtgaggggagaaacgtaggtttggaaaacaatatcccataaaatagccataaaacccctaattctataagttacattttaatacatggtttatgagtactattaaaagaaaattatgaggtattcaagaagaggtagcacagagttggggaggagacataaatatgtgatatatgatatgtggtatttgacatatatactatatgttatattacatatacatatatatcaatatattaaatatattcaccttgatatatatatgtaatataacatatattatatgtaagttatatgcatatatgcaaggttgcatcatatccctatttcagcaaggtatttgacaaagtcttacaagatatcctcagggtaagactgtagaatatggcatgaatgacaaagaatgaatgaatgaattggacaatagttaattaattaatcaatgtcacttgaggaaatggtatgtagaaatctcccattgagctctgtcctgtcaaaaaatttattgatttgggtgaagacgagagaattatcatcacaattgaatggttgtagatagttgacataatcatgtttcaaaatgaatctgaacaaatgggcaaaaacaaatcagatggaatttatttgtgtaattatttttgtagagacagggccttactatgttgcccaggctgatcttaaactcctggcctcaaagtgatcctcctgcctcggccttccaaagtgctgtgctgggattacaggcatgagccactgtgcccggactcagatgaaatttacagaagaaactataaagtactgcactgaatatccaaaacttagttagaaattacaggatgcagggtttggggagacaggatgacagcagtttaaaataaaaaatttaagttgacagagtggtatggtggcaaagttgaaaaaaaaattgtcagtaggatcttagagaaagagtaacagaacatgtttgtcctcttcactcccattattcactgtcatcctggtgatgatgaggactatatcatgtactagcaagtgctataaggagaaattaccatgagcaagaagtggccctgttagtgacccattgtggagtttatcaggatgatcctcaggaactggctgacctgggacataagcaaagtatgaaatgaaatatccaggatccttagaggaagtctaaagaatagaaaacaaaagagagaaagtaaatcaagcatgaggtatggaaatagaaatagacaaagtgttccatgacatagaccaaaagcagcttcatatgtgaaagcttcatttatgagaggctttgcattgaagatcaaaggggaactcatagactgctcagtaagttatgctagcacaattgtttttcatatgagaaaaatggaatcagatccctacctcatgccatataacacaagaatccattccagatgaaatatatgcttaaacgtaaagacaacatttttaaagaatataaatttattaccactgaactctatacctaaaatgctaaagatagtgagttatatgtgtatatatttacttcagtgaaatctttaaaaaagacatttaagtactaaaagaaagaaagaaaatatagactagaaagaagagaatttcttaagaaaagttgaaaaattactaaccataaaagaagaaattgacaaatttgactacattaaaattaagtcctagaagaatgactcccacaaacaataatggtgagaagaagagctattttgcctttaacaaggtggtgacccaagaatacatcatcaacatttacaagggcatccagggagtgggctttaagaagtgtgccccttgagcactcaaagaaatttgccataaaggagaaagtactccagatgtgtgcattgatgccaggctcaacaaaactgtctgagccaaaggaataaagaatgttccatactgtaaccatgtgcagttgtccagaaaatgcagtcagaatgaagattcaccaaacaaactcatgcactggttacctgcgtaccagtcatcaccttaaaattctacagtcagtgtgggtgagatctaaccactggctgtcaaataaagtttataagactgccaatgaaaataacatatgttcatttaaaaaaattccataaagtgaaatagtaagccaaaaattgggagaactttgcaacacctaaaaatgacaaaggatcagtctctctctctctctctctacacacacacacacacacacacacacacacacacacacatttataattactatgaatcaaaagagaagtgggtgaagacatgaacagtatttaaccaaaaaaaggaagcatcaatggtaaagacagataggaaaagatgtcgaacctcattagaaatcaaaacatgctttttcagatcacagtaaggtacattttagatggacaaaatttaaaagcctgacattaccaaatgttagcaaggatgtggagcaaaaagaagcctaatgcaccacttcttggagggagtgttgaccagttcaaccattttgaaaaatacatttgagttacctaataaagaacatatttaccctctgatccagcaattctactgctagaaaaacttaactcaacatgaaccaaagacacatggaaggaaattcacagtagctttatttgtaatagcaaatcactggcagtaaactctgcaaagaggaaataacccaaaagtctacacagactacacagaacaaagtgatatattgcctagcagagtattatacagcagtggaaaatggaaaaattctagctttatattctggatgaatacatcttagaaatacaaatatgaatgagaaaagcaagttgtaggaacatatatatgacatgctaccatttttataaaacccacagacaagccaaattttagaatatattgtttaggaagatatacgcacatatgtagtacagctaaaactcatccaaatgataaacagaaaattgataatagggaggcaggagataggatcagggaggaatactacatatttaatatcaacattattggtaatattctacttcctaaaatgagtgttggcttcatgggggatttattccattaccaagcttcatagcctacatatacgttataagatgtacatttattcatacataaaacaagttaaggaaagaaaagaaaaagagagagaccaaggaaggcaggcctccttaaccccaccaaagctatgtaggaactggcaggcaacctaaggtgtaaagaaatattttgcttctttctctgtatttcaaatgggttatgagtcaacatacagcttaaaattggattctttctggaaatgggctagtctgtctaattttccattaattctatatcagtagggcaaggttacagaggtacatacaccttctagttaagagaggggaacctctcaccatattcagcactaaagctatatctgcaatagcatgttcaattcttggaaatatattttatgagaagtatttgaaaaaataaagagcttccagggaaagttaatgtagacactggggtgttgaaaatccacttcacacgaatggctaagtgaacttgaatttgagatattcaactgagagaagagattaggagaactgtgatagctaacttcagaaattaaaaagaaatgctgtgaaatttttttaaaattttagctttatactgcatatagagtggctccccactgccaatggatagaaatgtactgaggctgatttaaggtttgaaaattaaaatatcagctcacaacagctagttggatgactgattctgggtggtggcctattacagtccaacaatttcctagagctatgagagaatgttaccctttaagaatgtttagaatttccatttttcctataatggtttatattttataattcagaccgcaggcttagtatatttttggtctaaaaatatctaatgatataatgtttatcttgaattcagttatatcatttattttttatttctactaactcagttccacagataaagaatgaatgactctgcttctcaataactacctaactctgtggaatttacttaatctctcaaagccacagtttcttcagctgtaaaatgggaataataacaatacctatctgtagtgggttaaataatgacctcccaaatctgttcaagtcctaatccctggaacctgtgaatatgttatcttgcaaagggactttgcaaatgtagttaaggattttctgatgagaagattatgctggattatctggtggcccagtatggtcataaaattccttataaaaaggatgcaggaggggtcagaggcaaaggagattatgtgatgatggaagcatagattagagtgacgcactttctaaaatggagggagaagccaaaaaatcaaggagatgtgtggccactagaagctgaaaaaggcaaggaaatggatccttctctcagagcctccatgaggaattagttctgcagaccctttgacttcagctctgtgaaactcatttctgacgtctgacctccagaactgtaaaataatacatttgtgttgttttaagcaactaagctagtggtaatttgttacagcagcaacaggaaatgaattcaccatctcataggggttttgtggggatcaaatgaaataaaccagtaaaaagttcttggcttctattactattatcatcgaccttattttctcaaaatgaagattcagcctcgcaattcagtgactgccctcagttatttccctcataaggtgttttgatactccatgtacattaatgacatggggaaaagaccctggatgggagtaaggaattcacagccataacgctgagggtcctgacagctgctcgacttctctaggcctctatccctcagctataattagaggcttgattgttccagctctaaaatgcaaagattatgtgcttacttaggtagtccaataaatgctttctaagtccaccctcttgttcctctctgatggtttatcttgtagctagtgtctgaattctctagtgccaactgctcctaggttatctttactttgggcactgattaaccaggcagtcctaattccatgctttaaaaaaaggaagatgaagagaggactagcagttctcagcttaaatttatgtttaaaaaatatattcggtgttttacaaatgatgttcttggcaaaaaatcctcgctttaagggtccatatagatttgccttggagccttctgtttttaattcaaggcagttgctttcaagaacagggttgactggccatcctcactaagtgttctgccaaggctcttatcctcctaagtggcagaacgtttgacacactttccttgttgctaaaggtgtagataacagtacataggaatcaaacatgaccagaatagaacagacaccaaagtaatgttgagcacaagctctctttcatatctccactttctccaactcaccatggagagaatgactgtgaaaaggctttgccatccataaattattctttaaatgcaaacattcctactgatttgaactcagcatagggtgggatgttgtgatagagactcagacagcactcagttgacatacagagaaagtgctacttcaatatgaagcaaccctcaaaacttccttcacaagagggtcttgaaagaagaggacatctttactagctggagaaaacaagaaggacattttggggaaaaagaatgatgagtgcaaatgcagagaggcttcctctaaaagaagaagttactgtgtttggcatgtcatggggaggaaatagacactaattgaagatgatgctaaggtcagctgctatcagtctgtgcttgccatactggtcatcggaattttactgtgtagcattcagcaattaaagagacaactatcatgaggaatggggcatgttcagattggattttttaagaaaataggtaaaatctggtagaggtatccagtatgtggcaataattgaggtctgggagaggggctgtcagagtgaaaagagggaggtgttgaactggagctgccttcattgaaaaccaagtggttgttggagagacaaggtctataaggacctggaggcttccagcttggctgattaggtgtatggcagcatcactggccatgccatgaaaaacaaggatggaggaagacagaacaaaggttgggaccacagacactaaactgagcgggtagatagaaggcaaagagaaaatcagaaccctagagaaaagaaccacttgggcaaagtaaggcaaggaagcagacaggaaatgcgtaggcagagggacacaggagattaaaaaggatgatgtcagagaaagcagatgcggaaagatggacatggaggtgcagatcagctgctgtgccaaatgtggcaatatggtccggtaggtaaaggacagaaatgggcaccacagagccacatccaaaccccccagggccctgagcatccccatgtggaggtgaacacttcccctctccctaacttgatgagatacctctcacgacatttgacacgtgccttgtacaaagtatgggtatatttgctacatgaaaccaaagggaatggaagctttcccatattcccacaatgccagaaggcagagcctggctctagccacccccactcaacaacttaaaaccaaatcagtccccaaagtattgaaaaggcaagataggaaacaatgagtaatgtgggcccaggaatgaaaccaaagcacgcagcaatatgcacacatgcagatgcaacgttggcctccccctccgcggcccttccaaactgtttagaaagaatagatgattaggcctcagtataattcattctctttcactgaagtagaaattaattgccgcttaagtgactagagaaagcaaaaaagtacataaatgcttatacacacaataatcattaaatgtgcccttcagagcagtcgtgggagaaagtggggattgggagagaattaaaaatgacacttacgtactgagacctcagggtgagtcagaaaacaataaaatttctgtttaaggaaaaagagaggaaagaaataacactggtataacaatgtatagtatatatctgggggcaagtgcaggaagctgtgcttttctcatggtagggaatacctaagggagatccaaagagatactgcctttctaaggaaaagaaaaaaaaaaataacagaagaaggaatactggcaagagactgagttacagagaggaaagcccagcactgtaagggaacataagaactacatacaccactctacattcctcatagtctcagaaaaggatgacccagtttacaaacgcacagcagtaaacaagacacgcctcgatgcacgacttgatcatgaaagacggagtcagaactcaaagttcaggtttcttaaaatatatagatagtatgcacacacacacacacaaatgcacacacacttctctttctcaagttcgaaaaagtgtatctgcttgagtaaatgggaagtttaacaagagcaatgagtgctttttagctttcctctgagcctgaccgtcgaaaataattcaagttaccagaacacattctacatttcacattcttgcactgcccttgaacatagattctgaggaatgcatttctatgcatagagcacacgttattccccggtggggtggcctggaagatcacgtacatctaaccacctgggccaagcttcttcgaaatgctctgagcacttctcatttaccaggaaaggttctcttcttctgtgtgatatataataatgtgaatctcttcacatgatgatcaaagaatcagctaatcaatgctgacagaattaggtgcagatagaaacatcccagttctcaggtctggccaatgtagtaaaatccactttaggaaatggaaacccttaagtctcattgcagagggttgacgcaaaagagatcatccagtccctgcatcaatcaaatgtgcatggacctggcacttttctccattatcataaaaatgtgtatatatatatcatatatatatcataaaaatgtgtgtgtgtatatatatatacatacatataatgaaatattattatattatatataatgaaatgtatatatataacgaaatgtatatatatatataatgaaatattattcagccaaaaacatgaaatcctctcatttgcagcaatatggaacagaattggaggtcattgcgttaagtgaaataacccacccatagaaagacaaatattgcatgttctcactcatatgtgggagttacaaaagtgtatctcatggaggaagacagcagattggtggttcccagaggctgagaagggtagggggaagatgaagagaagttggttaatgggtacaaaaatacagttagatggaaggaataaagtctagcactcgaaagtacagtaaggagactatagttaacaattgactgtacatttcaaaatagctagaagagaactggaatgtttccaacccaaagaaaaaatgtctgtagcaatggatatactaatcaccctgatttaatcattacacactgtacacacgtatcaaaagaccacatgtacaaaaatatgcacaactattatatattaacaaaaaagtttgctggaaaaaaaggtgggtaacagatctttgttacttttctggatttattcaaggatcctcctgtctatgtatgacaagccagaaaggagatacagggaagaaaatgaacacacttttgggctcaaaaactaaatttacccagcaggaaatgggttttcccttctctgaactcctatacaactctatacctccctgatgacacagatcatcccccaccttaaataatttttatttgtgtttatgtctcagctctcctactattttgcaagctcttcacaagcaggacggcatcttaatatcttagctgagtaatctctcatgtttttcaagggctttatactttcctaatatgccttcagatgcactatctcatttggtcttcatgagactgacagttaggtggggcaggcacaatttttttttttattttattattatttcactttatacatacaattgagattaagaaaggtgaaatgaatggaaggttacatggctacccggcttcattccagagtccagaatgaagcacattgatctaggctcccaaaccaggccgtcatcctccacaccaagcttctccacctgcattcccacatgccaccttatatgggtcagccaggtgcccattacaagaaagacatctagagagaagaataaagaagcagaaacatagagcagttaaaaagagaaaaagagatggacaccaactgatcttcatgtttttctaacctgaaaagcccctagaacactgttgctagatatgagatgacgcctatctttttatctccataagagtcatgtagtaatgccattgtcagagagaacaaaaaggtgtgtgtgtgtgtgtgtgtgtgtgtgtgtgcacatgcattctttctttaaagaataaaatggcattatgagatccacgggatcattgatgttggagtggggagggccctcagggggcatctgttccagtgttgctggagacatccttagacagaacagaaaactgaagcctgctgggggatgctcctggcaaaattacttctttacttagttataaaggagtggtatcttggccctctaccctcttatccagttactggccctcggtaagagagtagatgagaaggtagaagcccctgtcaggtagaaggacagaagtacagcagtagaaggacagagatcagaagtccccctaaacaaggaaaaggcagtgtcttaggtaaggatccccacaagcaaagcctgagagaacaattcctaggcaaatcaggctcttaatggaaacacatgagggagtaagggaagcaagggagggcaggggaaaagacaaagatgtggttttagaagtctagtctgatcccacagggagctctggggtgtaaatcactcagaggtcattctgcacagaggcaaggggcctgagctgttgtacctcagcatcaggtggtaactggtcaagggctgtcctgtggcatggaggctgtaacctcccacgcatgaggtagatgaggtagatgtcattgtctggatgaggtagatgtcattgtcaagggcaatcctccagagggtggtgcagataagaggatatgacagccaacaactgcagcagctggagggcaaggggactagccctgttaagggggcctgggtggggcactaacagcatctactataggcttcttctcacacctacaggagctgaactccaggtaggtggtctaatttagagccggacgccctctcacgagaactatggcatgggatcctctgtctgggatctgttgtattatcccctactttacaaaaccatatccatatgtttctatattctttacacttaatgaaactttagagtctctatatatgttgatgcctttcagtcaatcactacctccttgtgacaacacacgcaaaagacttcacaattctgttttcctccatccaaatttctatttgtacatctcaaggagaatggggtcaataactcccaaaggcaacccactctattttgctattaactacatgttggtaactttaataaagtaaaactctatttccttatcatttccattcaccaaagtgatgaaaaataggtctaatttttagatattaaataccttctcttctacaggtgaaagagccacagttcagattgttccaccatgtaggacatgattgcaaatctgtttgcccatctggtccctacccaatgaagaaattccagtttgtccatgaccccatttaaggaggtgcccagaactacccaggagtcatgtgacccacatagatcaaaggaggattatcctttttgtttgggacacagcagttcaattaatgcagtctaaaattaacttcatgatttaaataaactctactatatgatccattatgccactgatttaaactaagtcgtaaataacaaatctatatatattcgcatgtgctgtctgtctcaccccaactttagtttctagattgatttttttaaacttaagtataggctttcatacttgttcaattaaaacttaaccttgttccatcattccaatttgaaatggtctctccaggtagtaattctgttactcaaagtatgtgccatgcttccaggtttcatgtcaatcataatgttgacacatatactatctataccctcatcaaaatcattgatagaaaacagtaccttgatggggctaagagtggatcctcatagcccaccattagagaccagccccacacaggagccattctagcatgcacacagtttgattcatgcctttttcaagacgcagcctcaatgttatgatcaatacatttcttcagatatgtattttgatatactaagttgtgaagaatacaaaataaattataaaatatttgtagtcacatgcatttattagaatataaaaacagaatataaaaccaggagcagttttacaaataaaaataatccaaggagacaaaggtcagaatgactcagaggtcattctaggtatattctaggtatatagaatataatttcagaataaaaagatgatttttttcccatgtagagtaagttgacaagtctgagggggtgaaagggatgatgactgagctctggatagggacacatggaatacaaattgtactgagggaaacaggtgatctgagataagagaatgcaagagactaaatgactaaattagttatctattgctgcatgacaaattcctaccaaattaacagcttaaaagaccaaaagttatttcacagtttccatgggtcaggagtccaggctcaagttagttcagccctttgttcaggatctcaccaggctgaaatcaaggtgttagctgaagctgcaaactcagctatggcttggggtctcctaacctcactggttgttggtggagttcagttctttgcaattgcaggaaaaagatccctacttttgctggctggctgcaagctgagggctgttctcagttcctaaaggccacctaccattctatgccatgtggctttttccactgtatggcaatttgctcctcaaggccagtaggggaaacactcttcattctgctaaaatggagtcctatactaagtaaagcagtcaagggcgtgattatcatattcacaggtccaggccaagcaaagagaggagattagagacagtgtgtacacgattgggtaggaatctttggagccatcccagaattccacctgtcacaaggacttaacgtggctgaggcatagtgaggaactgtggtagaggagggacctggagaggtcttttgtgccctgctatgtagtttgaatattattctgaaagcaatggaggcacattaacagatgcttctccctttggggaggtacaagaaaatgttataagtaatagtggttaagaaagtattctaggaagcatggcacttggagagagtattattgaatgaaccgaggcaataaatgtaaaacatagcataatccatatatacagttgattctgtttatagtttacccatcccgcttgcctacacgaccactgtgagaaagcaagactacaccttgccctgttgcccttgtgattaagtgtgcccttcacataccaatgacagatgaaacaaaaatatttttgcatcattagagactccttccaaaacagaaaaccctatctcactctagtctccccatccaaaaacatttttaaaagacttgagccccttccctgtaagttgctggctcccccaagaaaaaaatctttatctctgactttggaatacagatatctgcagatacgtgaggatccacccaggtaggataagcatgtgagaactgccactttttcaccaatgaggattctgaacagattaactgtaactttgtgggctaaattttttttttctttaaatacctgtagtatccttttttcagggactcctgtgcttctaaaggctggaaagccctccaaacattacaagtaaaaagtgcttcagtgttcaatttgtctttgagttttccattcacaactgtgtctataccttgtatcctcaagagcaaccacagtgtttatttttaaatgtaataataatactatctataagctacttattatatgccaggcaaggcactgatctcagagcttcatatcctcacaatcggatgaggaaaccacggcacagaaaattcaagtaacttgttggagtttacacaggttgttagtggtggagctgggatatgaatccaggtagaatattctgcaacagttcgcagtcttggaaaaaaataggcacttactactcttgtaagggtgacccttgaggcactcaatatgtgattgctgattaacaattactacttttgaggtggcagggtcaaaaatattttaaaactaaggtctagccaggcgcagtggctcacgcctgtaatcccagcactttgggaggccaaggcgggcagatcacctgaggtcgggagctcgagaccagcctgaccaacatggagaaacccttctctactaaaaaatacaaaagtagccaggtgtagtggcgcatgcctgtaatcccagctactcgggaggctgacgcaggagaattgcttgaacctgggaggcagaggttgcggtgagccgagatcgtgccattgtactccagcctgggcaacaagagtgaaactccgtctcaaaaaaaaaaaaaaaacaaaaacaaaaacagaaaactaaggaataataactacaagatcatgtcacagaagtaaggtgctgggcacggtggctcacgtctataatcccagcattctgggaggccgaggcgggtggatcactaggtcaggagatcgagaccatcctggccaacaatggtgaaactccgtctgtactaaaaatacaaaaattagctgggtgtggtgtcatgtgcctgtaaccccagctatttgggaggctgaggcaggagaattgcttgaacctgggaggcagagattgcaatgagccgagatcacaccagcactccagcctggcaacagagtgagattccatctcaaacaaacaaacgatactgacagaaggacaatttttaggtataatatgaattaccaaaattgccacaaatagaagtagaaacactgaatagatgaattgattagagaaaacaatctgacaacaacaaatagaaacaacaacagcaaaaatctttaaaagttataaaagtattatctggttcaaaaaataatcccgatacagagaatttcagagaaaaaaaaattgcccatgaaaatataatttccataggtgcagaacacagaaaatgataaaatctttctaatcattacataaagtttacataattttgatatcaaaactaataagatagcataaaaattcaactaaagaccaaatcattaggaaaattgatacaataatctcaaacaaatatggaatacagcagtaagttaagaaaacatttcatcagggccaagtaggctttggtccaagaataaaaagatgattaaatattaggaaatctgtaattatagtgcaccattttaatagatcaaaggcaaaacttatgcaataattcaaaagaaactatgatactccatatcaagtctggtgttaaacacattataaataattcttactggatactcataatatcctcacaagatatttacatgattatcttcatattacagagtaagagactgaaattcgaagggaataaataaattgcttaatgttacacaattctaagaggaggaggtataatttgactccagctctgtctggccataaatcccatactctggcttccatattatattctcctcatggatgataatttaccaaaatcatccaaaaggcattttatagtattccaaaacccatttttttaattttaaaaattctcagcatattaggaatgcaaaaaaatttctttaacatggttagaaaaaaatctatcatcaaataaatagctgttaaaatcagaaacaagataagagtagaatgccagtgagtattttgaactttgctgtggaaattctggctaatgttataggacataatcaacaaagaagagatacattatttggaaagatgatagaatcattttttgattataatataattgtttataaataaaactcaggagaactaagtgaaaaataattatcattaacaaacagaatcaaaagacaaaatactaaaagcaatagctttcatataacagtaaccaccaattagaaaacagtatcttaaataatctcaaaaataattaaataaaaagtatctaatacctaggaataaccttaaaaagaatgcaggacctctacaaataaatgatttttttgtcatatcacataagacttgaaaaagagatattttgaaattattgaaaattgtgaagatgcaaacttttccaaaataattcataatttgcacataattctatacaaagtacaacaagttttgttttgttttttgagatggagtttcgctcttgttgcccaggccagagtgcaatggcatgatctcggctcactgcaaccttgtgccttccgggttcgagcctctcaagtagctggatacaggcgtgtgccaccatgcctggctaattttgtatttttagtggagatggggtttcaccatgttggtcaggccggcttgaactcctgacctcaagtgatccaccttcctcagcgtcccaaagtgctgggattacaggcatgaggcaccgtgcccggtccaagattttttaaatttgaaaattaattccaatactcaccttaaagaatgctgagacaataactgctaaaataaatttaaaatacagaaaaatgaaagagttaggggccaccatgtcagaaacaggctataatacaaattataatgggatatataaactataatatggttctgctacaataattaatagatggttacagaaatagagagcccagatacagaaatgtatataccaattaaaagatagatttaatcaaaaagtcagtgaagaaaagagcacttatttaataaatggcattgaattaactatttgaataatttaaaatgtatgttgctatctcatactatatgttaaaataaagacagataaatgttatgttaaattttaaaataaaataataaaggattatgtaaaatacaggtggttatttatcagctattgagcctagcaaaataatttctaaacataaaggtagtgaaatgtgtcagagagtaatagtagatttgactggagtagcaaaggtgaaacacatttatatatcagagagcagaatactcaaaaggcaaacaccaaactggaaaaataatttccagagacataacacgcaaaggtagttcataagcaaaatattaacatctcaatggataaatgggcaaagaacacagatcaacaagttaccaaaaatccttataattatccaataagcattcaaaatttttaaaattttttttaaaaaactaatgcttaatgctgttgaatgtgaggagaaatagtcacgacacagagagtaggtgtgtaaattaatatctttggccacatcgatgaagaatcataaaaacgtccatgccctttgattgcctctcctaggaactgtccaatagaaacaattaagaaggtgaaaaaagatgtaatgcaaaactattcaaggccgtatcattcattctaggcagaagcataaacattcaaccatagacgtacatccaaaagtgcaatattatacagtcattgaataatcatgttttgaaaaatatttaatgtcatgagaaaattttcctagtcaagtgaacataagtaagatataaaactttgtccagaccataattgtgattctgtgatgtaaccatatatgcagagaaaaaaactggaagaaaatatgccaaaatgttacagcagctatctctgaatactaaggtaggcaatttttattttatacactgaatatcagaataaaatttattaaagaataaaaacaatactgtcatgagaaatcagaagctggacacactggtcatgaccttctaaggatgtaaggaagccttcgccttttatgttcctctaattttactccatgatctcacagggaaatgagtggagcaagtggctcatcagccaccttggcctctgaaaagaattgtcccagaagccatctctctatcaaacctggctaatttcttctctcctccttcagctctggcctcttcctgctcacctctgccaatctcctttccttccactcaaagtctggccacaacaaaaaagaaagcaggtttggagagaggtcagtatgctgggttattgtcaaaggagttatgtgtgtttgtgtgtttctgcaaaagtgcattctgctgctgctaaattgtcattccatacactatctacattggaaagatctttctcaaaaaaaaaaaaaaaagaaagaaagaaatatacttttgaaaattcctgcaatgcctactgtgacagtgacatcagaagtctatttgttcttcacaagtataattcatggagctttattgaaaccatatcatttgatcactcaacaatattcagcaaatctttgtggggtgctctctatggttctgggaaatataatgtgagagtgggcggctgaatcatggtcctcagagatgtccatagctttatcctgaaacttgtgaataagttacttcctatagcaatacttacacatgtgattgaggtaaggatcttgagacagggagcttatcctgcaatatttgggtgggcccaaataatcacagagatctttacaaggaaataggcagaagagtcaagatagttgttgtccttgcaaagtattttttgcaacttcccagtctcccatcattaccggggacacagttatgcaaatatagcctccatttttataagaaatgaaggaattaaaaaatagaagtagatgaaaactatttagcaacatatattttaattataaaattaggaggcacagattcccctttccaattagtttttaagtcaaatcaatcaaatttcaaagagcagttatgcatttatttttaaaatttaattaggaagaaattcgaagcaattaatgaatgttatcaattataatgcattaccatgagaaaaccccaacaacccttaagtatgattgaatattttgtactctgtaatgatgaactaggcttagccatttaaaaaaattaactcctgagcttaaaataatctcaacaagtcaaacaggtctaagtgaacctgcagtgaacctaggagagaactttctcatgctacacccttctttgcagtaatgggagggtttgatctcagagggaatacctttgtttcatcgtgtcctgttaatatattaataagttcaattgccagctgttcattttcatgatgacacagggatatctttatttctatttatcctgtatataatcaggggcaccatgaccctcttctttgaaatgaatgatttcaagcttaatggaaatttaaagtactatatagcaaaactctatgatctgagtcctggaggggaaggggtgagtagacattagataataaatccccaatgaaagccaagagaactcgagaaagcctgaccattttggtccataaaatgtgtcaggggtcagtgctctgcaaatgggaggagatggggaatgaaggtttcataatttagtgatcacccaaatggtatcggaggagtttgaactataaagagaaaagtagttgcctcttgctgaccaccaagattgctacaggtttcaaggaaagagagcgctagtcatcacgaccacttcatttggtaattatttatgaagtaccttcctgcccttgatgacgaattctttctttctttgaaacctgtagcgatcttgttggtcagcaagaagcaactacttatttctttatagttcaaactcttatgatacagttgggtgacaactgaattatgaatccttctttccacatgtgccatttgcagagcactgacccctgacacattccaagtacagaaatggtcagactctcttgagttctcttggttttcactggcgatttatcattaaggatgtaagtataacttaactttaaaaaagactcgcatatatgaaaaaatcagcataatcacatagaaacgcaattcagggatcaaaatgctatttttaaaaaatcttttaaaagtctccattgtaaaaatgattactgctcaactctgagaaaagtaatgataccaaaagaggttaaccagaatgaaatgtacaatgttggtaattaatgattactttagataactatgtaaacattttttcagaggcacttgctatcaattaggaaagctacaatacacagataagcaggccttgtcctggtttgttccatcggctagagaagcagcctttagctaggggtctttattaaaaagacttgtatacctcccatcttgacaacctaaaagttcattctctgaacataaacacaacccattaagtacctgtcatgaggttattacaaaacatataaaaatataaaacttggtctttgcacatttataacagattcaggttgtttggctaaatgtacattaaatgttcaagagtcagcaagttctgggtatgaaaactaatatttaaacagagaaatgccttttctgagaaagaaaacccctgccactggctttggagagtaagaacacaagccagcagatgacagggaaggactctatgccactagttaaaaataaatgacagagaagcccatgcaaaagcaggccagaaagatgcgaatttagagaatggcaaacaaaacagccaaaataaggtcaaggacagatgtaagacagaaggaagtcaaagcaggaatggcttgagtttgaaggcaaaggcagaattctgaatttgacagagggagtgatgggcagccatgtggctagttagagggtgatttaaagttggccaatgaaagacaaagtatgaaagggaaaatcagttcttcagaaatgattattaaaaattcttgaaggcaagctacttacagccatatttcagtacaagcatggtgaacactgtataccaatataaggagtgttccttattttaaatctgttctcatctattttcatggatttcacatatatatgacccatttctgacagcagggaaggtcactttcatattaatattcaatatgtcacaccactgtcatatcaactatcctcaggcaggtctgatggctggttgacagaaatgggcattttgagaggaaattcccagaaccaagtaacccagctggagaataccgctgcaggaaagacagcagtactatatattaactcagcagggaaaacagctaaattgttcttcctgcttattaatagaccaacatttagtccaacagctctaattttctgtggaatttttgactttctctcttgaaaactgaaagtcatgttaatggttttctgcataatgcttgtctgtatggtttagggatatgagggaagattttttcaaaatagggaagccggtccaaagaatattagccttatcttttccctaaatactatatatgtgagactatcttaattcaaaggaggcgatatagtgaaaagcttttctgtgctagttttagtaataacttgtaataatgggaaaaaaagaagattaagtttgagtgaataataggacgctaaaaaagaagatactaacttggctcttaagtttttagtgggacttactgctttgatttataagcaataatcatagaggcagaaatgagacaatctagcatctaagcattcaaatgaacattttaagaattaatgaggaaggaaggaaaggagggaagaaggaggaaggggagaaggaagaaaggaggggagttagccgggaagtaaacagagggaagaagggagagagaaggaaggaaactagacactcttaaagaaagcatcataacttaatatttaagattcttattttatacaattaaaaatctcgtttaattatttaagaaagaaaacttccacaggtataatgtacaactgtaccttagagaccatgtgatatgtattcatagtctgaaaagtctttgtatttattcttgggaaataaggactacacactcaaaaagaaattcctgcagagaggcaggtaaatggacagcacgatttacagtagacctcacatttacacattggcaaccctcacaaaagctgatatgccctgacgtttatttcctctgaacatttacttacgagtgtcaaagtctgaaagaaacctcattacaaaaagtgacattttatctccatttgtgcatttatgaacgtattctacatttttctgaagtgttatttattctttactttaaaaatgtactacccaatttatctatgaggtctttcagtctcaattcatgacaacctttgtacttactgttcctaaaaactcaaagacgagtttctgagctttgtaataaagaacttcattctgctgtacaaattaaaccaggtgtaggtaaaccagtgtaggtaaatgaaaaactggggttaaaaagaaaaagatgccaatctatagtaggctcagcttttttttgagagagagattaaggtgcatacagtcaactggtgtgaaggtcaccaaacaaaatgttgcaatcttaaagtgccactgacatgcagtcagtgtgctgcagcagctcaggattaatccatgcagctctttctccttccttgctattgtttcagaatccttcataaatgtgcattatgaagtctgttatatttgcaggaaaacattctaaaaattagacaaatttttcttcaaattgaaataaaaatatgtaaataatataacttttaaaaatttggtttcccacacccaggttttgttataggaaaagtgacccacaggctcaaaactccataaatatttccttgtgatacatatgagctatgacaagtctaaccttaattatttattatccacttactaatgacgtctaaattaccaaatatttcagttgaagattttctgattttcctgggaaacagctgaaagctacaagccactacatgtacttttttttttttttttttttttgagacagagtctcgctgtgtcacccaggctggagtgcagtggcgcgatctcagctcactgcaacctctgtctcccagattcaagcgattctcctgcctcagcctcccgagtagctgggactacaggtgcctgccaccatgcctagctaattttttttgtatttttagtagagatggggtttcactatgttagccaagctggtcttacattcctgacctcgtgatccacccgcctcagcctcccaaagttctgggattacaggcgtgagccaccacgcccggcctacatgtacctttagctttcaaaagtcagagtcaaaatcagaaggaagcattcctggttcagggacctctattctctttcacctgctcctgacctgctgctttccttttggtgaggacagctccttataaagcaaatagctccccactctgaatggaaaggctcatctcctcagtccatgttgcaagcacaaatctccctgatagtcatttagggagtgaatcagacttgcagccaataagcacaaagctgacctttaaacctcagcctttaatagagcattgggttattttactttgtgtttgctcaacatttccaggggtcaaagggcctggtttactgacgtggggtgaactagggaaccttgcttcaacttctatgttgcaacagataaaaaagcactgggggctgggctggtaggggcctaagccccaacctcaagtatgcccagtatcacaggtgttagaatacattctgaagtctttagcatttagagatgactagattgcccgaggctgaggactagcccttagctaacaactatgggagaaatgagaaagagtcttgggggctggggagtaagctttcacattttcccagtactgcaccaaatgacagatcttgaggtgaaaggagaaatcagttaatactgattctgtctttatttaaacattaatatttattttaccatgggtatttgtgcattacttttgatttttaaaagtagtgcattaaaataatatttgttgtgattgcctggatttttggcacccccttccgtttggtgcccaaggtgcgtgcctaacttccctcaccctagtcctagccctggtctgtcacctcatggttcccatccaacattttcacataaaaatgggggtagatttaagcaggctggtggagatgcttacagcagggttgagaaggggagaagtgtccaagtcatccaagaaaatcattactgagcatgtagtatgtgccagatgtacattcctttggtcctcacctatgaggaaggcctactaatcttctgctgagaaagatgaggctccgagaaacatgcttccttccactttcctccaacccaggaaccggcgctataaaccacctggtgctcaagcagaaacgtgggggctgtccatgacccctccttgctaacccacctgtaactatttatgatcactcaaatagtaaatggaggggtaaagttcaaaagatggtctgcttgatgacaatgtccacactctttttgctatatctgcaacctctcccaagaaaactggtcttgttaaattgttctggcatcctgttggctggtccaggacaaggttaaattatttttaagtgctgttttgcaaatttctccagtatatttcagttcgaatttgaataccagctctatctctggcccaggatgctacttgaagcccgacatctctccactcagatatctcacatccatccaaacaaacaactccaaaataagattcttgaccttcctctcaaacccttattctccccagtttcctccatctcaggcactggcaccaccaagtgtcttgtacacaagccggatacctgtcagttgtctttgaaacttccctcctcttctccatccaaaccatcaccaactcttgtctatttcagtagtcaaaacaattaatagcagcaacagttattaaagcattcactatgtgccaggtactcttgtgatgcatatacagcattattaactcattcgattttcataacaacttcacatcatggctcctatgattattttcatttaacggtggcataggaaaattaatttgcccaaggtcatacagctagtaagagaggaagttagtactataacccagtcattctggcttcagaacacacacttttagccatgacactctatccaagataatccccaatccattcaccttactcgttttccactgtctcattttagttcaagctcactgattttagtcattgctcactctagcaacagcaaaggtctcccaagtggtcgtcttggttctgtttctacctcattttcacacatcaatcttcatgaaacagctagcaggatcatcttaaagtttatattggatcacgccatttccgctgctaaaatccacaaaaccactcaactactttctgaatgaaattcaaactccttaatgtggtctctaaggtgtatgtaaaccggccccttccctcttcccagactttgtctcctacccttctctaccttaccatctttctattccactggccttcctgctcatctttaaacccagcaaattcattcctgtctcatggcctttgcacatgctgctccctctgcctgcagtgttctcctagccctcaagacagcttcatcaaatcctcaatgtgtctcagggtactttcttgacccctttccccaaactaaaataacctctgtattattttatcttagcacccgctctctactttcatggcaataaaaaaatgcattccaggaggaaatataaaacgaaataaaaattttgcaaatcatatctctgataagaaacttgtatcttgaatatacaaaaaactcaatagtaaaaaggcaagataatttaaaaacaggcaaaggatctggaatattattaagcaatataaagaaatgaattttatcgatacatggtatgacatggataacctttgaaaacattatgcttagtgaaagaaatcagtcacaaaaagtcaaacatattgtattattccatatacatgagatgtccagaataggaaaattcataattcatacagacagaaagtagattagttgttgcccagagctggaggagggaatgaggagcaagtgttaatgagtgtgaggtttttgaggggagtgacaaaaatgatctaaaattaatagtggtgatagctgcaaactgagaatatactaaaaatcactcaattgtgtgcactttaagtgggtaaattgcatagcatgtggattctcaataaagctgtttaaaaatagaatggaatgtagtttttactacactttaaaatggacctgtttggcatttacaaggcaggtgtggcttaactaagagtatctacaacttgcttttgataggagaagataagttttagatgaaacttcctcatatagaatttataatctctctctcttctcataattcctagtctttttgtctttttctatagatattgttgaaatcttagaataagatgtatagaattttagcatgggacaagatataagagataatgtagtctctgattttagaggaaagaaaacatactcggaaagaataaacatcctttccacgatcacaaagataatgagaatgagaatcagagctttccagatcaaagctttattttttatttttcaacagcaccatagaaaatgtagagtagtgaatggtattttccaaaatatcttcttgaccaaagtcgctaacaattgacaaggatgaagtctacacagagattgctttttattgcagtcattccctcagtagcccttgaccgagtgcttggtttgtattagtcactttgggaataaggacttactttttttttttttttttttttttttttttaaggcagtattgagtaggaagtttacattggagtctctccctcaagagttaggtcttcataggtactgaacacttacaccaatcacctccattactcagctcctaagcagagatggaagcctcctaggtggaatgttgaatttgattttgaattctctcttcaacattttcagcataaaattcttttccactcctagataatatgccttttctatcttctcttctctgtaaaacacttggctttgagatcctgagaggtcttacttagttgtgggtctttgattatctcaggttttcttttgtcagcatcagtgggaaataagaagtgaaaaagtgatttcgtttcttagtgtttctgagttaataatggaagcacaactttggttaaatcattacttttgattcaaattaaaacactggtatcaacataatacttttaaaaataatcagactagacaatctgttcagataagcatttgacctcaaaaatattttttacttctatattccttgactaccgcccctttccaactttcctctatttcagaaagtttaaattgcctaaaagaattccggcttcattcagtggggtcttttattaataggcagagaaaagagaactgtattataagactcaatgacatataggatggatttttgctactccatttcgtctggctgatgacaagaaatgcatgtgtccatgctcagtgttggtttaggtgggctggagaaggtggggctactattttgacatcactgttattgctcaattctctgaaatatatttttaaagcattttatcagctgcttcactgaatttctctgcaaactattatcttctcacataatccagtaaaaaagaaagcacatagtccttttagattcccaaagaatttaaaaataagttcggccaggcatgatggctcatgcctattatcccagcactttgggaggccaaggcaggagtattgcttgaggtcaagagtttgagaccagcctgggcaacatagtgaggcctaatctctaagaaaaaaaattttttaaaaattaactgggtgttctgtcacacacctgtaatcccagctactagggaggctgaggcaggaggattgcttgaccccaggaggtggaggctgcagtgagccatgatagcaacactgtaatccagtctggatgacagtgtgagaccctgtctaaaaaaaaaaaaaaagttaaaaatgtttatgaagcttataaaaatgcattcattcaatctgttttggttgtcacctgatagaaattcttgaaaaggcaaccaggttcctctctactatatgggactatgaaatagagttttctacatgatagtgaatgatagtaataaatatgtttaaccatcttcctatcattcagtaaccagtttgtatactatcttatacaaggtaagtattatcttgtattaaatattaaaaatattaattaaaacattaaattaaaatttaaaatattagtttaattaaaaatattaaattaaaatataaagataagtattaattatcttgtataagatagtaaacaaactgcttactgaatgataagtattatcttatgcttatctgataatataagatagtatacaatatcttatacactgtcttattatataagataaacttactaataattctctttcagagtttcattgtaccattagttagcatctaacttaggtagagagtaaagaggcaaaggtggtgaactgtgattctatctaatttctgattttttcattctagaaaaagtttaggggaaaagagaataaaactagtgtaaattgtaaggtttggggctttttggtgtcatcaattggcaaacctctcctaattgtgttcctaattaagctttattggactacacaatatttagaagggaagaaaaaagagagggaggaagaaattattaattcacagaaacttgatttaattgccaatagttaaaaaccttaagatttcacacaaaaatgaagatttctattttttcttcttaaaacaagacaatatagtcaccctaactaagcctgtattaccacaggacaatactgaggggtagctgtcctgtttaggcaagctatactcacccttcaccttttcctggccaggctggctaaattcttttatcctcttgatccctaaaggcattttgtccatgagacccttctgatctaggccatccttcctaacattctggccattaaaatgaacacttggcatttgattagcaggtatagatgcataaaagatgaatgagaaaatatatgtcttctagtctgactctgacctcagaatctaatgtcttcctaaataagaaaatacagcacacatacctactttttaaactattttcatcagctgaccaaaaatctggatttttctgacattgtcttaaaaggcaacaaactagtgacatgcgaacagaaaccacaggtttaaagaacattgctgaaaatattatacgtttggtatctgtgcaagtgttttctcagagtgctttcatctttcctatttttattttttctaaaaataggactgttttaatatcaatatgtcatcaaataatccatttaagcagcagattaccaggcaaaaccaagaaacatcaatagataggagtgtaagacactgtgtagccctgcacttctctgaaacagcagatcagatttcccagtgaggacatttgcctttagagtagagttaggcgcatttgaaggctataggagctcttcagagtcatgatggtagtaattactcagtaactgctttagtgatttaaagcagagcttctcaaacatgaatgaatcacctgggcatcttgttaaatgaagattctggtccaacaggtctggggtggggcctaaaattatgcatttctgacaagtccccaggggaagtctatggggctggcctagggtccacactcggaataggaaggttctaaagaaatacagcattgtaaaaggaaaaataaacattttgaggctaaatgacagcagtcattgtgggctgataatacctgccagacaaattatctcagcatcatttcttgttcctaggagttgaagcagccaaagttggctgactgtgtgctagctctctttagagatcctgagcaggctgaagaccctgttgtactgggtagttctgaagcacaaaagaccacggaagagttttttaatcaaaaaatatttgaggtaatctctgaaatgcttacagaagactgcaatttggtctgtagtttacattcagaataattgcctttgaagatttaaaaaaagaaggagctttgaagaataccccatttgcaacatcattgcctctcaaccagttaaacattttcgattctttcagtccactcagtagggtcctagttaatgcactggttactaacaatttagcaattagtttcaatttcctccaccaaacattttataaatggtaaaactgactaactcagatacccactccctcccctacagtgcagcaaatgtatcagcaacctgaaggaaagaatgttcctccatgaacatccaacttaactgaggagtgatttaagtactgagaaaattaatctcatactattcgaaaagaagaaccgaactgcaaaccaatagtcacattacagaaaagataatacttagctaaagcttcagatgtccatgtaggatggccttcaccttcaaatacgttaaatattataaatattctaaaagaaaaaaattcaaggttcagttttttcctcttttactttctgatatttatgtatttattatttatttataaatatttatatatttatttattatactttaagttctgcggtacatgtgcagaacgtgcagttttgttacataggtatgcacatgccatggtcgtttgctgcacccatcaacctgtcacctacattaggtatttctcctaatgttatcccttccttaggcccccaccccccaacaggcccgggtgtgtgagttcccttccctgtgtccatgtgttcttgttcaactcccatttataagtgagaacatgtggtgtttggttttctgttcctacgatagtttgtgatagcttgctgagaatgatggtttccagcttcatccatgtccctgcaaaggacatgaactcatcctttttatgactgcatagtattccatggtgtatatgtgccacattttctttatccactctatcattgatggacatttcggttggttccaagtctttgctattgcgagtagtgctgcaatgaacatacctgtgcatgtgtctttacagtagaatgatttataatcctttgggtatatacccagtaatgggattgctgggtcaaatggtatttctagctctagatccctgaggaatcaccacaccgtcttccacaatggttgaactaatttacacccccaccaacagtgtgaaagcgttcctctttctccacatcctctctagcatctgttgtttcctgactttttaatgatcgtcattctagctggcgtgagatggtatctcattggggttttgatttgcatttcttggatgaccagtgatgatgagctttttttcatgtttgttggctgcataaatgtcttcttttgagaagtgtctgttcagatcctttgcctactttttgatggtttttttattgtaaatttctttaagttctaatatccagaatctacaaaggtttagtttttatataggtacttataaatatttttatttgaaaatgtatttgtttgtattttgggggcataatatcacgctcttattaatatattcacaagacattttggtaaacagagcagttaaattttagccattcaattttaagaaatcacttgaaaccatatgggttaggcagtgcctaatgttttacctgctgtcctcttttctttgcttccacttcctctaaaagattattattctatgctcattaaggacattttatttagcacattttctaaatggcttttgagaatgtattatctggtgaactctgtctttaaacaccaaaatggaaaggttaaagtgacaggcttatctatccgagatgtatctttctaaaaatacgagaaggttattattttttttcttgtttcataccatactgggtaaatgaatctatgggtttaaattataaagcaaacatcatcaggaacatcacagagttcagagatgatcagacaaattgcactgaaaaagtttaccctcaattatctttatcagcaatgggaaaagtgacaggatacattcaaaccactgtgttgggtttgtaatattcatgattattatttttgaaccagatttctttgtatttccttaacatgtttgtacagactaatatttaaacaattttctttcattcctttaatctactgtaattaaagggaagagaacataaagcttaactttataattcactaagtaatgattggctatcttgagaattatttgtctatgagattgtagctccagagttatgctgtagttatgactgagtgtcaggtactaaaacttttagaggattcatccagaactgcctggtcatagaaaagatggggaaaaggtaaaatttgtaagaagtgcttccaggaatcttagtttctatttactaagattctgctccagacaaaacgtcacaattttagttgataagcacttcatgtgttctctcataaggttatgtaacttcatctaactcttacagggttatttgtattttagcagaagatttgcattttagcagaagattccaaaagcctggaaagttgtaaagccccccagaagtataagagcctcactggtcaattgtaggggtttgcaggctagaggctatgtatctctaaaatttaattcaaaactgtatacatgttttatgcacaccattttctaggcaacagtacagactcttaaatggttctgcaatccctaaaaggtcaagaaccactgctaataatggaatatgagtcactaagaaaaaagaattcatcagcatcactttggagaggttggctacagtcttgggttttgaagtgaggcaggcctggggtcaagtctgtagtttgccatttactcactgtgccaccgcaagcaagttacttaacttctctgaggtaggtttcctccctttataaagtggagataaaagtagcacctacttcagtgggatgttgtgagaattaagcgtaatgtttatcaagatgttggtacatagctggtatactgtatactctcaataaacagtagctgctactcttagtactgttagtattacttgctttattagcattataaaaaacattgtgaaggcagaggacttatctgccaagttaaggcagattattctaactcttcttgcagctggctaataaaatagagatgtggctaattaacttaatgattaatccatcgttgaccaagtcaaagcttaacagatttgttctttaaaagtgatctgattttatttgcattaactataagccaactaatctagtgaaatgaaataattgagggttttaaatattctctggtcttctaagaatttcctaaattataaaatgactatgatgtctatactaagggggcatgtcatacagcatgcaaaaataagcataaatttattgtcagctatgttcaagacaacatcttagcgttaaaaatctggtgtcttcccaaatggtcatcaatgagacttattaggtattacggcacatctttagcacagattgccatgcacctattaaaaataattttaaagaataatattcaatgacatggaataatgttcatgatacatttagtgaaaaaagatgtccacaaaattatataaagcctcatcctgtttctgtacaatgatgagcacagaaaactgcctagaaggaaatacaccaacatttcaacggtgggtgacaagacaataggtgagtttctaaaatgagcattcattacttttgtcatcagaaaaataataaaaagcattagaacataatggctaaaaaaaaaaaacttttcagcagcatgttatcccaaaaagggccccagatggcaaggacttgggcttgagcccaagacacaggcacctttaagggataggcttggacaagttacctcctttcttttgggccagatattattccttagaattaagaaggtttgactaaatgatctctatgtatctctccagtcttacattctagaattgcatgtctcttgctatgagaagaagatgagtttttaagaaaattcagacaagtagtccttcaaattaagttggttctattactcacggcatttcaggagtaacgtattgccgaggtcatagccctgttctaaactattacatattagaaaattatctatgtgattaaatttgttctgtggtaatacatagtaaagaaatcaatttacttggagctccaaatcaaaacagaacaaaacatgttttaaactgctaccatttggctctgtgtataaaatgaatgcataaaaccctactttgcattgtccttgcaacatacagaggggagaaaattcttcctttgttcctgcccagattcttccccttggagccagtgggctcttcagatgccactgaggagtttcctcgaggtgcttttcaaatggcattgaaagatggcagcagtcacccagaagcctgggaaaaatacccagtttctcaggctaccaagctcaccctcatctgggcaaggcacccagctgagaggaactagtacccaaaggctgatctgcttctatgcatgagcaagaacaattttccacccactccctgtaacccccctcctgtcactgctatagggtcacacaacttggcttccctcctggacagaggggaaactcattccacagtatctatttgggctctgctattgacaaagagcttgatttgccctgattagtaagacagtattgtttcctctagccagggctagttaagggagaaggaagaaatatctgaaaccttaatggagtgttaagggattaagatttctatgtaactttgttactagaaaaagtgttgaaaggaacggggaacggcttttctcttcacaccatctcatttctaaatttgataacaatctttttattttgagacagagtctcatcctgtagcccaggctggaatgcagtggtgtgatcatagctcactacaacctcgacctcctaggctcaagccatccttccacctcagcctgccaagtagctgggactacaggcacatgtgcggctaattttttttattgttattattactattattttgtagagacagggtcttcctgtgttgcccaggcagctcttgaactcttgggctcacctcagcctccacaaagtgctgggattacaggcatgagccaccccgtccagcctacatttgataataatctttcaaagactccccgatactatatttttcaaaggcacaggtaaatatgttgctgctacataaagcaagtttaaaataaaatatgctgcttggggaattttcactgtgattagaaattgcttcaaaagtatacttgatttggacttagagtctcatggtagacaaactatttcccagaaattagaaaggcagacttgagagcagtctgtcagcaagcattgccaactattctgtaagtattaatgaacacccatgagtgcagaactattaatttacatcacagtgccaccactgatgacactgaagcagtaatctgttaaatgctatcccctttgtaagagttatcgacactttgaaaatgcagtaagaacactcttaagaaatggttgcggctgggcgcggtggctcacgcctgtaatcccagcactttgggaggccgaggtgggcggatcacgaggtcaggagatcgaaaccatcctggctaacacggtgaaaccccatctctactaaaaatacaaaaaattagccgggcgaggtggcaggcacctgtagtcccagctactcaaaaggctgaggcaggagaatggcgtgaacccgggaggcggagcctgcagtgagccgagatcgcgccactgcactccaacctgggcgacagtgagactccgtctcaaaaaaaaaaagaaaaaaaaaaaagaaaaataaatggttgcattagtttggttaatatggcacattacaacacaaatgcacagataaaaataaatctatgtcattaaactttagcccaaataatcaatggtgatgacagtctttctaagatcttgacttaatattttattttgtctaatatgaatattgccattttagctctattttaattagtatttttccaatgtagctatttccatctaattactttcaaactttttgagttactatttttaggtctgatgcttgtagacagcatatacctggattacgggttttatgcaatctggaggtctttctttttaagctgaagaatttagttcatttacttttaatgtgattaaatatatatttggactcatttcagttgtcttatttgttgttattgttttctgttgatcacactttttttgtatttgtttctttcctgatctctattgaattgattattgaatttattctcctctacaggtttggagtcaaacattttatttctgtagagattatttctaaatttgtaaaccaaccaaaatctaaagaaaatctttttttatcattctataaaataatagagactgtggaagttattacttacagttccctcttgctccatgctgttatagtagttaagttctgtatttttttaacaaatacccacaaaaaatagttactattaatgtcactgttgttattttacaaacagtacttatttagatttcccattatgtttacaaaattcttcactcactattttttttttcctgcaacctacaccttctttcttggttcaattctcttctcattcaaatatattctgcagtagttatttcagcaagggtctgtgagtggttagttagctcagtcttctttatctaaatcaatttttaattcatccttagttttgaattatattttagctagtatgggattttgggtcgatgattttgctcaggattctgaaaaacacattctgctggtatctagcgtctattgttgctaatgaaaagttagctggctatttaattgatttctttgcaagtaacgttatctctactccaaccccattacatttgattggttttattctcatcaggatgaggtgaagtgggaatctgcctggggtttagaattattttttgagactgagtctccctccgttgcctagattagagtgcagtggcattatctcggctcactgcaacctccaactcctgggttcaagtgattctccctcctcagtctcccaagtatctggaattacaggcatgcaccaccatgacaggcttaatttttgtatgtttagtagagatggggtttcaccatgttggccaggctggtcttgaacccctgacctcaagtgatctgcacaccttggcctcccaaagtgctggtattacatacttgagtcagcgcacccggcctagaattttcctttaatctgaacctctaagtcctggctgtatgctagttgatttcatcagcactatcttcaagttcaagagatttttttcccacatttatatctagtctgctctttaaacagactttaaaaattggctttggtccttatttttattaaatttatactttcacgtggcttaaaatgtcaaataattttataaatttgttatgaagaactactctcccatctcccccttccatttcttccttcctagagataatcactctaagctctttatttatgagaagggagtctttacctccatgtccataatagcatgactgtattatgtgatatttcagttttaggcattatctatttactccccagtatggagaataagcaatcagctggttttcctctgtgcccaacatacatgtgcagccttctgaattagtttgtaaatgacttccttctttctatttttttttctgttctcccttcctgatatttctcttattaagatgtactgctgccaaaactagtcatttgattatcttgggttttattgttttttttcctcttatttaccatctccatttttttcattctttctgggagatttttctcaattttatcttttacttgtagattgatatggttgggcagaattgagggtaccctcaactcatcatccttagtttctatcacttgggctactcaaatttcccttagaagacttattttcaaactaccacctggagagtgaaggcttggatggtagggttccggaaacccagtggggaagagttctgctggctccgtgttcagtatgcacacatttatctaattcttgtttagagtaccctccaatctcaactacaggcacactttggagatactgcaggtatgaatttagaccactgcagtcgtggatattgcaataaagtgagtcacatgaattttgcttcccagggcatataaaacttgtgtttatactatagtgtagtctattaagtgtgcaatagaattatgtctaaaaataatgtatataccttaatgtaaaatattttattgtgaaaaaatgctaatgattatctgagcctttagtgagtcataatctttttgcaggtgaagcgtcttgtcttgatgttgctggctgctaactgatcagggtgatggttgctgaaggttggggttgctgtggcaatttcttaaaatgagacaataatgaagtttgctgcatcaattaactctttctttcatgaaatgtttctctgtagtgtatgatgctgtttgatagaattttgcccacagtggaactcctttcagaattggagtcaattctctaaaaccttgccactgctatatcaactaagtttatggaatattctaaatcctttgttgtcacttcaacaatattcacagcatcttcaccagaagtagattacatttcaagtgacacctctttctttgctcatccataagaagcaactccttaaccatagaagttttattatgagattgcagcaattcagtcacatattcaggctccacttctaattctggttctcttgctacttccatagcatctgcagttacttcttcctctaaagttctcgaagtcatttgtgagggtcagaatcaacttcttccaaactcctgttaatgttgatattttgacctcctcccaggaatcacgaatatccttattggcatgtagaatggtaaaccatttccagaatgttttcaatttactttacacagatcaatcagaggaatctctatctatgcagctatagccttaagaaatgtatttcttagataataagacaaaaagagtcaaaattactctttgatccataggcttcagaatgaatgttgtgttagcagacatgaaacaaaattaatctctttgtgaatcttcatcacagctcttaggtgactagatgcattgtcagtgaggagtcatattttgaaaggaatgtgttttttctgagtagtaggtctcaacagtgagcttaaaatattcagcaaactaggctgtcatccaggctttgttgttccattcatatagcctaggcagagtagatttagcatagttcttaagggccctcaggtattcataatggcaaatgagcattgacttcaacatagtcatctgctgcattaacctctaacaaaagggccagtctgtcctttgaagatttgaaccaggcattcacttctcctctctagctatgaaagtcctagattggcctcttcttccaacagaaggctgttttttctacattgcgaatctgttgtttggtgtagctattttcatcaattatcttagctacatcttctggataatttgctgcagtttccacataggcactggtgcttcatcttgtacttttatgttatggagacagcatctttcctaaaacctcaggaaccaacctctgcaaacttcacatttttcttctgcagctttcttacctctctcagccttcatggaattaagaaagttagggctttgctgtagattaggctttggcttaagggaatgttgcggctggtttgatcttctacccagaacattaaaactttttccacattagaaatgaggctgtttcactttcttatcattcatgtgttcattagagtaccagttttaattttcttcaagaacttttcctttgcatgtacaatttggctgtttggcacaggaggcctagcttttgacctatttcagcttttgacatgccttcctcattaagtgtaatcatttccagcttttgatttaaagcttaaaaaacgggtaactcttcttttcacttgaacacttagaggctattgtagggttactaactggcctaatttctacattgctgtttctcagggagtaaggaggtttgagaagagggagacagatggaggatcactgagtcagtgcagcagttagacacacacatttattgattaggttggccatcttgtatgggtgtcgtttgtactgccccaaaacaatgacaacagtaacatcaaagatcactgatcatggatcaccataacagatacaataagaatttaaacattttaaatgttgtgagaattaccaaaatacgacacagataagtgagcatatgctattagaaaaatggtgccaataaatctgcttgacgcatagttgccacaaactttcagtcacatagttgccacaaactttcagtttgtaaaaaaataaattaatatctatgaggcacatagatcttaatttattaaatcagggtaaagcagggttcaataaaatgaggtatgcctatatatctgaggtccaaactccagtgacacacgcacaaacacacagacacatccccatggctttgccaagctgactactactaattcttcaaaacaaattaagcatcacctccgctggaatgttttccctgatctcctcagtagacaccccaatttaaatgtgtcatagaaaacaggggttccctccatcataacaggtattccctgcctctttaattgcctatcaaaacatctatttcactccagaaccagctggatccgtcttggatttctgggctcatagcacaatttctagcacataatgagctcaatacgttcatgagttattaattaattcttaaggcagccccattaagggagttgctcatatgcacaggagccacccaggagctgggaaaacacctcggtaaactccactgatgcctttagcatcaccattagccctatccctgactgtgcaactccccaacaaaccagggaaccctagacaagcttttcccctcagatgtcttcctatgtctcagatgttctcattacttgaaatatgtaaatcaggggaagcattcaacctacttctgaagagtataatgaaatatctatgaaaatgattattactgctttaaaacacaatggtgttagatacatgcaaaaatcaagctacactacaatgaggtgtaagaaaaccaggcaagaaatagctactgtatagaagaatacattttattaacttatttagagaaaagtgttgaagagcaacaaactatgagcgcgtggtaaagagtgaggtacgagtaaagaatggaaaaccgtttgggtaacttatttttatacctgctttaactgtgacaggcataatcttttagaatctgcataaagtttcaagtgagcaaagggaaacaatggaacaatctgatgaagactgacacttcaaatgaatgaagtcaatgtcttccatagtgtagaattttaaagtcagaaggttagttagtccagcttcctcctctaggtgctatccatgactgttcttctagagggtcatttagaatccaagaaatactcccaaagctgaagccctggcaccttgctggatcccatcactgataggttttgttacccttgagtcatgtgactcacactaactttacccactgctcctagctttgcttgaatatcacagaactctaaacaccagacgctagataggcacattacgaatactctctttgactattctgaacaatttatgagaaacaaattgtcactattttgaagatgaagggactgagtcacagaaacattaaggatgttattaaggactcacagtcaacaactggagaggagccaatagtggacaggtagtatgatggagtatttaagaacttacacttcacgtgactgcctggattcaaatcccagttccaccatgtactagctatgtgaccttaggaaagttgctcaacctctctaaatctactttctaaggctgttacgaggattaaataggttaacatacgtaaagtacttggaacggtgcctggtacttaataagccccatagaaatgtttgttggatatataaaaggatggcagaactgtgaatcaaagccaggtttatctggctccaatgtagagacttttttttgagacagagtgtcacttcttctcccaggctggagtgcaatggtgcgatctcggctcactgcaacccctgcctctcaggttcaagcaattctcctgcctcagcctccccagtagctgggattacaggcacttgccaccatgcccggctaatttttgtatttttagtagagagggggtttcaccatgttggccaggctggtctcgaactcctgacctcaagtgatcagcctgccttggcctcccaaagtgctgggattacaggcatgagccatcacacccggccaagacttttaactaagacacttcaacatgtcaatctatcaagtgtttgaaggctgccacacatctctgaagtttttctcttctccatatattcctctttcctcagtggtccttaatattaactggttgcctgaattttctacatccttctggattttgttctgactgaaagagtgggacccaacattgctacaatacttcagcagattacaataaaaatattacctcccagatttgagtagaattgttcttctaatgcagtggtttgtagaaagcagaagtttccaggagcatcagcatcgtctgggaaattgtgtgacatgtaaattctccagttccaccctagactgactgaatcagaaactctggggatgtgatgcagcaatctgtatgttaacaagctctccaggtgattataacgccgctcaagtttgagaaccattattttgatggagcttaaatctgcaataggggttaaggcatctacatgcttatcagtgcatactaaattaataattgatagtcttttagaatttgggcctccaacatatatctaatgcaatgttgtggttttaaatcctttttcaggccttcttgatttggacccaccattccagtccctcaagatctctctaaatccacactctgtagtggagcattttggctctccttcccagctttgtggcccttgaacatttggtaagcatgtcatccatatcttcatggtgtcccttacaacatccacagagaggactgaggcagagagccagagggctttggcagatcaaccctctctagtctgctgctaatccacaaaaacatctcatgcatatggttgttcaacttgtgaaatttcctaaatactatcagcctgcatatctccattttatccaagattacaccacggaagacttactttgttctaaaaataaaagccagaaacaatccttatgagtagggaagctatggatattcttctgaggcttccctttgttcctccctttgcctactctttcctgtccccacaaccagaagaatatggcctggaagccaggcagaccctcaaaaccttcagaccaaaggcatacctctgctaagaagagtttcttttctctttcaggtatttttagtcttcatagtcctacagagtaggacattttccttaaaaacatttttacagaattagaaattgaatctcagaaaaattaagcaattttttctcagatcttatcacctagctagtagggacacccatatttatagtccagtctgtccaccaaggttcatactttgcctgctatgttatatcaatactactgtgtctatacatgccaggacaaataaaaatgttgaggatctttgagaccctcttaatctactcttcattccagagagtactaaactcaattactgatggacaaaacaacacatatcccagctacctgaatggcaacatcttgaaacatctataggaatccagccctcagtaacttctgcaagaatcccctaaggcgtgaagactcatctggccacaattccttttgtcctggagactactgacccctaaaaaggaatgtcaactgtgcaaggggcttttacacaaagccaattatctcctcctactctctctgccaatcttggaaaagtcaagtcctggacttgttaaagaaggtgattcatctctgtgtggaaagaatgccaacagcaactgtataaaaggtttctttcttcacatccctaattcctgaggacctgatagtcacttactgtaaggtaagtaattgtgagcttccagatttggcagacagttgagtaataatggaagggaacactattcagaccttctctcacagacaggtttcaagggagtccaatcaaattgactgacagaagattcaattcttcttggtgaaataagaaacacaggctcgggagaccttcaagcagcaaatttgcactcttgtgcccttttatttataaattataaatttttataaattcttaatatttacaaatttatacattcttttatcttcctatcttaggagactcaagatgagcttatctgtgactcaccatctgtcctatgctcttatatacaatctacttccttcccgttcttcatgtaaatggactggccaaagctttctgagaggatgagtattataattaagaaacagagtagacaataaggcaaatgataaatttcacaaataaacatgtaatagaaacttcagcattttaacatgtaatagaaaatattgtttataattttattctgagaacctagcatgttcttctaaaagtttcaaccattttggcatatcaatttttaaaatacgattagtgatgcatttattcgtagtctcaggactcagaaaaccaaaagagacaattaaaaagttcattgtatttctctaatgaccagtgatgatgagctttttttcatatgcttgttggccacataaatgagataccatctcacaccagttagaatggtgatcattaaaaagtcaagaaacaacagatgctgtagaggatgtggagaaataggaatgcttttacactgttggtgggagtgtaaattagttcaaccattgtggaagacagtgtggtgattcctcaaggatctagaaccagaaataccatttgacccagcaatcccattactgggtatatacccaaaggattataaatcattctactgtaaagacacatgcacacatatgtttattgcagcactattcgcaacagcaaagacttggaaccaacccaaatgcccattaatgatagattggataaagaaaatgtggcacatatacaccacatatactatggagccataaaaaaggatgagttcatgtcctttgcagggacatagatgaagctggaaaccatcattatcagcaaactatcacaggaacagaaaaccaaacaccacatgttctcactcataagttggagtgggaactcataagtgggaacaaagagaacacatggacacagggaggggaacatcatacactgtggcctgttgggtgttgggggatgaagggctaggggagggatagcattagaagaaatacctaatgtagatgacgggttgatgggtgcagcaaaccaccatgccacgtgtatacctatgtaacaaacctgcatgttctgcacatgtatctcagaacttaaagtataatttaaaaaaagttcgttgtatgctttgttttatgtggtattacactaaacctgccaatcaagaaacaaacactcttttgtagtctcttttatttacaaacaattttcctggttaactgttaaaaataacattaacatatcttcagagcaagtacagtactccttcaaaagcatgaagcataaagccaaaggcaattcaataggatactatcctcaaaatttagtcttcctttggtatgggcacagggtaagaaaatgcatggcatttggcccatcatactcttatacttcctccatagcagacatcactaatcaatcacagtattttttactgctaacctcagagatctggccttgtaatacttccaaacacatcagccctaacagtcaccaaaatctactggagttggcataaaactatttgccatcctaggctttgtgatagtctaccagaatttgtagaatcaatggctactgttctggttcaggtttcctatgtaaggaaaacaaaatcaaacaaaatacagctacagcaactcaaatacacaatccttccaggaaggattctttgatagttcatttaaaaacaaatcctcaatttttcaatggctcagaagactgctgcagaccatatgtgctatacgtaggtaataatggaactggaagtacagggaaaagttcaagcctcaaacataatttacagatgggcagagctgattcaactgtaaggacctgtatcagataggtgactgctgcaatacttgcttttcttactaattgaaaagtatatatgaaatttgtccaatacgctgtaggtaggataatgacttaatatgatgaactgcactttttaattgaaagaacattacgtgtatcataaatcacaaaggaaaactaccacactaatacgtggcattctatacctcatgttctaaaaacaaaatgttctatttggcttgggcctcaaaattcttcatgttctaattagtcttgaaggcaacagggctactttctacaactgtaaccatcatgcaacaaaaagtgagagtctgaaatatgatgtaaggatttttttcaagtgagcaaaaaattgctaaaaatatattacaacaaatacgaatagctataatttgatattatttaagttaatattttattttgtagaataaaaataatttatgaaaattgcaatgatcaaacacaatattgaagaactataatttacttatttagaaataaataaatgtaagaagttgttacaagtgctaccatttgcaatatcttcaatatactttcttatactaattttcaaattacacatacttaatatatatacaatgttagaattgtttttctgtatatttgtataatttgtgtatgtgtgtatatatgtgtgtaatttgaaaatcatatatgtcaacatatatatagatagatagatatagatagatataaaatctgaaaggccatgcactagcaagaagatgacactactagtgactagttctggaacaattaaacatgacagttttttaaaaatgagcaaaaccacacactgtaacacttatgcctaggcgagaacaccaggtatctcatcttcactatcaagcaaattattttaaaatttcccccaaaacacatcatccttaaagaatatgaacaccatcaactgtttaaaaatgtctaataaagtaaagattctatataacagacatcctgattacaaaagctaataaagaaaacatgtttacagttccttaaaagcatatgtaaaatcatgtttaatataatactgctttaaatagctcactcaggtctttctaaggaatctctcaagtaaacaatcatttcaggaaaatctgaggccctgaagatcaggaaagagcctgagggcacagttgggaagctcagaagaagctgctaggtccacccagctgctgctctttggtggggaaaaggcactttcagagacaactcattgtctggcacagattctgcctgcaagatcgaaagtacttccctggaattgtgtctcagcctggcattagcaccctgctgcacaaaccaccttggtttcaccccatggactggttctttcccacagtggtgaaatctgactctccaagggttctctgaggcttggcttcacccagatcacacctgaagagcaacttggttttctttccctctacagggtgttcatagcttcagagggattactgctacaaatgtacaaattaacacaaaagttttactatctaaatttaagtactcatttaggtttgttaattttgtataatcttttaaatttttaaggtattgtttcaatggttgccatcttcaatcagaggaactgaaacaaaaaaattaaaatgaaaaatttactttttaaatctgcaaagctaaatgagtgttgaagaaatgtaaatgattaaaattccaaaaaattagttgcaagtttgtatcatttacggaaccgcactaccaatttgggaacatcctgtgtctcccataacctggcgaatttcttttggattcaaaggtattattcccttcaagttaatgaatgtcctttgggcagcctacatttgttgtttttctcttgaattaagatgagtgtttcattaaaggtatggtttttgggattttgagaaattatctgatagagtatggttttctaaaattaagaaaaaaattaaaattcttattgttattgccttgcatttgagacaattttaacgttcctatttgctatttggacatctcattcaggaatctcaactgaagaaaatgatctcattatctcaatcatgtggacaaacatcatcaaatgcttgcatttgaacactggccaatatataaaaagagacattgggtatttatggtagtggttttcaagattttttttttttttttttactgtaaccccagtcagaattccattttgcaatcatgatccaggacatacatataaaggggtgtgtgtgtgtgtgtgtgtgtgtgtgtgtgtggtttcacattttttggatgaaacaaatgtttcaaatacatttgatatactctaatacttttctattttagtctgtttacttaaaacttttgttgatcgtgacttattatgttaattcaaggcccactaatgtgttggcaggtaagtctgtaaaacaataaactaagtataatgggttagtcaatacacagcagggttactacattaatccttttatagtttgttttctgcactttttaaacttcattagaagtagaaaagtaggaagagaacaaaagtgcttctcaaactccagagtgaatccaaactccaatgcaaatgaatcccctggggaccttgtttaaatgcagatcccgggttcagcaggtctgggctggagctctagattctgtatttctaatcagctcttggtgatgtgtatactgctggtctgggggcaccacactcttgagaaacgaggatatggaagtcagtctgaggagattgagaggaacagacctaacagaaatacagaaataactgcatgggacattccactactttgtagctaacgctgccaaagcaagggtcctaacgcaggatacgtacagcacacacaaggcagcaaaagaaggcaacatcgggtcagtagatctctcagtgacaccggcaccatcataatcttcttctctgtgatctttatccaatttcctttctccataacctacacccgcccaaaaaagtacaagcaatgcaatcctgtttctgactgcttgaaagctacttaggaatagattacctgaatatgtggacagctactagatcaggcaaagcagaaactggttacagaaaaccagcaaaagaggatccaaacaaagagtgtggaatatgtattaacattttatttaaggaacttaaactgtgaaattcacttgtcaaaatggtctatgttcctaaaaatatgtcttaatgtgaagaagtaaatcctatcattcaaagcatcatttcataattctaaacgatatagttagaattaccaaactaggaaatgttgagccagtcattgtaactgtttctggtacaatactgggtttttgtactttcagtctccagattttggagtatgcatatattgataaaataaaaatatttttagttttgaggaagctatcttttatgtcatcattttttgtaagtatctggaggggcagggaatatgttgttcactactgtacccaagcatacctctggcacatatttggtgctgaataaatatttgataacaaaagaatgaatggatgaacgtaattttaaaaataacatgttacatcttactatatactttattagctaatttgccataacatattcactttattgtactgagcagaaacctttaaaaaggaggcagaagtgaaaagtggaattctccaaattacaattgtttacaatgcagatggggaaaaaaggaaggaaaagaaaaaagagatagaggaagagaggggagaaggataggaagaggcagtgagagacagagtacaagtgtaggacaatgattcgtaatttctgggtggagtagaatattggcccacggagcaggaggtgtgtcagaatcaaccggagaaaatgttccaattttccggatttggaaacatctccccctaccccatgagggcgaagatcatcatgatgaaaaagcagctataactgatgaaaagcttagggggtggggagagattaagaggtagaactaaagtctaaacagtggtttccaacagggatgattttgcccccaagaggatactaggcaatgtctagagaaatttttgattgtcataactgtggcaggggatagggggagcagtgctaatgagatccagtaactagaagccagagatgctgctaaatatcctataatgcggccgggcgcgggggttaacgcctgtaatcccagcactttgggaggccaaggtgggaggatcacgaggtcaggagatcgagaccatcctggctaacacggtgaaaccccgtctctattaaaaatacaaaaaaaaaatttgcctggcgtggtggtgggcgcctgtagtcccagctactcgggaggctgaggcaggagaatggcgtgaacctgggaggcggggctagcagtgagctgagattgcgccaccgcactccagtctgggggacagagcgagactccgtctcaaaaacagacaaacaaataaacaaacaaaaattcctaaaatatcctatattgcacagggcagcccctccgaccccaacaaattatgtgctctaaaatgtcaacaagtctgaggctgagaaaccttgctccaggggaacacgggggcatggtagagacaagaacaagctattaggagagagagcatgcactcaccatgaccagtaggctgtctcaggtggaaagtaaggtcttagagaatgaagacagtatgggaggaagatgatggggctgaggaaggcagtgggagatctggctgtgactcctggttcaagggatccctctttagtagatcccaaatcaaatgctggtgtggtcagcttagtgttccagctaaacgcagtttgcccctcatgagaaccatgcaaaagtccaaatgaggccaacaatcctcaggtggaagtcggggttacaggctgccctgctggtagatgctgctggtgcctcgactatactcccatggcaccacttcagcgcccaccaccttgtcttctgactgccaacacctgcattcctttgcctggaggattactcttggctgcccaagtgatagtcctgaaatgacagggaatcatttgcctctgaaggcagtccccaacaaatgcctgacagattttggtgaataaatacctactcccttgcctctaggatgggtcaaccacaagacaagcattccatgctgtataagagtcccccagtgtgactaagctccaggtgcccacaatgcttaactgatttgataatgcccactttactggctgctgtcccttcctggctcttccccaatttcctactggtactttctttacctcccccctaaaaatcacttgcacttgaattttcatctcagagtttgcttctggggagcccaaactgatggtcagtcttttgaaagaatattgcactggaaagcacatgatcctcaggttcctctgatgtaagagctctctgggtccacagtatcccttcccttaggaggggcctcaggattactagagattggccaatttttccatccccaaagtcccaggcacagaatcctcagaggacccacttccttcagaccattagaaatacaacttcaggaacatttcattctctcccattgacagaagcaaaaccacatattttgctcaaggatggcagggatcaaatgactctggagcacaaacatactccttattagggccaatgtccctaaagtcaaacttgtacaagaactctaatgagtaacaacacttggctccaagaagggactcttactataattctaagaggcaaagaggaagagtgacaactgccatggttcaaatgaaacttgaatgaattgctggtggggatttaaaaccacaaaagagccaaaatgaaacagttatttcaaaacactgccagacaatgaagagaaatgaattgtataataaaatcccttcagggcaatgtccaatcactcatcctccatgtaatggaattctgagatgctaaaaatcttaagaaataaaaggccaaagaaagccaggcattgtgaaagctgccacaggagctctgtgtccagtgagttcctcctatcagtgaaaagaaaatttaaaaagcgatggagcttgacactttctgaacagtctcacaatatcatccctgcagaaatttgaacctgtcacctaaggaagttattgctgccatacaagttgaagaatcaggctgccaagctctgggtctttttgccgtaagccattcttaagcaagtttccttacaaatcatcagattgtggatttttgctaggtttcatctttgcagagaacatccactttggggccatgattcttcccaacttagttgaggaattgagaagatcgtctatctcagtttttatatgtgtggatgcgtttctttctgttttttttttttttttttttttttttttacggaaaaagaaaacagcagagcttttctgcaggacaacctattcccttatttataatgcaggacagcagggccttgtaagtgtatattctggttcatctgaggacacgcggttgctcattttaaaattagattcatcctaattatatgaaaagagcttgcatgtggttggtcaaaacatcaggaaagtattactcagcacgtacctgctgggcttgccttctaacctgcactgaacttgtttaacacacagtccttgccctcttagaacttaaaatctagcaaagaaatatctcattgacaaataaggggtgtggacactgaatagtgaagaaatatagatatatagcaagtgactagacatgtaatactacctgtggacaaaggggtgagggaaagtgtcattggagtggcatgtttcagtggggcagaaccagagaggattttaatctcaattctaattaatcagggcaggatttcaggagttccttgaataaaggatattgggaagtcagactgaaacataagtgggggaaaatatgcattggactccaagggacaaaagtttgaatatggaccataaaaaaaaaaaaaaaaaatccagaacaagggaatcctgagcaggctggaatcctgagcaggtaagtgagtgcctattattattaccttttgcaaaccctgagggatcattaacttggacaactgaccacagaacacacatctttgaggctgaaaaatactaggtcatctataaaacagagattgttatcaataaacagacagtaacaatttaaaactaactaaagaataacttatgcaaaatgatcgagtaaatttggagtctgacttctgggtctctctctttgatttcctgccttttggacaatcatgctccatacatccaaggtacaagtttactcaacaaaattaattttactacttccgtaataatgaaatagtaataaaattgttttccatgtattgagcactcaccaggtactatgtcctggctaagcagtttatagccattatctcatgtaatttcttccacagtgctgtgaagtaaataccaacattctttcccttgcacagatagagtgattgaagttcaaagagattaaacttgccagagaccatagctggaaggtggcaaagccaggcatccaactcagtctgcctttcaatgcaagcatagatacctacccttcccttcaacaccacttcctgattcattcattcattcattcattcattcgttctttctttctttctttctgtctccctctctctctctctctctctctctctctctctctccaatgtcctagctcccaaccaatccaggacacaggacccccagcttccaccctctcacaatacactcaaccaataagagaagggggtttctcttccctgctccgtgacagggcattaaaataggacataattggagcccactgctgtgcgatatgctgagtcctagagaccttaatcacagaccacaaatacactggggattgacagcattatttctcacctattatggaatattaatagttggctagattctgtacctgagcgacattatcagaattaacttcttaatattgcaagtttcccttataaaaaatatttaaactcagaaataggcttgtgaagtagaagacagccttattcagtcaaatagaaagacacatactgtttatttttcttttatatgttctctgcatgatacttcttatcattggttagtcttatttcttaataatctaaaatgcatgtgtctgtcctttgtgtcttacttcttaaaatatttaataataaaataataatgttttcaaaaaggtaaaatatgcatagttagaagaaaagattttctttgttctttttacttacctcacttttattattcatgtcccttatatttctttcatttctatagacctggctgagtatttaataaaacacacttataatttgggaagaaaacaagcaaatattcttttggattagaaaagtgtgtgtcccattatagtaagaaattatagagtaattactaggttaaatattaggaaaattggtatttttaagtcaagatattatgtaaagtcatttatttaaataatctaaaactgttataaaattattccacgaaaaatgggttcagtacctctgtcaacataccaagaatcaggtctggcctttgctttctgacatctctattttaaattttagttctctttaaaaaaaaaaaaacatgttaataatgtgctgataatgatatgaggattcatcagcaagttcccaacactctttgcatactatgaactacacagatttatcaaggaaataaaaatgatggtcaaagacaaaaaggtaaaaccaggtctagcaaggttaaagatgaccccataagggtgagaaggaagtaaggaaacagaattaggtcagataggagggtggtatggcacaaaaagtagaacttagttacctcattgaattaaaaaatagtagcatagtgtagcaaagacaattcactgctcaccaaattcttgctcccctttccacagtacagacacattgctgaaaagcagcttcccagtaggagctatatttcccatcccatcccgctttatttaggtaggggacatgcgatttgttctcaccaagggaatgtgagcaaagtgattatgtgtttcttccaagccaaggtggttaagaagccagcatactcttcactttctggttcccctttcagcggtctgatgcaatgagcccatgacctcagagccatgtcctgaagatggaggagcccaagaccagaggaacccctgaatcactgtggaacagagccatcaatcaatcaggaacagcaattttcaactcacatgagtgaaaaataaacttccatttgtttgagctactgtgcattttttattttatttttgagtgcagatggtgttttactaaccaatatatctggcaagaaaaagaaaatgtctcaatcacttgaattaatgatataatttactttttcatggaatttgatagaatcccagagttttaactctagagtcctgtcatcaaattacagtagctactagccataagtggctattaagatgtgctgcaagtgtaaaatacacaccagatatcaaaagctctttagaaagtaaaatatattcttaatatttttatattgattacatgttaataatattctaaatatattaggtaaaataaaatatagtattgaacttaaccttactggttgcttttcacttgtctataatgtggctactagaagaatttaaactacatatatggctcacgttctatttctattagacagtgttgggctaccaggggttaataaactatagctcatcgcctgttttgtaaacaaaattttattggcacacagccacaccatttgttcacatattgtgtatgtctgtttttgtactacaatggcagacttgagagtttcaacagagactgtgtgtcctgaaaagcttaaaatatttatgatatagcctgttatagataatgtttgccaacccctgggctaaagataactttggaattatctaatatacctacaagtatcattttatgactaaaaattaaagctcagatcagccaagagacttgtccagaatatttttattcttaattaggtgatatttccataatgccacccattcctgcattcattcattcattcattatcttcatccatttctaatctggatcattaaagaaataaaatccccatcagttagaaaatcacttaacattaaatactgaaatgcttcacactaaataatgaaactcaacacgacaatgtcaatgctatttcaatgtaatcatatagaaacacgttcctgtcagacagaggagctataggcatgtacatacaatggcagagaaacccttgaagtaatattcaactatgaataggctgtgagatggtctttaaattaagcttcacttgaaaacattttaaagagaatctatcatgtaatctgctttcaaattaaacttgaaattcccccaaatgtagagctagcttgctaaaaatattcattattggaattaaattagaaaaattttgccacatctcggagaaagtgaaatctgttcccaaagacatcacagcaatgtataactgcctcagctccagcaggcatcatctctcagtggactattctaagagtctctaactgggctcatcacctccagtctctcactcaagacctatcccaaagaactcttttaaaataaaaatctgatttgctgaacattcttaagtctcttcaagctatcaagacaaagtcaatcttccttattgtgcccaggaaggtcctcgccatctggctcctgcctgctccaatggcctcatttatagtcctttgcacatgagtcaggctgggctccttacaatttcccaaatgcttcatacttttactttcacttcataggcatatcatatttatttctgcctagaaccctcccacccctatgggttcccacaatgtacattgtacttaactatgtcattggacttacaaatattttaattgtctgctaaagtattaatgctaccactactataaatagctaatatttagaaatacttgactgtgactcaagcactatattatttcatttaatctccacatatgatagatgaggaaactgaacacatgcaatgaagccaggtgaaaccagcatacaaatccacacatttcccactccacggccccagttccaaacgtctacaccagctgttctcaataggagcagttttgcctcccagtagacacctgataatatctggagacatttttgatggtcacaactggagggttgggggagctattggcatctagtgggtagaagccagcaatgctgctaaacatcctgtaatatatacgacagccctccacagcaaaggattatctggccgcaaatgccatagcgtagaggaattaccaggctcaaaactcaaatagtacctctgctgagaaacactactctacactaaatcacctcctgtagattgccccagaagattccgagcatctcatccatacgacaagaatttttaaatgctctaccatggtgtcttggcacttaccatcgtgtctggcacttggcagatgtcccatgcatttgtgaccaacggacagactccagaagaaaaaaattacttattataaggcttgatttttgtggcaacttcaataaagataaattgaaacacatattcttaatcaatgatacatgaatgcatgtgcaccacattctagtgcatggcttcactttagcaataccttatgtttatgaacccatagagtgggagatagattaataagccagatgcctaggatctttttctcacaagtcctcaaggagatgagatgcttttcaaatcccttataactgctacattacaggacaaatgtataggtttatcatctacataggtcataacttaacttgtttcaaaaaatattttctgtgtaaggttcccttggttcctttttttttaaagaaaaataacacaagactaaacaaccttattctattccctgttgcagctacaattcagatataggtactttattctagatctccagatgttagaagtatagcagaaattgcagtgaagcctaggtaaaattttaaaagtaaacagaaatacagcagaaataaaccattctccagcttatataaattaatacacctaaacagcagaaagaaagtcaaggaaagattatgattataatgttttcaaagggacagaaatttagcaggacttttgcattcttgcaaaacacttcaacaacaggcagcattagccagtgttgtatacaagttgctaggggtttgtgtgtgtgtgtgtgtgaaaaagcaaaaaggttctgttgtggtgctagatactggtcatttgtcactttttatgaactgtattaaaaggttaaaacatatgagcctgatttttaaaaagtgtgatatagtgaactgttcctcacaacctattgtgctgaacttttgccacttaaggttttagacacacaagcacacacacacacacacacacacacaaataaaatggtgatcaaatgaattttgctacctgctctcccctttcttggacatttataatgcatgctagtataaaaataggctctggaaacttttacaagttgttaaactcaagatttcccaaacataattgagcctagagtaaaataaacaaatacagcagtaaaagaagcaaaaagtaataatataagaagaggatctgtcaacatattcaggagcaagtagaagggactgaaaacaatgacagggtttgtggcttgggacatcagggtgactgtagcatttctcactgtgatttaaaagctgagcatgggaatcacagcagaagccagagacaagcagtgccttttccactgtatgtgagaacatgacacacacttgtcacagagacagattctgcaagtatggacatgccagttgttaagacatttatgactataagacagaaatgtgcaaaaagatgaccaagcccaagaaacattatgattgctatcatcaatcattattttctgagcacctgctttgtgtagacattgatgaaatcagaaaaaacagaatcccaagagaaacaaatggcaaagggaagaagtacatctgaaccatcttgagaaccaaggaacaacatgtcacaagagttacaatactcaacaggttcctgaatgtcaggatcatatattatgctactaacaccatgactatcttgtcaacattcctcatcacaaacattcctgagcctccaggagtcaagtaagtatattccctaataaagaagatatgcctgctttcagtctacattcctttgtccacacttttgttttaataaacttgtcactcatgactttcttataaatgcctaaattcttgatcacagaagagaagccatgactccctgaagaccctctttgggaagtaggaagttgaatgagcaattcagtccagaccaatcctttcctaattgtgtatgcctcgtctgcagtccactcttagaacacagagacatgtatgtattgaggtgtttgtgcatgtgtgcatatgatatgaaataaactatagatagtatttgttaaaataggattaggaaaaataaaaattggataaaacatgcagatcagcaagacaaacgtaagttgagatatgtaagccacaagtttcttcactgtgatgagttggaccatgaatttgccttctttttttttttttaatctctaaatcacgattgtctcagcagatctgagacagatgtcaatgatttgcacattgtccattgttcagtaattttcaaataactagaataaaataagctattcaatacaattcaatatatcttaactgctaaaagaatatacttcaagatccttcactgccttaaatgaatgagtagtaactggaaaaatagctttaatagacagaaggcactgtctgacaaatagcaaacaactgtttgcttttagcacataaagtggtaagatgatatcacagagggttttcgttaagttcctttaaattattttgccataaaagattttttaaataaaaaatattgcttcttagaataattttaaacatatcgatggatgttggtcaatcaataaaatcaactgaatgatttcagtggtggttcatgcctgtaatcccagaactttgggaggctgaggtgggcagatcacgaggtcaggagatcgagaccatcctggccaacatggtgaaaccctgtccctactaaaattacaaaaattagctgggtgtggtggcatgtgcctgtaattacggctaaggcacaagaatcccttgaacctaggaggtggaggttgcagtgagccgaggttgcaccactgtactccagcctggcaacagagcaagactctgtcgcaaaaaaaaaataagaaaaaaaaaagatttaaaccactataccaatatcatttaatttctggtaagcactgaccagcagacagtacaagattatcacagattatcttcttgcaaaagcctcaaatgcaagtattctgggttgctacaggtagatctgccttctgtgcaaatttaatgtgtctgagcaagggagatgagccctgttatcaagcacatctacatctatcagaaacactttccagggagtatatcagattgttaggactgactgtcatgatggaaaagctacaatatggttctcaggacagtcaaggttcctaggtcctaattccagactcccctgatttgctatttggaaaagatcctgaagttcacagcagaactcagtttctcaactcaataaaaatagcactgcacaagagctgacagtatataaagacttcaaagtcctttgaaattaggacagtagggaccaaacaacattagcattgagcatagatcactattctagctgtcagttggccaggttcctgagaggaagatatggaaatatattacttgtgactcagtgatttggatactcccccccacttgtttaaatgccaaaattgactaacaagtttgggaacttaaattggagaatgaacattttaaatcagaagctcaccggtctaaatatattcaactcccctactacttggatacaagagattcttgagtgaatctcactggaatttacattaatatacatgggctatagaaatcacaaacaatcacctcctcagatataaaataactatttttaggggccatatgagagactccaacaggtatactcatctcatcacaatggagacaatttcagaatccttttgtattaatatgttgtctcataggtcactgggctgcatgctgaactgaaaaatggctagcagagccaggtacatagtagatacataaatatttgtagactgaatgaggaatcaaatcaaagaatcagaatgactttaaataaaacaaggagttaacttgccatccattgctcaaccagctttgacactagaacaagcccttcaagcaaaacagacagctgtgatctggacatatgatgcaatgcaggcagcaaacgttcactctggacaaatccaagtccaaatatgacacttaataccaacccagaagggaaagagaagcactgccttttctacccttccattcattcttccaacagtgtttcacctgtgcccatgtaccaagctctttgctaggctatggggagtcaaagatgaataaacccacacatcgtgcctcatcacaacttagaggtgggaacagaaatggaaacaaactgccctgcagggtgataagagctatatagactaaagcccaaagcatcaggggccacatattcaggggtgtttatggccatagggtcattttcaagtacctcgttgtcctgtcctctcaaattgctctaatcaaaagttggctgacacactagatatttgggaaaattagcttacagagtgtggtaaccactcattcctctaggtttcctgagctttatttctgcattgggattcatcaccagaatctccactgataggccatagtagctcaggcccccaacaataaacatactgggttacttttcattattatgtcttctgcaatttttttccattccagagttggtaacaagacaagatcatataaagaacctcacttcactttatgtagaattgaagttcaagtattatccatgatataatttgatatttcatacgagtatatactagttggcaagcaccatggcaggcactctacatgtgtcatccttacaagtttaatgcatgccacctccagaccccctttttttctgttaacttggctactactaagaagctcagagccaaattaaatactctaaagcagtaagcacttaggattgtagtttaattatcttccctcctctacaagattttgatctttcttcccctcccatttttaacagtctgattttgtgaaatttttactatgcatttactcagcacacttatgaaagtcaatactctagacacaaaaacaaatcaccataatcttcaattataatttccttttgctctcaattggcaagagtttccatgaataactaatttgaagatgactcctttgatattatgctctggtcacttgaaaactcaaataatgcaatatttcccaccatcatttggttcagaatacttttatgaagcggcaaaagagggcaaaaagaggctggctgacttaactaataacatatgataaccatcaggttattttcaaagctatcaccaagacctatttatttctatcttgtgttggatcctgaccattacattttgccccctcaccaaccaccacttttgcagcccaaattgtaccaccatgcactggttggtccacttagggctgccattgccagaggcactgccaggacctgctgagtgagaagacactgccatcacccagtgaagtctagtccctggaatttcactcttagcactggcaatgcttctggaactcataaagattctgctgaaattcagggagttgaaggtcaatgtcttccagggatcaaggtaacatgtcagaaaaattctgctgctgaggatttccatgtattcaaggcaaatgcccttaggaggaactcgcagaaatagctctttgcattgtcactacacagaatggaagaccagcttttatttcgaaaagaaagagagagagagaaaaataaagagtgaaccatataagcatggaatgtgtgcaacacacacatacacatgcacacacagaatagatcttggcatgcccaactggcacccacttaggatgtgtagtcaggtatttttgagaacataatatttggacacaatcattaatttattcaccaaagagttatccagcacctactgtgtgccaagtattgttctagatgctggaaaataagagtgagtgaggcagtcaagagtcctgtgctcatggattcgatattctaggcaaggatacaggcgatcaacaagcatcaattgaaatgaacaattcagattgcaaatacaataaaggaaagaaaaagaagaacaaaacaaacaaacaaagagaaaaaccagtgtgatgggtctgaaaaggaatgagggaccgcctttgctcaagtggtcagggaagggctttctaagaaggtgacacgtaatcttacactagaatgagaagaccagggcgaagaaaccaatcacctttactctgatttccatcaaaaagatgggcttactaaaaaaagaaacatgcaataccatttgtggctccacacaactcatgctttaaacaactgcaaaaaccccaggagaggaaaggaatccacagctttctctgcttttaaggcgattttaagaaatcacctttcccaaagataatggattaaaaagttgtcttaattcatctctaattatggcagaatttactacaaagaaactgaaaggagatacatggaatattcattcctctacataatgtcagttgctttatgtaacaatattccaatgtcaataaaagtatacctttgcattgtaatgccaacaggaattatttcactttaaaaaaccagttctgtagctatactcagtattatttatttttcactggctataaaataaagccaaactgtatttactagcagatggtctcacttccaatatataataaacctctgagatcaggtaaaaatagattctgttagtatttctttaacatgctcaaattataaatgatcgttcaccaatgtctttgtataaaacactccaaacaaatcacttggtactggatttctgtttgactcaattaaaacacttagccacctggcatgaaaacatcctaaaaacatcaactgcttaaaatactttgcactgaaacacgtttttcattgtttcctagcctctgactgatttcggaattagaaagaattaagcagaagtgaattggggagcaggtcagtcactgaatattcagaatgaatcatgaacacgttaaaatgcaatttttatttctttgcagtgcattgcatgctatacattcttacaatttaaataagcatactaaactaaagccaaataatgtgaagattgcccaacaggtctacattacctaatacatttatcattatataaactgctgtgcttgatattaatacactgtgcaaggaatgcttaatttcttgaacttccacacaggtctttaaaactgaatctcactagtacccaagaccaataatgtgctgaggaagaaggtatttcaaatatatttactgattacacagtgtttgaatcttcaaaaattctaaatttatgtggacaaaggagaatggagaatctgaacttggctgttcatgcaaactctttcctttctttgactcactttatgaattgttatgtttctagatccttcttttaaaattttccatttggggaaacttgtacatttaaaaaaaattcatctcattttctccctccccctccttaaaataaataagaaggcttaagaattaacactaataataatcccacaatggtcattgggaaatcctcccccaaagtgacaactgccgctaagaagggcaaaatccactaagaatgaaaattcccccaaatgagtccttctccgagggggtggaggtcacacagttggcacaattggtatcacaaccaactcgaggagacccagaggaagatgctgcgccaagagaagcaaagcgaaggagcgcgacccaggaggctagcgaaatccccgccaagcccccaggaggcggagagaagcccagtcgccaggcaccggccacggcgcacgccaacatccaggataattctcctttccaagcccgggagttccggggcaggcgaaaaaggggggatgggagacccacagtccctttaaccctcccccctggcctgccaaccttttccgaacccccatgtcacacaacttcctcatcatggaaacttccactgggttcggcgctgaggatgccaaactccatttcacaaggaacatgtcaacagctgggcttggggtttgaggaacagagccgctgcgattggaacagagcccggccaccctgttccaccactgtccactccgtagctcccagcctgccgccgcgcggtgcccgaacacgagagggcacctcctcccagatccggggcgcagaagccccgcggaggcaggtaatcaggctgatgacacccccaccacccacgctcacccgcctgcccgcccgcgcgcgctcggcttagccgcccgcacccctccgggttcttgcgacgctccgtcaccatcccgcccaccctgtggacagttggaactgtcgccccctcctcctctcaccccgctgcctccgcgcggtcctctagccaaattaccagtgccctggagccggttgggttgagcgcccctgcccggggaaggtagcctgcgggctcttgccccgagcccgcggagcaggaggtctcttttccaagcgcactcacattattcatgcaaagttaatccccgccgcgtcacggccgcccgcccgaggatgtgcgccttccttggccaagccccgcagtctccaccctcctccgccccctcctcccggcggcggggtcccggggagcgccggcgactgggcgtcgcgcgagtcctgcaaaatgtcaactccttgggcgaagagaggcggccgcagccagggccgcgccgcacctccccggtctctccacttttataggcgtaggaagctactgcggctggggcaccagagtccccgcctctccgggtcccccgcgtgcccggcccgccccggcccgcttcccgggcgctgtcttactccgggcccggggcgcctgctccgcgccgcgtctgcgaaccggtgacctggtttcccctccagccctcacggctgtccgacttgcgcggcggtggcggcggcggccaagagcaggcaaacccggctccgccaggggcgcagcgaggaaatggcctcctggcgcacaccccgccgccgccgccagccatcgccaccgccccgggctgcccagccggtacagacgccccctgccaggctccgggccagcgctccgacgcgctcacagcgcccggcttgccgaccccgaccccgaccccgagtcctacgcactcgaggtccccgggccggccgcctccgcacctgcctccccaggtgtgggcgctccccctcctcctaatcccggccgtgccctcccagggttggtgacggtgctgtgggtttggtggccgcgcgtccacccacccgattgcctgcgcgcataggtgcgggtttgggcgtcattactctagttggagaagaggaaagaatggggaacgagtgacaccgggaccggagggcgagtcttccaggagcacgtctcggccttctttgcccggcccgaccggcccgacccgtgccgcagcgctcctccctccgctcctaaaccacttgtggcgcgtgtcgggaatacagggcgctctggctcttcttggggcctccgctggtccgaccatctggcagctctcttaaccaccacggccaccccacgaatggaagtttgggacgtgcctgggttgcccttaaggaggacacccccgcccccaccgccattatgcatatcgtgggagaggcgcgtacagggctgagacactcctcaggtcccagaacggccgccctattaatttgtctttgccctggaaatgtatagataaaaccaggaagacaaaaataatgtatactcttcaagagatctttcccgggcaaatataggtctctcaaatgcccccgaccttaagtcctggagaccaggaagagacttgctttctgagctagaaggatacttgggaaataccgagtcctcactcagctaaaaggtagtcaataaggaactatagttgcaacaaaactactttgacaacagagtacaattaatttcttatagacagtattaaaataattccgacatcataatttaatattcacatctattcgtgtaacacgcagtataatagagttatgacgatatggatcctcagctgcctgacaatgtataggttatttattggaaggttctctagatttccagccagtgacatgtatgttttattctcgcttcttctgagcgtcccagggaaaggggtgagaggccccc

SEQ ID NO: 619 - DNA, 16125 bp, Homo sapiens
  source 1..16125: mol_type = genomic DNA
gttgttacttaggaagcctggggagggcaggggtgccccatggctcccagactctgtctgtgccgagtgtattataaaatcgtgggggagatgcccggcctgggatgctgtttggagacggaataaatgttttctcattcagtctccagtcattggttgagccacagcctaggggttggaggaagactccactctgggtacacccttaggggctggctttatggaacttgtagtttgaacaaggcagtggcaatccgccccctccagcctgcctggctggcccccttccctctgtctggggtcgcattccgcacaagcctttcatcaacatcttaaaatagtaactgtgctcagcttgtaaacaagatgatttttctggcctgcagtgccagggtcctgctgctcccttcctagagtgggggtgggggtacctgggagttgtcggtgaatgcccctttcttgcactgaataggggtaccataggtaagaccaggtttctaccttcctccagggtcagcacctctggagccttcctgggacacggccttggccgtccagcccacccctcggagataaggcccatctctggaagaggtcaaggccctaaagcaacttctggcttcttcttttgagcaatgacagagggagctgtcatcggcaagtcccgattgtttaaaaatccccagtacgaactaacagggcactgctcccagcctcacccgatggctttggcttgggacacatcactagcgaaggggagagggaggctggggaggccctgggagtggtgaccctgcctgcacaggacacaccttaccccagcgatgcttgcccccaagtgagctgccaacagcccatctctgaggcacagctgagagatgtcttgactcctgaattaccaagagtttgtttcacaaacaaaacctgacctcacaggcccagcgggcaggacagtgcctcttccttccaactgggccccgggctcctctgtacacccatttttgtcctgacactggcccagacaggaaggcagatgatgttctgcttaggacacaccccatgatcatttctcagttcaagggttgtggttaagagatcagtattactacagaaagatctgggggccaggtgcagtgcctcacgcctgtaatcccagcactttgggaggccgaggcaggtggatcacttgaggccaggagttcgagaccagcctggccaacatggtgaaaactcgtctctactaaaaatacaaaaattagccaggtgtggtggtacacgcctgtaatatcggctacttgggaggctgacgggggagaatcacttcaactggggaagcagaggctgcagtgagcagggattgcgtcactgcactccagcctgggcgacagagaccctgtctcaaaacaaaagaaaaaaagatctggaagaaaatccccacccaaatcaagttggagctgtccatgagacccagggaaacccaggtgaaagagaaatgtgcgtccaccaaccagtgaattttcaattagttaatttcataagctacagcagaggcgtggaccctgccctctccacacttgaagagataagcccctgggatccaagtcccagcaaggttggtgccacccatcttggtgaaagatgctgttgttcctgtggaaaccatcaccagaggtaggaagggctttgagcccaaaaggaaacaagagggcgtgaatccaggccatcctcaggggagggtgggagcccatcccaggcagagaggcctaagcctcagtgtgggccaaggctcaaaggtgctggcacaggcttcccagggagaacagaaactcagcagtgaaagccgcagaggggaagaagcaggctgatgtcaacagcgtggggctctgtccctcaccccaaggagagggagtgtgccagatcccaggccaccaagcggggccagctccagcctgggcgatcgtcccagcagctgagagggaagctttaagcagaccagtgggtaggagaggagggagcatgcggcaggtggggcagccacacaaaggagagttcccagaaggccaaggtgtggtcaccctccacgcctcccgacttcctcctggagtggctgggcagcatgcagggcagcgtccagtaggcggcagtggcaggaagggagcgggcggccctcgcaggtccctcagttggcagggctgcattgcagaatctgctgtggggcaaagagcttcctggcagccacggcttcccctggctttcctggcactgggcagttctctttgttgtccggcccggcaggctggcctgaggccttcttgaagtagcagagccgacacacggagtggtacttgtctgctcccccaatcacctcgacctggccgcagggacaggggatgggtgaagggccaggacaggaaggaggcagagccatacccccaccccgccggcctgcagggaaggcaggtggagctacctccttctctgtgccgagcctcttggtataggcggcttcccggaagcactccatgcacaccgccgtcagcttcaccacgctctcggccagcggcaccaggttcaggatggccccaaatggctgcgctcccatggaaagacagagggcgctcagccaccttaccaggtgggtttttcttttaaaccctctgattcacaagcactgaagccaggagagtttgctctgaccttagtccttcccccaacccccagagcaccatgcccggctctgtccctttgccaattcaaagcacctgccgcaacagatggcacgcagtctgcacagaccatggagtcccttggctcagccaaggcctgagcagctcggccgtaaccctgtggtggctgagccctggtcacccagagctggtgtctctgtgcccatccagaagcctcttgccctcctcaatcccagctccagacctggatcagacgccttaccttcctctggaaggtcccatccagtgcagccacaattacggtcttcccggcgttggccatggcctcgcagaactccacgatgtcagggaactggaaagggcacgtggagaaagagtgtgagagcttccaccccagcagcagctccctggagccccagcgaagacgctgccagatctgacaactccggccatttggcccggagtaactcttaattctcccacgaggctccccaggccgggggactgtgtccacccgcacgccccccagcagacgacaggtacatccacaactgcgcagccccttccccctgcagccagcttccctccgagtccaggtacccaggactcagcaccggacttccacaccagctgtgctgtttaacactgcagtggccaaaggcctgctgccttgggctcggacaccactcttcgctggacccattatctgtgtgaccttggcaatgaattaacgtctctgaacctgtttccttttccttaagagcaaggaaggtcctgttgtttaaggatggaaggccctaagttatatacatgctcttcggtgaataggtgggcgctttgtgctcttgcctcccccgttttaaacgggtaatgtgccttgagaaggggcgggggtcctactggccatttacagagcaggatgacacagcacagccttctaaattcaggacctgcacagagcacatttactgtgtaaagcaaacttcactttggcccagggagaagctgaaactctggcaagtgctctggtgattctcatcaatcaatcatatcactcttagctggttgagttcatatgtccagactggcctttgggttgggtgaagcagggatgtccttgtccttgggtgcagggtctctctcccagggccactcaggctttctcagcccaggtactgaggtttgaggttattgagacgtgagggcttagcaaggtgaggactaaggggtggctcgaaaaattccagtgagatccaagcaaagcccaacgtgactgattgcgctcagctgactgcaggggtctctggagaaggaaacccagagactccagcacgccagggcccctccccaccatgcactcgttccctctttttctctgaggactcatgacatgtcacgaaaatgcagctcccagcctgcaaggagctgtgggccggcacaccacctgcgccaggggcgcgccccctggagggctgacgctgccatggctgccatttgaggccggatctcgctgtgtcctgtgcagtgtagggtgttgggctgcgtccctcgcccccacccattagatagatgccaggaacacacctcccaccccccagctgcgacaaaattgtttctagttgttgtgagatgtcccctgggtgggaatggagaggggaagaaccctcctgagttgagaaccttgctccttcacccgccacatgagggtagaaggcagaccccagactctcctgcatcagggtttcaggatgaaggtcctcagcccccactcactccacctcttgaccaacctcaggctgaggtccatagtcaaagagcttggttcttgcacccggcacttccccacccgtccagcacttccagtgatctgcctgcctcagcctcccaaagtgctgggatcacagacgtgagcctctgtgccagaccctaacttttcctagattaaacttattatagattgcatgtctctaacctgaaaggctccaaaatctgaaactttttgagcgcccaccacaagtggaaaattccacacctgacctcatgggacaggtcacagtcaaaaactgtggctcacgtccaaattactaaatacataaaattactctcaggctatgtgcctaagatgtctataaaacataaatggattttgtgtttacacttggggctcattcccaaggtctcattatattatgaacatgcaaatattcgaaaacctgaaatccgaaacacttctggtcccaggcatttaggttaaggaatactcaacctgtattacttgtgtagtagaacagaaaacacaaaaaggtctattttttttttttttttgagacggagtctcgctctgtcgcccaggctggagtgcagtggcgtgatctcagctcactgcaagctccgcctcctgggttcacgccactctcctgcctcagcctcccgagtagctgagactacaggtgcccgccaccacgcctggctaatttttttgtattttcagtagagacggggtttcaccgtgttagccaggatggtctcgatctcctgacctcgtgattcacccacctcggcctcccaaagtgttgggattacaggcatgagccactgcgcctggctttgtctattttttttgagacagagtctcgctctgtcatccaggctggagtgcagtggcataatcttggctcactgcaacctctgcctcccaggttcaagcaattcttgtgcctctgcctcccaagtagctggaattacaggtgtgtgccaccacgcttggctaatttttgtatttttagtagagatggggtttcaccatgttggcctggctggtctcaaactcctgacctcaagtgatccgcccgcctaggccttccaaagtgctgggattacaggtgtgagccaccgtgcccagccagaaaaaaagtttaaaaaaataaatcagagctcctactattgccaagcgaccctgcaagcccaccacacactgtgcagctgttgatgcaagggtgcccacccaccaccagcatctgaagcacagcacccccagctaggagcttcaggttttccagagatttccaggtgagtctctcttggatgccaacagtttctacagagcagtgtgagcacctgtgtgtctcgcccggggtacaaagaagcacagaagcttctgacccagggccttcctcaggatggcacggtggctactctgtgaaaggctttccctgctgacccagaaaacgggaacaaggcaggttcggctgggcttcatccactgtccacgtagacaatgaaggagcgaaggacagtccttctgctgggtcccatgctaggaacccctctcctcgatctagaactgcttgcaatgggaagaccctgaacttcttttgttttgttttgttttgagactgagttttgctcttgttgttgcccaggcttggagtgcaatggggcgatcttggctcactgcaaccttcgcctaccgggttcaagcgattctcctgcctcagcctcccaagtagctgggattacaggcatgcgccaccacgcctggctaatttttgtatttttagtagagacggagtttctccatgttggtcaggctggtgacccggaacttcttgaagagaacaagggcacacagaggccagggcagaatgctgatgtctgggtagggtgtaataaatactcactgaatgaactcaagttttacttgctggccagggaggaagtagaccgagaaatccctcctataggctgaacaggggacaggacttcatacgctggctcctgactcagggcatttggatgtcgaggaaggagaagggaaaggtttctgcctcgggggtctgggtcagcctctgtcaacaaggtttacgcagagccaggagaacagagctattgaacaactcacagcggcaggtctgaaggagggagagccttgccaaagctgaagcttccttgttctgagagggccatgtccccaaagctgatgcaaaatccctggatgcattctgaggccacagtttgggagcaaaagagaacagctgcagccctattcccagcctgggctcactttctcgccaggagtccctcaagcacggggcagcaacaacgacgtctccacgtacgcagaggcatgggggtgctcaggggcgcacctctgaaggtcagaaacggaatggccatacccaagcggggaggagatgccagctgccgggtggtcgggaacccagagcggacactggcagcctcaactccacagggcagatgccccgcacaggggaagggacccgtcagcctccccacgggaatggaatttgcagctgtgactcatacagaatgttgggcaagaacagaaccaggaaggcaggactggccttttgaggggacaggccctgtgacgtccgggcagggtattcaggccagagcggcctggctctgtgctgggaggcagggcgggtagagacctcgaagcactcaccaaaccaactcatttattcttcctccagggtatagaactagactaagtgtggccaggcgtggtggctcacgcctgtaatcccagcactttgggaggctgaggcaggcagatcacctgaggttaggagttccagaccagcccggtcaacatgatgaaaccccgtctctactaaaaatacaaaaggttagctgggcatggtggcagaagcctgtaatcccagctactcaggaggctgaggcgggagaatcacttgaacctgggagatggaggttatagtgagccgagactgcgccactgcactccagcctgggccacagagcaagactgtttttaaaaacaaacaaaaaacgaactggactaagtatactaaacgtataggtggccctgtgcccaggttctagtctttgaaagatcagcagaagtgacgtttgcagcttctggtcaggcccatgaaaacctcacacccaggggctccgccacgtctcttcccctccgtgtctgtatacagccagccagggcgacctaagccgcctcgtgggcggcctccccatcaaccggcctggaaccacgtagggggtctgtgagcgagaaataaattcctgttatgtttatatcaaaccaccacattgtgtacttcgaggcaaccctaaaagtacctaagaggtcaagtctgctaaaccccttggagagagtttcagtttcattctttgtgataaactaacaaaaataaaatctccaaagcagaggaaagaaaactaagataacagaaaataacccagaaactcaaccacagaatatgttcctgaggaaatagaaaaatctggaaaagtctaagaaaagattttcaggaacataatggaaggaacagcataaatttaaaaataacccaacagtaacttgtcaaacaaaacggagcatgatgaattagagcagcagatgtaaaaatagtcactgaaacaaaacacactctggaagatggaacccagaacacctcagagatggatgaggagagaaatacctgaagtgataatggcttcattccttccccagaaatgaaaaggcacaccagctataaagcaggataaatgaaacaaagcttcccctacacacattgtgctgagagagaacagatagaatacctgaccagaggtaacattagagagatggcggccttcctctgagcaaaaacacaatgaccagcgctgctacttttcaaagcaacaagatcaagaccaggcgtggtggctcacgcctgtaatcccagcactttgggagctgaggcatgcggatcacctgaggtcaggagttccagaccagctggccaacatggtgaaaccccatctctattaaaaatacataaatgagctacgcatggtggcacgcacctgtgatcccagctacccggaaggatgaggcagaactgcttgaacccaaaaggcggaggttgctgtgagctaagatcacgtcactccactccagccagggcaacagagcaagactccatctcaaaaaaaataaaaattaaaaaggccgggcacggcggctcatgcctgtaattccaacactttgggaagccaaggcgggtggatcacctgaggtcaggagttcaagaccagcctagccaacatggtgaacccttgtctctacaaaaattagccaggcatgatggtgggtgcctgtaatcccacctacttgggaggcgaggtgggaaaatcgcttgaatccgggtggcagaggttgcagtgagccgagatcacgccattgcactccagcctgggcgacagagtaagactccgtctcaaaaaaaaaaaaaaaacccaaacccacacaagatcaacctacctcttgctgcccagcttaaactagatgacaaaagaaagatttccatacaaagactggcagcttcccatctatacctcctggctgcaaaaactactaaaaaaggtacttcaacaacaagaaaataaacgtataagaaacaagcaaaaggaaccatgaggcaaaccaaacattactccccacctcccccttttttttttgagacagggtctggccttgtcgcccgggctggagtgcagtggtgctatcaccactcactgcagcctcgacctcccaggctccatccttctgcctcagcctcctgagtagcagggaccacaggtgtgcgctgctatgactggctaatttctttttttttttggtagagatggggttttactatgttgcccaggtgagtctccaactcctgggctcaagtgatctgtccaccttggcctcccacaggctgagattacaggtgtgagtcactgcatcttgccagtaaatagatatatgtatttttaaaaaggtacaatggccaggtgtggtagctcatgcctgtaatcccagcgctttgggagttcaaggcggggcggatcacctgaggttgggagtttgagaccagcttgaccaacatggagaaaccccatctctactaaaaatataaaattagctgggcgtggtggcgcatgcctgtaatcccagctactcgggaggctgagacaggagagaattgcttgaacccaggaagcaaagtttgcggtgagattgtgccatcgtactccggcctgggcaacaagagcaaaactccgtctcaaaaaaaaaaaaaaaaaagtaaaacgaatcctacaagactatgacactatgacagggaaactagaaaggggccttcagagggtattccaacactagttgtagctatttaaccttgttattttactaaaagatcagataacttccaagtcagcgagggaaaacgggaggacagagcggaagctggcaggaagagtgatgccaagacaagccaacttacaaactgcccctcgtcgatgcctatgacagccacgcccagggcctcctgggccacgtctcggagcaggcaggcgggcagtgcctccatggtgttcctgggaagagaaagccagagcgtgagcagggccagggaggccagaagccacaatgcaggggccagggaatggcactgtcgtgaccacctgctacctgcaaagcaggctcagtgttcacccagccgggctttgagaagttagcacctatgggaaaggccctcgtccagaaaaccagttatttatttattttttatgaaacagagtcttgctctgtcacccaggctggagtgcagtggcgccatctcggctccctgcaatctctacctcccaattctcaagggtctcaagcgattctcccacctcagccacaagagtagctgggactactggcacacaccatcacacccagctaatttttgtatttttagcagacatggggtttcaccatgttggccaggctggtctcagactcctaacttttaagtgatccacccgccttagcctcccagaggaaaaccagttatttatacaagccacttcacttgatgctttggattagaaattagtaatgtccagtacaaagctcaatgagactaaaaactcttccactgttcaggagctgggggcagactaggccaacttcatcaggtaccagggcccatgataccattaggggccagccaaatgtttccttttaaaattcagaagaatgaataactagaactgggcctgggttatatttgtctttatattaattatgttgcaaaacataaatttttaaaatcctgtattctggccagacacagcagctcatgcccgtaatctttggggaggccaagacgggaggatcacttgaactcaggagttcgagaccagcctgggtaacacagcgagacactgtgtgaaaaaaatgtaaaaattaactgggtgtggtggtgtgcgcctgtagtcccacctgctcagggggctgaggtgggacgatcacttgagcccaagggtttggggtcacgtaacagtaagctatgattgagccactgcactccagcctgggtgacagagagagaccctgtcccaaaaacaaacaacaaacaaacaaaaaaacatactttacaactattgtttcgttattaccttgctataatcctacttcgagttctggaaagaatgtgtgaaacagtattttgggcattttaaattccctcttccctccctaaacagagaaagacaaagtgagggcaggtgggaggccagctgtggcccctgcaagggcagcctctcgagccatcaatgctgctggcccagccttggcctctgtggcccgtgttagagatgacttgtgacacacgggcagaactcatatttaatcccggatctgactgactccagaagttgtacttccaacagctggaacgaagtgacctcctctgctttccctgtccccaccaggtgtaacaccaccctgtgccgtggacatcgcatcttaggaatgaggaagcaaatttggaaaagtaaatgacctacatcagacagcatggtcacgaagtgcggttaaattcccacatgcaactccaagccccaagcaccctccactccaccagcatctggcttcaggagcccctcagctcccaccgaaggccacacgccgggtggatctgttctctgcacagccatagcaactctcggatacagctcccagccagggctctgaggctgaagccctataatgtgtggcacagcatggctttgccactgggtgcccaggtggacaagtccagaggaccaagcaaagcgtctcaggctcagaaacatcaggcccacatctgctgccaaggaagtgaatttaactcccaaactgaggttgcaggcggaaatgtccagcgagctcaaacagctacacataaaacagggaagcgtgaaggctgccaggtgacgggggagccagccaacaacggacaactaaaaaattaaacaaaaatcaacgtgcaggccaaaccaaaccagtctgcagcctgtgtgaagctgaaaccctacggcagagtttctgaacactggcaggctcctgacatttggggccagctcgttcttgcatgggggccgtcctctgcaccataggacccttagcagcagtgtccctgatttctacacattaaagcccaaaagcatcccctcccccctccagttgcaacaactagaaatgtcttcaaacattgtcaaatggaccctggcggcaaaatcaccctcagtggagaaccactggctccagcccagggagtggagagtgtgcgctaccttgccaagcaccttggaaagtgtgctgatttgaatcattcaatgttcaaatgattaaccatccccattaaagagagtcctaacagtgtgtcctgtgccttgtgattttccactggacaggactgcagggggcagggactgaccggtcatgtgtgcagaagctgctgctgtagcgagtgtctttggcatacttgatcaccaggcacttgtactgagcaatctggaagcgacggacgcgtctcatcaactctgtgctgcaagaggagagagggtcaggtgaggtccacggcgggaggagtgggagaaggagacccctccccaacaagcctggctcctcattgtccctagtggtatgcagactgagcccaccacagccagaaaagagcagggcagagcaggcagggtataatatccctacaaagagggttggaagtcagaattctctatggggaagaggtccaggaatggtactcaggtggtcccaggaagtgtgggaggagtaaccttctccaagatgtagtggggaaggcagaagcaaaggctacatgtagagggaacctgcgactgcattccaaagtaacctcatcccagagttgttcccagagttcagagtttttctttctttctttttggggtggagtctcgctctgttgcctaggttagagtgcagtggagcgatctcagctcactgcaacccctgccttccgggttcaagagattctcctgcctcaacctcccgagtagctgggattacaggaggctgccaccatgcccagataatttttggttttttttttcagtagagatggggttttaccacgttgaccagggtggtctcaaactcctaacctcaagtgatcaacgcacctcagccttccaaagcgctgggattaaaggcgtgggccaccacacctggcatacagcttttctaaattaatttcagaaagtctttgtgtgcagcgtcaaaagcacttgcttctgggtccaagaagtccaactctgagccacatcttcctgagcaaggggtttgagctgaagtgatccccagggccataaaagaatgttggggcagggcatggtggctaacatctgtaatcccagcactttgggatgctgaagtaggaggattgcttgagaccaggagttcaagaccagcttgggcaacatagcaagaccccagctctataaaaataaaataaaattagctgggtggaggcgggggggtgcacgcctgtagtcccagctacttgggaggctgaggtgagagaattgcttgagcccaggagtttgagaccagcctgggcaacatagcaagatcctacctctagaagaacaaaaacaaaacaaaaagaatggtgcgtgggtagtttactcaagaaactcactagccccacccgggtcagggaatggttctatcacctcaggagagcagaggctccacggcttcagactccttggtttagaaagcgactacgtttccttggccttagaaggaaacagccacattgaataggggtgtacaaaaaggcctggcctacaggggacacaactggttgccaccttctcagaggacttggtggggaagacagctaagctgtaagcagctgtcaccagctccaggagggagtggcgtccacacaggacgaggggcttggcctgggcagaagagggcagagacttcctcctggactgaattcaagggaggagcaccccaggcgggagctgtaggaggctgtgctggtccttctaggggaagggaaggggagggaagggaaggggaggggaggggaggggagggaaggggaggggagggacgggacaaggggtccccggagaagaggaaggagctccaccccagccccgcgaagccattacctttttcctgagaacatcggcccgagaatcacctaggagagaaggtgaggtcatttgagggcccgccctgcgcggatgcctggacacaggctatcaccacgaccacctcatccccagccacgcgcagggctggcccccgcacctggatctgcccccgggtcttgctgggggagccaggcagcacagtgggcaggttaatgcagctcattgcgcctccgggaagttcacgaacccgagtactctccaaggccgtcccgcagtaagcccctggttcccgcgccgaccgctttaaaccacggcgtgctggccaatcacgagccggccccgccgccatggggccaatcagcgcccggccgctgacctggcgggagatttggccgcagcccgccccctcgtgggaggaatccgggacgtgcgcccagggactgggagggcctggaaatcagggcgatggacgtggctgatcggggtggggcctggtctgagccccgcctcggtccgcccaccaagtttaaaggggcggagcgaggcggggctctggccatataaacagagggacgcacgcccatgcggctgtagacgccatgatggatgtgtctggtgtgggtttcccaagcaaggttccttggaagaagatgtctgcagaggtaggtggattgcagggagggactaaggggctggggcggagttagctcatttattagattggaattccaagaaggaagcttagaagccgtctagagcactcctgtgggcatgcagagcgcctagtgcgtgccaggtccccagtgcttgagcaccatggtgtattttaccttctcctaaggatttttgttaacctggttttcaggataaagaaaattgaagtcctgactatgctaataatatccgtagaccctgccaggcgtggcggctcacacctgtaatcctagcacttttggcggatcacgaggtcaggagttcgagaccagcctggccaacatggtgaaaccccgtttctactaaaaatacaaaaattagccgggcgtggtgatgtacctctgtaatcccagctactggggaggctgagacaggagaatcgcttgaacccaggaggtggaggttgcagtgagccgagatcatgccatttgtactccagcctggaaggctgggcgatagaccaagacttagtctcaaaaaaaaaaaaaaaaaaaaaaaaaaaaatccatagacccgcaggaggttaggggacaaagttctggaccttgatctgaggttacacaatgtttttgggtctgtgcttatgtggcacaggctgaaggattcagaacagctggtatttacattggggttgtgaaggttagaaacatacaggccgggtgcggtggctcaaaaaaaaaaagaaagaaagaaaagaaacccattgtataatcatgatcataaataatagcaacaaagatggtggtagtgatcacagagtgtgccaggtgtggctgtaaggatcctacaggtaataacctttccaggtacagattggacagatccaaggacctctgacaaagagctccttcactgggaggaagaagcaacccacactgactggcttgctttattttactcgcatgctttatctcttttaaccttgtgatttggatacatgccttctttttttgagacacagtctcgctcagtcacccaggctggagtgcagtggcatgatctcggctcactgcaacctctacctcccgggttcaagtgattctcctgcctcagcctcccgagtggctgggattacaggcacactgtagctggtactacatgcctggctaattttttttttttttcttttgagacagagtctcgctctatcgcccaggctggagtgcagtggcgcgatctgggctcactgcaacctcttcttccagggttcacgccattc

SEQ ID NO: 620 - DNA, 44825 bp, Homo sapiens
  source 1..44825: mol_type = genomic DNA
catgacccctctcctggtctgggtagggggctgctgactcagggcaacccactccccctctccctccttcctctccacccactgtccccttgagggccttgaaaggctgcagagaagaggaagagcgagaggaacaggaaactgtggagcaggagagaggaggaaacgggaaaggaaaaggaaggaggaagacgggatgagctggggaggaaggggggaagctgggaggaagggggagacggaatgggggaggagctgtgcacctccaaattaaatttgtgattcaggcatcagatgggccgacagccagagattaattcaactgatcgagttataaagagcgggaggcctgggtaatcaatcttgcagctgtcaggccgacaggcaggagtattaacctggcgagacggcacgtacccaggactttttcatttcattcaccccaaccatgtccctgaccacctctggtctgtctctccaagtaataataattacggctgttaacgatgacagagacaggatgaggggacgggctcctgcggcagggcttcctctcccggagctcccacccactgctcctctgaccactcccagaaggtagagcaaggaccagctcatggcactctttgagaggtggggaaatcgaggcaggaattccaaaaagaccttcagacaggccagaggtggggctggaaaggtactttgggataaaggacagtgccctagatccctctcaactctcgggaaaagaattgtccttaagtcagccagcttggccccaacacgttcagctgtggccagggaagctggaatcaggaaggtgagacagatcccctcctccgggctattttgcctcagccacaaacctgagctctgtgtggcttgggtggaggtcccatcctgggcacagactcctgggctggggctgctgttcttcctgggcagccttctctcctccttctctctcctcccacctgacagtgtcagtccacacctagggggtgggggtctccctgcagagacttgtggaaacaccaccgtttgagtagagaaggggtggggatgggggagcccccttgaagttgacacctctctcagctctggctaattttcacatccttcaaattctgatatctctttttccctccttgctccagggaaaggaagggagaagacaagagagggagagagaggtaaataggtaagaagatgtgctgggcacctttagggactgctgggagtgagccagggcctcgtcagtcctctgaaattgttatgccagggtgagctgctagtagtgggggccttggagggctgatgtgaactgtgagttctttcttccatgctcagtgagaaccaggcacagggttcgtggaaggggctatggcccctgtgatgccctcagtattccctattatcattttcattattaccaatcagggaccaccccgtcgctacagacagcaatgctgtaacagtgactagtgccagaaactggctaaaggttttctatacattactactttaatgttcgcaaagagccctatgaagcaaattctgtgatcagccccattttacagatgaaaacctgaagttcaaagaggttggaagactcactcaagctctcacagccaggaaatagcaaagccaatactgggcccctagccagagcctcagctcagcataggctaactttcccccaaggccctcaaatgtcactgtcccctctgacccctgcctccaccaaggttcctcagtgttctccgtaggcggattctggatttctccagctgaggtgacctgggcaccagatccttctgggtttgagaagggtggggagggtgatgcttctgtttgtttagagggtggggcggggaacctggtgtcagagaacactcatccggggcaaagggaagagtgggggccccactcggggaggctccccagtgctctgccctcaagtaaccccagggagtaggctctgccccctccccaggccccatggcctcttgggaaaggagagagtgctgacttgcccatgccccccgccttccccagggatggagcaattggaggggtgccatgctgggtgtgtgttggggtgggagtggatcctgacttagaagggcctagaggaaaactctccctgtcacctcctgaccctagctggggctaggctggaggaggactggggacatgggcctgtctgaggcgccaggcgctggaggctggaactaggccagcccctctcccaggctccctaggacccatttcaagtggttgcttccaggatgacgcagccctggggagggggagcaggaacaaggagcctgtttccaagcaaaggttcaagggtttcctttcctgggctcccgcccccttgctcagggcagccacccattctgccctgtcagtcataatgtttcttccttatctgagaccaaagccgatggagggacccaagtccctgtcccatcttgaggtggttcttgtgcttgagtggggatagatggagacccccagcacaaggaaccagaatcctcaagtcttaaggttttgatcagtggggtgactgggagagttaacgtatcatggctcctctctgctcctgcctcgtcccgttccatggagccttcttattcctgcaagatcctgcatcaggggcctcttgcggcattagagatgggggtgttctctggtttctagtcctctcaacccatcaaggtggatgtggattcagatcccgagggctgtcttgtcatgatcaccacaattgtccctcgcagcttctctgcgctttaattctccgtctgtaggtaatggagagaatgctgtctgtgatctctgcctcctctgcctcaggatggggcaaggtgggttgctggggaaaaagagaggagagatcttttcaggcaaatcacatagaacacctgtttctaaacctgttgatccttccgtgcctcagtttctgtgtctgtaaattgggagaaatcacacctacttccttgggttgttgtgatgcccaagtgagatggcagagggggcctagctctgtgtctggcacattgtggtgctgaataaatatttgaaacaatcagccagagtggggaagtgcctggggtgtggtgagggtgtgggcttcagggaagaggctctccttcctcgccctcagtcttctcacctcccagctctctgatctctcactgtgacaagtccaggcagaggccctcaacatgagcaccccagctctgaagattgcttggacgaggctggagaatgctggcgcgctagatagggttgcgtttgagggatgtgtatctccacatccttgatttgagacaggggctatttggacatcagccaggctttgtgtatatgtgagtgtgtgtgtctgcgtgtgcacatgtgtgcatgtgtgtggatgtgtgtgtgggtgagtgggctcaatggctggcaccaaaatacttgctgattaatctttgtcttccgagcgcccagccctagtccccgggaagctccagggcctgagctggtgtccagtgggcctgagggggcagaatcaggcccaggaagatggatttccctgtcccctcaggccccacccagcagggaagcagggaagactgcttcattttgtttaatgggatactgggggggacagtagtcatggggcattaactgctaattgggtccataataaagttaataaagctcttatggtctttgccattaagtgtaattaagggggtgctctgtggcgaggagggggttgttcgcggggaacgggtagtgggctctcactggcaggagcagctgatggggaagctggcaaccatgccaaggccagaagctgcactggcttctggcaccacccacccctggctgggctcccgcgcagctcctctggggattggaggtggtgaagtggacaggaagggaaagggtttactctgtgctgttcatagaagtccagggggaaaatcattaacttcagccccaatgcccacacccttgaagaggctcagaacatggaagaaatgtcatcttcaaggagagatggcacggacaatctctgagctttagggcatggcttgacttgtgtgtgctgaatgactggggacgttgcataaccactctcagcctcggtttcaccttctgtaacatgaggataaaaacagcatggttaggagggttccagagctatgtagtgggagacagctagatgagtgactgtcgtgctgttattctttttgtgagctcttgtttgttttgtaataacacaagaatgtttgatgaagccttcttgtatatacagaagcacagagtgaccctctcatccctctgtcatcgatgtggttgttatttttccagagttttggggatatatttatataatatatgtgtacatgcagaaacacatagttttctttctttttttttcttttttcgttttctttctttctttcttttttcttttttttgagacagggtatcactccatcacctagggtggagtgcagtggcgtgattatggcttacagcagtctcaaattccagggctcaggcaatcctcccaccttagcctcccgagtagatgggaccacacgtgtgtaccaccaaaaccagctaacttttacattttttgtagagatgggggtctccctatgttgcccaggatggtgtcaaactcccaggctcaagcaagccttctgcctcgggctcccaaagtgctgggattacaggtgtgagccactgcgcccagcctacattgttttcttggatggctgtatgatattccatcatatggctacgttttaatcatgttgcttgtgccccagatggaaacctagactgtttctagtctttagctcttacagtactgcaaaaataccttgatatatttctctgagcacaagtgcaggacatatatagacaaattcctcgaagcggaattgttgggtcaactgacatgttcattgaacatttttgatagatattgccagactgcacatgaagatgattgcactgtctacccccggtgtcaaaccggcagaggggctgcctcccaggtgctcagctcagccacctcagttgctctcagacacactcctggacagctcccgggatgggggagtcccaaggagagcacgcaggacagggagcgcagcttcccctgggaggggtgggacaggagggacaggagccagccctcccctctaagcctgagaaagccactaggtaaactcggttgtcagaagggagggagagtttcagtcagggtcaggggttaatgcgatggagctactgggacacactgtgcaaacaaaacaagttaggggaggggaggggccggccctctggccacagggagggagatgggccagtcagcctgcacttggctcttccctgggtagctgccatcgtgggcacaggttctgggctgttgaggaccttgtggccaggctgctgggctctaaggccaagagggcagcattctccttctgaaggccgccccccagagctggcacggtaggcctgctgagctgccttgcccaccttcagggcccctccacaggtaatccccctggagccctgtctgggaggctttggacggtattagaggtgagccgggtggcaggccctggagccaggcccagcttttagagcattcctgagcattaggctccctgtcccagcccagccttgccctcaccccatggagcccctggggcttctctgcttcagctgctgctggcctaattacaggtgtccatgtcagggtcagcagtggagttaattcggggcttgtcttggggtggccggggctcattaatggagtcccaaagagcctagggatgagccaggcaaacaggggattaggggctgaggaagactgctgtgggggaaggctggctaggcagggctgtgagctgggccccggggagggggtcagcttcaagcctgtgtgttcacccacccacccacacaggccctcatgagacccagcagtgctcagacacgcagacacacacagccacgggccagacactcttcagagacacatatggactctcatacacaggctcacacacacagacacacaccattggacttagaactgctccctgagaagccttgaggtgtgcaggaggggtgggggagatgaaccagagatttccctcttcagccagaaactctggcctgcccctgccagccccctcctgtgccctctcccaccctggccagggcattgagcttcccttctccctttccttcagcatgtcctcccaccatggactggaattccgaagcactggtctgtgggtagaatgaaagagccggctcccagccaggatgcagggaggcgggggtggtttctccacacccctcagtccagcctggcctagagggtccctgagcccagctgtcagcccacctcccccataccaaccctgtgcctcatgacagccctggggttctgtggggaggcagagccacactgcacagaggtcaccaaagagaaggaggaggaggaagacaagaaaggagctgacaggagccagggttggggcgggggctgggcagggggaaatcgcttaaccccgaagccgccactagtctttggagcccctgcattgacgggggccagctggagctggctgaggacaaggggcccaagtgtgggaatccagggaggaggcctccccgggcttcctggatcagctgggaagagagaccccagagccttcttctccagcccgccctcctgccgccatccctccctagagtgtggagacaggccccggctccctggctctgttgccagtgggggaatttttccagcattgacctcaccccgaccccaccccaggctggctggctgatgttcctgcactcctagcagcgtggccatggcagcacagggcaggcaggggattcagaaacccaacccttgactctggaagagtcaggttttcccaaggatacctccttccacctgtgcccacttaccaaggcacctccttgactagtatttagaagtgaccccagggataaagtgactcccattacagaaacagccactgctccatcccactaacttcacctgctcatcagtaaaggtgcccacgggtcagactgccacctgtcatcacctcactcttggtcctaggcatcaagccttcccttctgggcccccagtgtcccccatgccatcccaggaccccacacacactccaggcccataattgaatataaaggcccagaagctagtgcaaacagtggcattaatcaccagcaacctggcagcctcctgccatagatcttttccacgcgtagaatagctcatgttaatcactgccgctgatttattgtcttctccgccttgtacataaattattcactgtggctgggctgcgaaggaatcctgtaatgaggccttccatcctcccatctccaaggtgaatcctcagacctccgggtccacctagttgtgttcactggtgggtcaaggcatggagccacaggcatgggattgagaggatgatagggagtggggacccccatgcaagaatatctgtccccccaggagcatatataggacctcttcagctccaggaaacagggctgcggcctcgcctctccagctctggacaggagagacagggcagaatggggcggaggaggctgttgggtggccccagggcttcctaaggctccgggagagtaaagccttccagcctttacctggaagttcctgctcaccacctgagagactctcccgccaatcaaggccaactcttgggagttccccatcaccggaagcaggatgtgggcgtgtccacgggggcagaagacctgcctctcccagctccctgtcctaccctggggtctgtgctgctctctggccacacctctgaaatggcctcagcctcaggaaaaggtggtggcagtagttatggcaatggccaccagatggcagccctgatacccaggacagtagctcagggaggtgggaggctgcatttgggtaaggaaatgcctttgggaaggtgggaatccgccagcggagggtgatggggagtgggtggagagggggtcttgctgacagggagagctcttagcctcaggggaccaaagtacaggacccacttcacacatcaaaccactcatggtgacatcctcaaatgggatggtctcaggagaggaaattggggcccaggtgtatgtgggcaagtgggaccccagagggtgtgggtgctgccagatggacttccctggccctggcccaacacccctgcagcctgactttcaggctgtccttcccaggctctgatccattgcatcccaacccctctctcttggctggggcactctcggaggcagccaagacaggagctactgtgtactgtggtcagctgggggccagcaagccccgccctcaggatctgtttcactgcacacatgcagcactgtgagttgcttagacccagtccatcaagaacacctgtccccgcacaggcccactgtctcctcccactcctgtatgtagagtggagagctgctcagagatacaaatgggtcctaagattcaggagacttgtggctgcaacactgggcttgccagagtgcccctccagcccttcacccctccacaaccccctccccacacaccttacatcacctactgaggcagggcggagcctgcactgggatggtgtagaggatgcagagtatttgccttgttacccagccagtgagctgctttccagcaaagatgcgggctccggtcctttaaataccttgagcctagagggcaaagctggcagaacaaggctctgaaggcctccttttgccccagctgcctagatgggagtcctaggaaaacatctggaactctgtgtctccttggcagttcttgcctaggtgtccttgctgtacatcccaccgctaagctctctggagatatccgctgggattctggagtgcccctcccagaccccaacaggccctctgggttctgatgggaactcccaaccccaggcagggccctatctcctgaaggcaaggtcaagacattcccatcaatgaagaccagtgtttccccaagtgcaagtcctgtgcctacttcagacctactgagctggaaactgtggggaagaggtccagataactgaattgttaccaagcttcctaaagcctgagaacctctgtacgagacacttccttagagccaggctcatgccctcgttagatcagcttcctgagggcagccccagaccaggatgggtgagttgtgaggtttttctagttggcctccgagtattgacttccctgccaccaccgccctggaagtgggcacacctttggcctcctcactgtcctcctgcctggtccccttcccttcccgccagccctctggcccttcccagccagcttgcctggcttcctggacctgctgtcttcatgtctgtcttcacatctgttccaaggctgccccagccccgcttgtttatccttcagggggtccaagtgggtgtttcaacttcaattatgctctgactacagccaccacagataccaaaacaaacgtcctgggcgtcagaggtggtggaggctcagacaggctggtgccagggggcctgataaaggggggtctgcttgggcttggaggtgatgagagctgctcctagtgatagggccctggggagcaggggctcgtgggtaactggcctcctcaggtaggcccaggccacagaggggacagtgtcttggtcttagtacctctctctctgtctcccagcttctctccagtctcatgtaacagaagccttttttttttttttcagtggggacgtgacttgtaaaagccttccttcttcccagctgctggctaagtctggcctcacctccagaggacaaagatcttgactcctcaacccaggccggcctattgagatctttttaaatcccctctcagaccttgtggtcagtgtctgaggatggtagcagaagtcagggatcctggacccagctctgttggattgtccctgtgacttggagtgtggtctttgcacaagctgtgctttggtttcccctctctaggtcaattagcagaacacatttcccagtctgattgcccacaagggagaaaaattcaaaccttccaggctccctggagtccctggagaatacaacgaggtgtctcagggagcaatgggaagcaggacgtggtgcctgctaatgagtgggccctgatttccgtctggagcatcagaggatggaatgccaggcatccatgactagagagaggccccagctcccattgatctctgtggcaggaaccaggagacccagcagaggccatgctcagcagcccctccagctgcgcttctccttagtgggaaggagccctcttactcactgcaccctctctgaattctcccccagtacctgcttttgcccctacccttgccttctgcttttcccaaatggccacctcagcttatctgcccattggctgatctctgcaatgatcacatctgggaacacctttaataacaatgataacagggccaggcacgatggctcacacctataaccccagcactttgggaagccgaggcgggtggatcacttgagtccaggaattcgagaccagcttggtcaacatggtgaaaccccatctctattaaaaatacaaacattagccaggcatggtggcaggcacctgtaatcccagctactcgggaggctgaagcgggagaatcgcttgaacccgagaggcagaggttgcagtgagctgagatggtgccactgcattctagcctgagtgacagagcaagactccatctcaaaaaataaaataaaataaaaataatgacaatagggccaggggcggtgactcacacctgtaatcccagcacttcaggaggctgagtggggaggatcacttgagcccaggcggttgaagctacagtgagctatgactgtgccatggcactccagcctggaaatcagaatgagaccttgtctctaattatatatatatatatatatatatatatatatatatatatatatatatatatatatatatatatatatataatgataatagcaaggaaaacaaaaaacagctcctatttatcgaacacttcccatgtgatgtgccagatgcttttgcgatttgatctttctgtcctacaaggcagacggatataacagccccactttatagatgagggagctgagaggttaagtaaatgttccaaagctgcactagctccactagcaagtggcagaactggattcaaacccaattagttctgacttctgagcccaaggtttttgctccaggcttcggatgtgctgtagagagcggggtttactttgtgttggctccatcagccccttgaaagctcagggtcatggcttctgtagggggctctctctctttagtactcagggttgaagagacccttgggccactcagggggccccagagtcctgctggagacccagggaagctgtctcagtcccaaatgaacctggtcatgtgtcagctccctgtccacacggctgagggcaaactttctcagagctcagctctggctctgctgcaggatgtgagttggggggttctggttctctgagttcttgaggagggtctggatgagggtggggtttctattctgatctctgttctggttcctcttactcattcaaccctggctgctgcccaaacacaggcagcctctgccctggggctggagccacaatgtggcaggtggagggatgggaggtggactattggagccagacagctgcttcctatccctgccatgcacatgcacacacacagtgaggaaggggcagggcacgtgagctctggaaggagggagggccaccaggggctcattagggtgagtatgggcacatttgtgtctttgtgagtgtgcacgctggagattgggagtgtgctcgtctgtggctgtgtgtgggtgtgtgcctgtgaggtggggtccaggctgagtatgagagtgtaaacatgtgggtctttgaaataatgagtatgacagagcagtgcactagtgtgaccatgtggggtgtgactgcttacaagtgtatgattgtgtgagcgcacaaacacgcatgggaaagacagttgctgtctcttagaggaaaaatcccagaactccaacggccaacgtctgctctgctgttgaccagctctgtggctttgagcacatgacttctctgagtctacatgtcgctacctgcaaatggggaggaaactgtctcacagggtaatcatgaggacgaggtgcaggtgtgggtggagcactttgtcatctgtcaaatgtaggtccctgggaaggtcaataagcaatctccatcctctgcctctctcccccacttgcacccccacaacatgctcaggccccagccaagtgccaagctggggtgggtggtgtcccagagctgcaggctacatggccagaggtccaggctcaggaggactggttagggatggtgagagtgagcaggtgtggtgccatacctgtctactccagcttcacatgtttgacccaaggctgccctgccccaccggcaccagcccatcagcactcattattctcctctggatctgaggggattctcctctatctcaccccagcccagcatgctgtggcttctgctgcctcctccctctggggaggtgaaggcccccccagtaggaggctctcacttcaggttccccttctgaccttctgaaggccattccccactaagatcccagggtcttcagccctgtttcacttccattcccagcctcccctgagcttcctcaaatgattctggggcacctagtccatgcacctacatttggaaatcatctacttagcacagtggttctcaaccgtggctgcacatcagacaggaatcacccagggaagacttgaaagatcctgatgctgaggctgcccccagaccagaatttctgggttggtactcaggcattattacaggtttaggcacggaatggtgggtcatgcctgtaatcccaacactttgggaggccaaggcaggaggactacttgaggccaggagttcaagaccagcctgggcaacatggcgagaccgcctctctacctaaaaaagaaaaaaagaaaaaaagaaaaaagaaaaaaaaattgttgggcatggtggtgcacaccagcagtcctagctacttgggaggctgaggcaggagattacttgagcccaagagtttgaggctaccgttagctataatcacgccactgcactccagatagtctctaaaaaagcaaataaaatgacaaaataaaataaatataggtttaaagctctcccaggtgattctaatgtgcagccaagcttgagaaccactgctgatgtttcccaagcatccttgctgagaagaatcacttgggacgcttcaagtattgaagtgtattcaggtattgaaatgtattgtgttaaatacacagcttcccaggctccctcccctggaaattgtcattgggtgagtctaagatagggccctgtaatttgcatttttaataaataccacagatgattctaattattagggaattttggagctactagcctagagctgtgtttctcaaactttaatgcgcatccaaatcacgaggggatcttgttaaaatgcagattccggttgactagttctggggtgagagcctgaggagttatagaagttctggccaatcggagcataaattaagagatggtgaataataagacaagaccagagaagaaggcagggaccttataaactgtgacaaggagctcaaacttgatgccatggcaatgaggagccaccagagggttttaaacagagggaaagcttgttcagatacatattttagaaaggtgtattattgtggccatgtgggagatgatggatcatgcatcagaggatcagacatcagccaggaggctgttgccacattccaggtgaaaggtggtggcctgggctaatgaggtgggtgcagagggagagaagttagtagtcttgtggaagactcagtgatcagttgggtggaggctgagggggaagatgagggaggctccagagtaacccctgagctggctactgacttggcaactggtgaagaggcgtgcccatcttggttggctctgaagcttccttccacatctactgactctatggtctgatcattgtttggcttagcttcttgtgggaccagggtgggagagaggctacaggaagctgcctgaaatgcgttatggaactggtgccttggagagcccttctccttgactttgagtgactctggaggctccctgtcagcagttgccaaggcttagaggctgctttggggattcggtcttctgcataccttggctctccatttttttcctctctggctcccttccagagaaggaagcccagatgaagagaaatctgcatccaaatggcacccttgctcttggatcccatctggtgactctccttgtgaaccctaagtgccccctaaagacctcccgcaggccatttctcctgacatctctgcttggcacaccagtcccatcctgaccttgaccacagacccctccccacattgagctctgtctacccactccaaggacacttggcctgttctcctgtttggggaccttatttttcccttttgtcagctaaatgttggctcagaatcccctaaccaagtaactgctttgcagttcccaggctgctctgtcacatctctctctggtatagctctttctacggtgcaagtgtgcagtaagactgagattcaagtcacactcactaggctgggagggccattctgtaatcaattgccatcatcttgagcatctggtgagagctaatagtatgttgggcaccaaactaaggactttatatgtattatctcagtgtatgttcacatctccaagagatagattgtgcagtggtgcgatctcggctcacccgcaacctccccctcccaggctcaagccattctcctgctcagcctcctgagaagctgggattacaggcacactccactactgcctggctaatttttgtatttttaatagagatggggtttcgctatgttggccaggatgatctcaaactcctgacctcaaatgatctacctgccccagcctcccaaagtgctgggattccaggcgtgagccactgtgactggccaggttctcctattcttattttacagatgaagaaataggcaaagatgttaaataacttgcccaaggtcactcagctaggaattgggactggagcctcgtgcatcttcaccactgaactgcactgcctgtcatagtcctcatcagcaaccaaggctcagttaagtcctctgcctaggatcagcctcactggatttttcccagagaaaatgtcaggccagggctaaggctcatacccagaaagctgagggagggagcagatggtaaccccagggggattttgccacagtggagttagggataggaggtcaaaaggactgcagttgagtcttgctctgcctcttgttatctgagtgaacgtggccaagtctgacctctctgaacttcagtttcctcatctgtgacatggggatggcagtagaagctacctctcagaggttatgaggaacaaatgaggaaatgtgcaaggcaggattgtatcaactgcaaagagctgcctgatgtaagtgactgttagtgccagcagtcactcaatatttatcatgaattactaggaccgaatccaggtgctgtgagtacagccatgagcccctgggcctggacttgtccctaagatgacaaattgcaagtcaaacaagaatacagtcaccttgccactctccgccttccatgggccttttgtgatctttctgaagctatgacttgggccctggccatctttccttacctgtgtaaactgaaggtctttagccctctaacagtctagacagcccccaattttaacattccaggggtggaatgggaggcgggtccttgtgacatttgctaaagcagaattgctgccaaaaaggggcctctttcttcatgcaatgaataaaaatcttagtgcctcgtgtttgtgtatgtcaagactcactgctgaaacttttgttaattcatttattcaaatgaaccacatttatttaaatttactttaaatttcaaaagtaaactaaaaatgcattcttgttgtaagaaatacagatgaaataatccttccaattccagaatcatctgcagaggtcactgctgtggtcaattcactgtgtatccttctagatcatttcctacgcatttacctacatgtatatattattcaaggagaaacatacgatttttttgttgggtttttacctttgtacctgagtatttttgtttttctgcaatttgcttttccagtgagcggtggctcacgcttgtaatcccagcactttgggaggccgacgcaggcggatcatggggtctggagtttgagaccagcctggccaacacagtgaaacaccgtctctactaaaaatacaaaaattagctaggtatggtagcgggtgcctgtaatcctagctactcgggaggctgaggcaggagaatcacttgaacctgggaggtggaggttgcagtgagctgagatcgtgccactgcgctccagcctgggtgacagagctagactccatctcaaaaaaaaatgtatctatctatctatatatatggcttggaatgaaaatatggcatgcacattttcccatatcagaacatggaggtctacctcattatttttaattgcttcaccttaagtattccatagatgggggtgccactgtttattcacccattcccactggtggactgttaggttgcttctgatttttcattgttgtaaatttgcttagtgaactctctggtatgtggttctgtgggcagacatggctattttgttaggataatggatatctagaaatagagttggtcaaatgaagatgggtattgttaattttaatagaaactgccaaaatacctatcaagaagactgaaccaattcagggcacttccaagagaggatgagaagaccaacttacgtacacactctctcccatgctggatactgtcagtacgttgaatttttgctaatccaatggatgaagctaaaacaaatcttatgtctattttaatttgtagttctcaaattatgattgcatttctctcatgttgagcatattttcctaagttcattggacattgtgtttttatttctgtaagtcacctcttcatatactttgcccattttatttttatttttatctttggagacaaagtctcactctgtcatgcatgctagaatgcagtgggcgatccgggctcactgcaacccctgcctcccaagttcaagagcttctcctgcctcagcctcccgagtagcttgggttaaaggtgcctgccaccacacccagctaatttttgtatttttagtagagacagggtttcgccatgttggccaggctggtcttgaactcctgactttaggtgatccacctgcctcagcttcccaaagtgctgggatttcaggggtgagccaccgtgcccagttgcctattttaaaaactggggtttcaaaaatatttttcttattaatgtgttggaaattcttaattctggttattaatatgtgttgtattttggctgagtgcagtgtctcatgcttgtaatcctagtactttgggaggccgaggaaggaggattgcttgaggccaggagtttgagaccagcctgggcaacatgcaagactcccatctttacacaatataaaataaacaatttagccaagcatggtggcatgtgtgcctgtagtcccagctactctggagactgaggtgggaggattgcttgagcccaggagttcgaggctgcagtgagctatgatcttgccactgccctccagcctgggtgacagaccaaacacacacacacacaattttattttaatttaatttctttttctttagagatggtgtctcctcctcttgcccatgctggagtacagtggcatcatcagggttcactgcagccttgacctcctgggctaaagcaatcctcccatgtcacccttcaagtagcggggactacagtcacgctgggcatctttccagtacaccctgtgtcatcatataaatgatccgtttccttagcaagcaacctcttcccaactacaatgtccattggagggccaggcacggtggctcacgcctgtaatcccagcactttgggaggctgaggtgggcagatcacctgaggctgggagttcgagaccagcctagccaatatggtgaaagtccatctctactaaaaatacaaaaaaattagatgggtgtggtggcacacgcctgtagtcccagctactcaagaggctgaggcaggagaatcacttgaacccaggaagtggaggttgcagtgagccgagatcatgccactgcactccagcctgcacaacaagagcgaaactccatctcaaaaataaaacaaaataaatataaaataaaataaaataaaataaaataaaataaaataaaataaaatgtcagctgggggacagggactgtgtcctcctcatttttgtctcccttgcaccaacacagagccagcacccctgggtgaatgcgcatacaccttcccgtgccaggcacatgcccacacttccctatgctcaggctggtgtgtggggggggtgtctctgggtaagcacgtgcatgacaagtgttgagactgcacatcgacatagcccacatgcttgcgtctcagtgtggccatatgcatgcagctagcacacctgtgcttgtgggcatgggaatacacatgtgtctgcctttcttcccttgacagttttctgccctctacttccttgggtcagaaaaagcaggaactttttctcttggcaggaggaatatttattaacagggataaagtgaggatactgcaatccttgtagtttctcctggggaagcctcattctttctgaggcctctgcccgccttctttgctctcttctcccctcctttttctatttcacatctttttccttccccacttcgggaggaagctcatctaagctcagcctttgctgacaaggccatttgggcccattagttgcctctaatgagtgactgccttctcggccccttcccccacagcaactgggaggcagggatcaattagctgctgccgtaaacacacacacacacacacaaacacacacacacacccttacatgtgtatttatgcttccacatgtatatgtacacgtcacatactatatatgatcataaatacactcatagcaaatacacatacatcttctcttcttgaccagtaatatctcctaggggtctctactctgctccttgctctgttcaccaagaagaacacccatggccaaccccacactccccagctcaaacccagattcccacgattcgaaatgaagttcaactctcatgttttacaggtggccaaattgaagctcagagtagggaggtgacttgtccaaaatccctcagtcagttagaagccaagctgagcttatgctcagtcctatgccctctgatgcccagtgcagtgctactgcatccgagagagaagcggggtgtcccatgcaggcccaccttgatcacaacagagctgtggcgcttcaaaggtagcatgtctaggttagggtgtgcaggcatgatccttaaggtgatagggactggggaggctctgccatgaaccaaggagggagagggtgggctttcagggaggcctgccttgtcccctgggttggcctggcctggaaattgtggagagaggagtccaatctcagtctccctctggcttctgcaagtctcaccgtggctgtctctccctccaccgagtactgacctcaggaatccctgattcctggcaagctccctcttggccagataggaagggggcacctcactgagtaccctgttccaaagtgtcctctgggggaagataggttccatcctggccttggccctggcctgttctccagattccacactaggacgggaggtgtgaggactgggtccaggcctgaggcacgcaagacccagcaaagtcctgcatgaccagcctaggccacctgggtcagaatgccgtggcaccactgtggccagccacttggagacattcgtaacaaatacacatacatcctcagcagctgggtttatggctgagtcttagcaattttgtctcctaaggtcccagccctgccagggacccaggccctgaatggaagagctgaggacgggtctgagcggcccttggggaaacttacccaggaggggtcacagcaggggcaggggcttccagagccccctttcaccccagaagctggaaatgatactcttcttgcccccgctcagtccctctcccagaggcggatgttgttggggggctgcagttctcatctacaggcccctcttctccctgggagccccagaccccgcctcctctccctatcctgagtccctggctggagctactgtggagactgaggcctgttacctgccactctccatagccctcaaggccgcagtgaagcctgccgggggcttgagggggcatcctgggagcccatcccttggctgatctgggtctcagtcaagtccccaggcctgctccctggcctccccctcagcagggcttagctcagcaagtcctcccttagattaagtttccaaagggaatgtccttttccagcgcggccctcgccctaccctgaaaggctcagagcagcagagtcttggctctaggggtgttgagccagcaggtgccaacaggggatggaggaggcaatgggccctggggcaagggcagtgggggacatgggctccaggtcgggaagacttgggctgaaatcctaacttccatttagtacctgagtggccttggagagctatgccacttttttcctagagagcttgttaaaatacagtaccgggccggcgcggtggctcacgcctgtaatcccagtattttgggggccgaggcaggcggatcacctgatgtcaggagtccaagaccagcctggccaacatggcgaaaccccatctctactaaaagtacaaaaattagccgggtgtggtggcacatgcctgtaatcccagctactcgggaggctgaggcaggagaatggcttgaaccctggaggcggaggttgcagtgagccaagatcacaccactgcactccagcctgtggatggagcgagactccatctcaaaaaaaaataaaaataaaacgcagtaccccactcttaagagttttgttttttttttttttttgagatggagtcttgctcttcgaccaggctggaatgcagtggcacgatctcggctcactgcaacctctgcctcctgagttcaagcaagtctctgcctcagcctcctgagtgagtagctgggattacaggtgcctgccaccacgcccggctgatttttgtattttttagtagagatggggtttcaccatcttggccaggctggtcttgaactcctgacctcgtgatccacctgcctcaggctcccaaagtgctggaattacaggcataagccaccgtgcccggccagagatttcttaatgtgtaaaatgaggagaacaaggggttctccacaaagacttcctcgcaagaatgagaagccatgtataatctctattactgtttacttacgtgtgcactgacaatttttggaagggcatacctccagaaatgggaataacaggaggaaggagggagccttttacttttcactttattctcttttgtcctgttttaattttactatgaagcatgctttatttttatttaaagaaaggaagggaaagaaaagaaaagatgaaccgctcccagccaaatagctgagccccagttgagtcagtaaacgtagtcttaattgttatctgttaaatagttaacaacccatccttcactgggcattgtttctgggtgtgaaagtgatttgtaaataaattgctgtataaatgttagttatgataaacaactaggtaatgatgtatttctatgcacaattatgtatgtgaggtggcctgtcctaaatatgagtggctgtgtatatccttcaggggaattatgcaaatattgtaaagcggtggtgaagagcacgctgtcagtagccatgctgcctgggtttgaatcctgaattcagtatctactggagatatgatcttgggcaagttacttagcctctttgtgtctcagtcattctgtctttaatatggggacaattaggccaggtgtctcacacctgtaatcctagcactttgggaggctgaggcaggaggacagcttgagcccaggagtttgagaccagcctggacaagatagtgagaccccatctccacagaacaaaaataaataaataaataaaaacaatggggataattagccaggcatggtggggcaccactgcactccagtctgggtgacagagcaagctgcccgcctctctaaaataaaaaaataaaaaataaaaaaataaaatggggataatacctactccataggattgctgtgaaggttaaagtgaactaagtcatgtaaaactcttagaacatcccccagcacatggtaggtgttcaacaaatgttttttattttgtgtatctacgtgagcatgttaatgtttctcatccctttaacaggaggagcaggtggccagacacggtggctcacgcctgtaaccccagtactttgggaatccaagtggggaggatcacttgaagccaggagttaataataataataataataataataataataataataataaaaggaggaacattgtctgacccttcccccattagaggggctttgtggctctgtccatcctttcagtctgtttgtagacacttaactttggtaactgcgagcatctggagtgcttgaggaagctgggcttgctcagagctcccatcctaacagggagccctgggagtggaggagagacacacatctagcttgcatcccaccatcgatgcttccaggacacttctgggggtggcaatatacccattgtgcccctgggtcactcagataaaatatcagctgagccaggagggaaccactgagggtgggggtggagaaaagtaggtcactctcagaggccatccaagagccaggggcagggaggggcaaggcgggggcgggagcagtttataagggaggctctgcaagctcaggtcagagagaggtgtcattccagcagcagtggcaagcttaattccccatcctcttctgcagggtcagcctgccctcccacccaccccactcccagctcttgctgcttctgatgctgctgggagggctgttccagtgcatcccacctctggaggcacctctgggagatgctgggctgccaggcaggttgagcaggtttgagagaaggtgggagggaccctgacttggaggagggacctgggcctggaatggagccgggttcctcaggcgcccagacaggtggcagcctgaggaggggtgcaaatgtgctcagagccagagcccagcctggagggagatgggggagctaagacaggctgacctccacccctgggctgcacagccccgttcccagtgtaggccctatgtcccagagacctgcagaagtcagagattctgaatgcaaaactgggacatagggtcaggcaagggcttgtgagacacatgggataacgtaatttaaaatgggacctaaccgctataccccctccatggggcatgagcacacgcactgggaaatcatcacctgtcggcttgtgtgtattcatcacacaagcacacactgtcaaacacatcacccgcaggcacgagtacacaatcatgaacacatagatacttgcaggcacagacaccacacggggatggtgctggagcccagagtgctctctctcgctttccaggttcagaaatcagatcctgggagtttaaatagtgtgactaagggccacctttggagggtccccaaagagaggccctcttcaggcttttctctcctaagaagccactccttttttttttttttttaaattttagagcaaacatcagccagaagccactcttgcctaataccccgcagccacgacctccgtccataagtcttttgtccctctgtggagtggctggccttccaatactgccacatttgtgtgcacacctgaggtctgaccccttccaggactccaacttgggggctcctggagggctaactcctccctgatcagggtttttcccccagggacactgctttattatttttttttattttatttatttacttattttgagacagagtctcgttctgtcgcccaggctggagtgcagtggtgcgatctcggctcactgcaagctccgcctcccgggttcacgccattctccctcctcagcctcccgagtagctgggactacaggcgcccaccaccacacctggctaatttttttgtatttttagtagagacagggtttcaccatgttagccatgatggtctcgatttcctgacctcgtgatccgcccgcctcggcctcccaaagtgctgggattacatgcgtgagccaccgcgcccggccaggacactgctttagaagggggtcaatgagttccagtgaggaggccaagaaagctgaggtggaggtgggcaggagggctgcggcagtgaggagagccttgatttggacaggcgtctcacattgaggctggccacccagatccacgtgcctcctgcacagaagcacctcacctggaggggtgaggagcagagaggaggaagagcacggggcaagttggcgagatgagccatatgggcacatgtaggggaaagtgcaggcaacagtattcctatgctattttgggggtaaatggatatatgtaatacttgtccccagatactcatgcttatacacacacaggttctcacacacatgaaaacattcttaaagcagacacaccatacggacctgggatttcacccacagatgcccactctcaccctgcaccctcagcccccacgtcgccctgcttctcacacacacgtgctcactctcacatgctggccagctcccagcttctctggctcaggctctgaacagaatgtgaatgtgataaaatcgacagctgaaaactgtcctgagagcaaagctgtactttgttgagaaacctgagcccttattggaggaatacaagtgtctgtgtctgggggctcggggagaggggaggtcgtggggtggtcccccagggcgcctgtggccactgggctgtttccatcataaaaaaaaatgatgaaaggagccgggcagtgagagcatggctgtgagtaaataaagctgccacctttgaccctgggaggccagagctcatcccagaacgaatgctcattagggagggggtgctcaggcccagcccaagttctccagcaccggaggcccaaggccagattcccaagggggaggggatatgagaacccctgtgtgaggctaggggacatgtagagggagtagggggtggagaaaggaacaggggatgtgggagggggttggggacattagggagaggatgatggtcatgggggagggatgaggacaggtaggagagctctgacttctggctccccctccctggactcctctctctgcagcctctccaggtctcttccgctcttgggctctgaaacaagcatacatctcccttctcctgctgtaggctcggtttgcttatttttctgatcatcaggaactataggcaaacaggggttagcaaaaataacaaacacagggcaaactacaaagtcaccaggaatcccagaaaggttgagaagtggttgattctggctttgattcagaaataaaagaattggccaggcatggtggctcatgcctataatcctagcactttgagaggccgaggcagttggcctgcttgagctcaggagttcgagaccagcctgggcaatgtggcaaattgaagaaagaaaaaggaaggaaggaaggaaggaagaaagggagggagggaggggagggagggagggaaagaaggaaagaaggaaggggagggagggaaggaaggaaagaaagagagggagggaaggaaggaaggaaggagagggagggaaggaaggagagagaaagagaaaaagaaagaaagaagaaagaaagaaaagaaggaaggaagaaaggaaagaaaagaaaagaaaagaaaagaaagaattgccaaacccacatcctatgggtctgtcccaaactcctttcctacagatctgttcagctcagcaccagacagtcctggcctggagcaaaactcaataaagttggctgcatagataaataagtggatacatagataaatgcatgggtggatgaatgaaagaagggtcttggtcatcaaccccgactctgtctgagttcaaacttcaagcacttatgtggggctggcctctcggtggggccaggcaggatcctcttccccttctctgcagctgacctctgggcccccctccccccagggctgacatttcactttattctgtagtcaccttggctcttacaggctcacctggtccagtctcaagagaagaaagcactttgcgatgtggctctgaaagacccctgccctgcatgtctcttcatcctctgtggacccagcagccactccctttgttcctcccagaggcgactatgtggccactaagtaggtcctggaaagtcctatttcggctaattttaatgagtgatataataataaaatgtagcaataaactgagttttcaccaaaaagacaagactcccaggtttttatatcaggacataggggcaacagtgacaagaaacagatcagtatacttcccacccctgccaccccatctgtccctgacttagaaggaggaatagaaagaggaagttcaagaaaagcatccctatttttctgtaagggtgaggttgctggaggaagtccagcacaaggacactccaggcagaacagagttattgggaggccagtcctcggctgggggggctgtctctgtcccgtaagacatgcctgcagccacatgcccagaacttggcctttctttatgccccagacacaatgcttattttccctgaatccctgagagtgacctggctgggtctttgtccctgggggaaatagggaagctgaacccccaagtggggaggaggaatccaaggtagctgacccctgtgtgttcccactggatgcttggtctgcaccaacggccccctcctggccaaatttctcttgctgcatcagatgaaggagaaaaccaggtgggttcagcttcaaaaaccagccaaagacctaggagacagaggcatcacagaagtcaatcaccattttctgcctcccctgttagagttccctcaactcaactccagcctgaatcatcgccaacttttcctaagttactctgggacagacactattctgtgggctttacatgaatttaaccctcacaggaggtctatgaagagatgctgtaattatccccaattccagatgagaaaactgaggtctagaaagtcaagttactggtccaaggtcacccagttattataattatgattatgattattatcattattattattattattgagatggagtctcgctctgtcatgaggctggagtgcagtggcgcgatctcagctccccgcaacctccgcctcccgggttcaagcaattctcctgcctcagcctcccgagtagctaggactataggcacctgccatcactgagcccagctaattttttttatttttagtagagatggggtttcatcatgttggccaggatggtctcaatctcttgacctcgtgatcctcctgcctcagccttccaaagtgctaggattacaggtgtgagccatggtcccagcccagtttttatttttttatttttattttattttattttttgagacagagcctcgctctgtcgcccaggctggagtgcagtggcgcaatctcggctcactgcaacctctgcctcctgggttcaagcaattctcctgccttagcctctggagtagctgggattacaggcacacaccaccacacctggctaattattgtgtttttagtagagacttgttggccaggctggtctcaaactcctgacctcaggtgatctgcctgcttcagcctcccaaagttctaggattacaggcgtgagctaccgctcccggccttgcctggtttttaagtggaggattggaattggcaccccagcaatctggcttctaggtggctggcaggtatctgagtctggtttggggacaggaaagcacaggctcaggatcagattggaagatgagtgagtatccccagctagctgccctggagctctgctgccaggacccccattggacccacagcaggtagaggcgcagccctttcacaagcagcaccaaggtctcctctgtgctgacagaaaggtgcaaacacatccctctcccttccccgttttactgaactcttaccttctcagcaacaaaaaacttcatcaacattaaacaccaccatgatgtatgtttatatcactcataatgcttcatctcttgatcttattaaggttaaaaccagcggtggctcacacctgtaatcccagcactttgggaggctgaggcaggaggattgcttgagctcaggagttcgagatcagcctgtgcaacatggtgaaaccctgtctctacaaaaaatacaaaaattagccaggcatggtggtatgcatctgtagtcccggttgctcgagaggctgaggtgggagaatcgcctgagcctggaagtttgaggctgacgtgagctgcgatcacactactccactccagcctgagcaacagagtgagacacacacacaaaagctaaaacctgtgctttttctgagtatagcccataaaaatatatcatcttcttcaattttttaaaaatttaactttgcattgtttgttgttgttttgagataagttctggctctatcgcccaggctggagggcagcgatgccacctcggctcattgcaacctccacctcccaggctcaagccatcctcccacctcggcctcctgagtaactgagactacaggcatggcaccaccacacacagctaatttttgtattttttgtagagacggggtttcaccatgttgcccaggctggtctcaaactcgtgagctcaagcaatctgcccagctcagcctcccaaagtgctgggattacaggtgtgagccactgcacccagcatgcattgttggtttttaattttttttttaaattaagacagggtctcgttctgtcacccaggctggagtgcaacggcacaatcacaactcctgggctcaagcaatcctcccaccttagcctcctgagtagctgggactacaggcatgcgacaccatgcctgtttgcctattgttttgtttttgtttttgttttttgttttttgtttttctgtacagagacagggtttcgccatgttgcccaggctggtcttgaactcctgggctcaagtgatctgcccaccttggcctctcaaagtgctgggattacaggtgtgagaattccccaattccctgcctagcctatttttatttttatatgatataaaataacttaaatttatttttaaatggtaaggcttttctcaacacaatttattggtaatgttcttttccccattttctaacacctatattaaattcttaggtgtgattatgtttatttctaggctctattctgtcccattgatttaagtgccaattttgatgcctacgctacattgtttccatttaattatcctataacaaaatgttttaacatctggtcaaacttgctcttctttagaaaattatttgacaggttcacctatttactctttcatgtgaaatgtagaatctttttatttttctgagtttcaagaaaatgagtttttgtttagtagggcatcaagtctatgaattgccttggggaatactgatattttataatgcatggcgtcttcacctagaatgtggcacatcacaccattttcctgtgttgtgtttagcagtttgatgggctgtgtgctattcctttgtgctgatgtcccctagctgacttaaccacttccccagtgttgggtatttggattgtttccaaggtggaactattatgaatagcgctgctataaacatctttgtacaaattgctttttcatttccttgggatatggtcccaaaagagggattaactgatcaaagaatatgaacagtactgtattttttgttacataacccagggaggatggaaccaattagcagcaacatatgaagaaatagctacttttcccttacaaaccctcaagcagcatgaagacttaaaagggtaacttgttcctaagagaaaaaaaacacagctacctgaggacaaaagtgggagtttgagagcacagggttctttttttttttttttttcctgagacaagagtctctctgttgcccaggctagagtgcagtggcacgatctctgctcactgcaacctctgcctcccagattcaagggattctcgtgcctcagcctcccatgtagctgggattacaggcatgtgccaccacacctggctaatttttgtatttttagcagagatgggattcgccttgttggccaggctggtcttgaactcctggcctcaagtgatccgcccgcctcagcctcccaaagtgctgggattacaggcatgagccactgtgcctggccttcctttcttttttcaaagtccacaccccactggagcctgcccactaggttcctacttcccattttaagctcttcagttggcttacagagtgcagatgatgggcaggttctgattccaatgaataggccacgcccctcagcacagatttttgctcttcctacttctccaggtcctctgggatgactcatagcccaggtaccttctggggagtggtttttaccaatactgtcgtacaattgcacaaggcccagataggttgaacacattataatatgtacacagaattcccatcaaggataagagaagccacgtttctcaaccctggcaaactccgggatattccatggcagcatcacctttggaaacaatgcttggcgtatgggttggttgtgtatttatgtgtgcgtgttcttttgtgtggacatgcacacctgtgtggttgtatgcatctctgagtgcatgcttttcagtgggggatagtacagatgcatgtctgcatagctggacccatgacttcaatgatggtcaatgtgttatgcttacgagtttgcatacacatttttgagagtgaggagtctgtatgtacctctgagtgtgtgtgtgtgtgtgtgtgtttgtctatacatcatgtacaagtcatgtgaaaggcctggttaggaaggtttcccatacccagagcacttagaaaagactcgggagggacactggctaggggaggtggggtaaagagaaggtctaatccttcataaataagcagagggatgttgtggtcagtcagaaatgtctccaggcagattcaggcaggttttcagtatttagcaaagtcacttgtagcccagggcaagaatggtgggtgggagttgggggtaagtgtgtgctggccagattaggtctagccccagttttaaggggcaagggatagaagaatatagtaaagcattcgctgtccccccatccaacaggctctgggccccatcctgtcccctatggccttccaaaggccggacaattctaccttgatggagaggtggtggctgctggaaagggcctccaggaggcctacaaagaggccttgctcgtgcccctcactcttctgcttgctccaaaatcagagaggcctccttcttccagaagctgcttaaaggtttcgctgacttcagaagcaaggaggaggagggaagaagcagaggaagcctctgaggtggggaaacttttgctgagattgcaggctccccagcccctccctggttcctcattactgagtccttgggcatgaaatgtctttttatttgaaggccaagaagaaccaggggttgtgttaatgaccagcaagcagcagggcaagaagtaggcagggggctggctctcttgaccttgaaatcctgtctgcacttttctgctgtgcagatcccctattttcccagatctctgtcaccttagccccgccctcttaatgggaccctaaagaagactcaagaagaggggttagggaggcaagaaaggcacacagtgtctgaggaactcatcaactgagtctggaaaattgagcagggctgaaccagaagggatgatatacatcttacataaatttcagtgcagtcacaagaaagaaagaaaaacagagatagcccaataaattaggaaacctttacactgtttcggcttgatgaattagaagacagaatccactatacctctcataagcaagaaaagcaagagttagagcagttaatggatctgtttacaaacatactataaaagcagtgtgactacaactctgtgtcctgtgactagacccatgtctctgtgactctgaatctacgatccaaaaaaggattgttttgttgtgttgtgttttttgagacagagtctctatctgtcacccaggttggagtgcagtggcacaatcatggctcactgcagcttagagctcctgggctcaagggtcctcccacctcagcctctggagtagctgggactatagggatgcgccatcatgcctagctacttttctatttttataaagatggggtcttgctatgctgcccaggctacccttaaattcctaagttcaagcgatcctcctatcttggcctcccaaagtgctgagattacagatgtgtaccactgtgcctggccaaacacagtagtttttaaaaattgtgtgctcttggccacttgaggagggactcatgaactgtgctctgagaatgtgcagggaggcggaactttgatttcgtttttgaagtaggagtagaaattttctttccttttggcggggctgcgcatagggaaaggggttgtcagggctttgcacccaagggatgactggggaaggtgtgagcgtttctatcagttggtacaacagggcaaagggcagccagcgactggggcaaggtactaccgatgaaacgaaagtaagtgcagcgccttgaatggagggggaagggatttggatccccaccgccaaggcaatgcgaagccttgagcaatttctgagtgggggaagaacacggcctgtacgccctttaggggagaaaacttgggcccctcccagcagtgtggattcggaagagaggggcttagcaccagctgggactaaactgctgcagaaatagacgataaatggaggtaagggtgccgatgaggctcccggcgtcggtgaggctgcctccggagaaggggcgcagggggaactcctggccaagaggcctggaaaggctgggaacccagcacccctgagaaagggcgcaggccgcggcccccagcgtgaggcggccacgcttcgcttcggcagttcttacagagcgcgcgtcccggaagccgcgggctctgcgttctgagcctcgcacctcattgagaggttattaatagggagtttgtctggtgtcagagcgcagacataaactgcattagcattaccccataatcttattttgtaaacgctcatgccgttccgtctcctgtaattgcattgggaagatgcaatatttatgaaaggggagaggggaatgtcactgttcatctcggtgctgcagtaaaagtcccaggaaagacggtgctggccgcccaggcctggcggtgggcctgcgagaatacccagcgttggtgccgcgcgccctctgggtgtcccgctggctgcccccagcccagagctccctcctcaacctacctcactgagccttgggcagcagtggaggatgtgccggcaggggcagcaaccatgtctccccgtggtgttatccctcccagatggtggtccctggcgaatggggcacaaagatctgagatgcactgagtctttctggtgggtgggaggctcaggcttcgcctagctcccacccttagtcggggttttcttttgccaggaggcaaacctactccagagctgagtggggtggggctaagggtggcagtggaggtgagaaagtgggtgatttggtcaagtaggggcaggggggcagtagagggcagcagcaggtgggaggcaccccaccaggggtcctggctggggctctgttggccactgggattatcctgaaaacccagtgcagccagggattcctaggatggtttccctcttccacagccctaagagccccgaactggatccctagggcacctcatatgtacactcagtccagaaccaggtctccggcttcacagtggagaaggcaaagttgcccgtgggactcaggggcatgccccgtgcccaccccgcctgaacattctggtctgcaccaatcttgggtggagctcaacagccagggaagtctcactggtgtccagaacacctctgagtgggtatctgctggtgacaagctgagactctggtctgcccccaggcacttgcagttcagggacagacacacaaagtctctgccctaggagctgcaggcgacctaagtcagaggagttatttcccagccacatatcggaggcttcctgtgtgttgtggagagggtggggggatctgtgagcttaacctcaaaagggctacaagtattggaacagtccggatatcaaggatgtcaggagtggaagagctgaacagacactgctggtgcttcatcccaggaaggtggagcccatggcgggtaggggagaatgggaaaagtgaggtgccaggagccccactgtaaattgccggtggtcgggtcgaggggtgaggtggctgcagaaatctgggccgacaggagggcagataacaggcagcgactttatgtgggccccagggcagtgccgggactcaggcccagctccctggttttggggctactgtggcccccagggatgggagcttggtctccttacaaatcccatccatgcgtcactacaaacagctctaataattcctgccctgcagtacctgtgcactttaccatatccacaccccccagcatcccaccccactggcaggggctgacagctctggtgctcttgcactcttgggcacatggccgcacacccagacccactcgctcatctcagactcataccacactcaggaaggcccctaactggtctaattcccagcagtggccttccccgcacccgcccctcgcccctccccgctctagcttcccgactttcgtggggaaggggcaccggaacgcagggcagctgagaaggaccgggcagaggagagcgacggcccctcccggtgtcagcttcctcgccgcagtcccattaatcacagtgccgcagtccagttggggatcccgggcgcccagggccgcccgcagccccagggacaatgggattatttccggggagagaggccgcctcgggccggggctcaggcggagacgcctccttccctcaatccgtccctcggcacccaaggagcgcctgcggcggccggagacgagtggcagagcggacgcgggtggcgcgcgggtggcagggcctggccgacctaattcaattagctgggccgccgccgcctccgtgcgactctgggcccgccgggactccagctctgggcagctgctctttgtgcacgaagaccatgcatatggatgcggttcctcccccttcggcgctcaccccacccacacccacttctggcacctgcggcttgccccgccctcccactccttccccgcgagggaaggcgaccgtggcctccccaggaaagttgggaaactgtggttgcttttgagctccctgtggccgtcttcagagtatgtgtgagaggggagggggtggttttgtttttttgttttgtgttatctgagcaggaaggtctgtgtggaagtgagcgtgcctgtaagtctgtaggagtgtggttaggtgtgtctgtgtgtacctgtgcaccagcatccatagggctgtgtgcacggagggagagggtttcgtttggttctggatctgtgctgcagagactgagtgggatggatgtgtttgtgggcatctgcacatgagtgcatgaaggaggctttgtgagcacgtgtggggactgcacaccgaggagtgtctgcgtgttcctgtgcaaggtgagtgggcatctgtgcatctgcgtgtgagagtgttgcctctgtgccaagcctgtgtctggaagtcttcaggagttgggtatttctgtgtgtcaccattggtgtatatgctgtgcttcagtgtgtagtcaggacaccatggggaacatgttaacctccccgccccaactaccaccggccagcagatgggtctccccagctgaggccattttctccaccgctccccaccccgccttgcttttctggtggaggaggagcttggcaagttagtatcaaacctgaactccatccaccaggctcgggtggaggcagagtcctaggtagccaggctctctcatcttgaggaggtgtcccagtcagttttccactcccagcacagtccagccctggctcagcaggagcctgcagcttccaatgtgcaaacagtcctaagcaccccctgaaataactagacctgcctctgtcaaggtgaccctagcacgtaggagggactgcatgacccccacctccacctcttcagccacagttcaggattgggtcccctgggaggctgggtttcctgtgcttgggcatctccacccacccttactctgaggccaaatctgcacgcccagcagaggcgaggaattgagatgagaaatctgggtagagctggccactgcagggccgtcacccacccagctggaaagcttgcctcattcctctgttttactgtgcacaggcaaagtgagggatctgcacacctgtagaggtcctttctgcagaccgcaaagggagctggccaaccccaggaaggaataggatggttcttagaaagcagcggggccctcagaggcctggtcccacagcaggctggtgctctcttggcttcttctccgtcccctacaccttagtgcagggcttggcttctggacccagcacagacccacctggccagcagagtggagccaagggagacacgaaggatgagagaggttggggctggtccacagccctgggtcctaggctcagctgccctactgatgggacccactgatgggactctgaactccgtgcccagggagccctttgagagctgtctgggggagcagggccctgggggtctgtccttccctgagccttctcttagcctactccctacctgcccctttccaggtttctggcatccttggaggtgactcaggatgggagattccctaatcaaggccaccatggtcaatacagtgctggatggatggtggaatctgaggatctctgggcctctcttgggagggaattagtcagagagaggcctgaagccttagctcaatgcccaggggtaatgaggccaacagcttcctttagggtcagaagccgagcagggaggggagacagtgaagggaagggatccctacagaagcaccctatttctgaagcatccacctgctgggctctgattgagaggaatgggcaggggaggagaagaaaactccgtacccctacacaaggtgacagctaagtgtggcctacagcagggacatgtctgtctcctgtctgtctgtcctttatccattcagggtctctccactgatgggaaaatgtgtgcctgtccattggtgttggagaggtcctccatatcttatgtaagaattgggtagggggacagggggctggccttggaacaacccccccaaccccgaggactcattgagctgagtcacttggcctactcactccccccacctcctcagtctaggctcctagagaccctcctccccaacccagggctcctggagttacagtgccctttactgggtctctaagtccctaagtcaccaggtgatcctgcctctcccacagcagggaaagttttctgccccttttctgagacaaatgggaaggtagagggaacacttttggtactaggaatgcagaccccattggccccgccatggatcgcatcatgtcacacatccccttacatatttctcagccccctttccctactatatatccattgggtataccctgtgtccccctccccacgaccacaggcccatacacagccacttctctgacaattccatcggaataaaagacactcctcccatggtacacgccatctgcagcacgcagtcgtagcagagggatgccctcatcccatcacaggcactcactacagaggaacagttgtaaacacatactcatcttgttgcagaaaacacattcacttgcattctcactgacacatacatcctcacatgacaaaatccagttgtataaaatacccagactcccttcttttcctccaacactcttcccaacatgcattttgcttgcagttgtatcccaacagcctaacacagtgcctgatacatactagatgctctataattattcattgaatacattgttaaaattatttcttaaagacatgcccaggacatctgcacagccctctcaatcctgactgtcacacaggctttcccatccagctttcccctcgtggatgcacggccccacaaacacaaagtaattaagtttccacacatatccgtaagctaaaggacaacccctggcccgggggtctctttcagagcggggaagaggaggagattgtgtgggatccaaaggggcctccccctgggctgagcccgtcctttcctcctcccccagcccgggccctggccccagctgctcttcttttaattggaggcacttttttattctgcaggccagggggagccggtgcttggggggaggggtgttaccaggtggcctcagaaccagagagaaggatctgcaactcacctaggttcctgcaagatagtcctgtgaggcaagagccaagtttaggcttaaggaagcagcttgtagtgagtggagtcaagaaagcagtgtttgcgtctggtctgcccctttccagctttcagtgccttggttttctcatctgtaaaatggggataacaaaaaccacatcacaggattaaagatgagtggagagatcattctggtggctcacacatggcagttgctctgtgagtcctgctttcttcccctccctcctcgttcctatcagggctgttttgcaaggcatgcaaaagcacggtggaaacacagaagctgcagcgaatataaacttgtgtgagtctcctctcctgtttcagaaaacttcccaaccttgcaacaccgtgctcaggtaacactgctctcaggagaaggggtgggcgccagagcccagcaaatcctgaccctccagtctcatctttctaggtaaggaagggacagagagggtagtcttggccctcagtaaataccctattggaagacaaaggctgggattaagctgactcacagaatcccagcacctcattgagggtaaaagttgggagtatccccaattgggataaaagttgactctgataaacaaaaaaggtaggaggggaaaaaggaagaaatccgtcaaggaagcggctgtgatcgcaggggaaagtcagtatatccctgggctgctggattttaatgagaagagcttgacagtcttagtgggccatgtacaagggagtggtgactctgccaaccttaagctgggccaggaatggtaaagtctcctcccaggtaccctggacaactgataccagatctgaggagttcaagaggtagatcaggcaaatgccaaaagggttggaaggccatctgagctggagatgtgcacctggaaagataggtggtttattttattttattttattttattttatttagttttataaattttaccttcaaccaacccacaccaaaagatggggttttaactgcagcaggtaaaactgtggtgagactaaaaggagtgaggccactaggacccagcctcaaaaaaagctgcagtacccttccccatagttttcagcctcaaacaaggaaaatagctcagattttgagattccagatcaatcttctctgtctatggaacttggagcaagtttgttctctttactgagtctcagttttcattttctttttagagatggggcattgctatgttgcccaggctagaggtgcaattatagcacatctcaggctcaaattcctggccccaagtgatcctctagcctcaccctgcagagctgctagaactacaggcacgggccactgcacccagccatttttttctttttaaaaatgagatataattcatgtgctataatattcagcccctttaaaatgtataattcggtgggttttaatatttttaaaagttatgtaaccatcaccactatctcattccagaatgttttcatcactccaaaaggaattctgtatccattagcagtcaatttccattccctgctgcccccagttcctgaaaaccactaatctattctctgcctctgtggatttgcctattttggacatttcataaaagtggaatcatacaatatgtggcctttgtgcttggcttctttcacttagcagaatagtctcctaggttcatccatgttatagcatgaaccagcatttcccttcttttcctttttatggctaaataatattccatgtgtggatataacaaattttgtttatctattcatcagttggtggacatctgagttgtttccccttttgggctatcatgaataatactgccatgaacattcattcaattctctcaattataaaaaattgggacatttctattaacttgcctgggttgttataagtcttaaatgagataagcatgatgtggtacctggcacaaaactgtctttcaataaataatttatttctgctttagttccctcaagataagaggcaggaagagattcattcgggttcagacaacttccaaagtaagttatggaactccttgggaaggggtagagtacctggattgggtaagtgggaagaagagaactggcgagggagcggagccctctcatgtttctgcttagtgtttttttttgtttgtttgttttttgagatggagtcttgcactgttgcccaggctggagtgcagtggcgcgatctcagcttactgcaagctctgcctcctgggttcacgccattctcctgcctcagcttcctgagtagctgggactacaggtgcccaccaccacgcctggctaattttttgtacttttggtagagacggggtttcaccgtgttagccaggatggtctcaatctcctgacctcgtgatctgcccgccttggcctcccaaagtgctgggattacaggtgtgagccaccatgcccagccttctgcttagtgtttacaaacaactaccaatttcacatttggctttgtcttgagtgggcctttgtccacctggctagagctcagacaaggttttccccacagatacaaacttccaaccagcacgtaggtttccaggctaacccacaaaagcaagttgagtctagctcctccatattgatccacaccaatcatagctattctgaaatgtactttcctcacatctgtaaaatagggagaatactcatctcgaaggattggtgtagagtttatattgttctccataatactaacatctgtcttgttgtatttgcttctttgcttattgtctgaccccctctatagaatgtaagcttcatgaggtcaggacctttgttttgttcactgctatgtcccccatgcctagaacagtgcctgacacatagtgagtacagtactcaataaatattattgaataaagagatacattctttgttattcacccaagatgaccatattttgttgtttggggctgtattcttcaggagagaacagaaatgaataagccactctctgcctccaagaagatctcttcaagtggaggtgacagacatgcccaaagcaaatagattgcaataagacttgatgggagagaatgtgagtcttcacatcctagcatctttccagatagagacagggcctacccaaaagtctaatctgaaactgaactgaaatagaacagaaatagatcccaagtgatggaacctgtgcctttcccaaagcttggcttctaaaaggtagcaaacattttctactggagaggggaaagacaggaagaagaaaaagggagtttcctccttttctcttgggctctcagccagacagccactggcaaaacgttggaaaggcctaaatttgtcctggatgcacttccctgatcctagtcccaccaatcccagcccccacggccttaagcccctatggctccctcccaagattccaaacgtaagaaaagaacacacaccacagtccaaaggcttcttgtctggaatagccaaccctggggtaattgttaggtggaatgcaatctggttgaattcattcaaacactgtaggaattgcctctttcgaaccctgtaggattttacttcttgacgcatctgtttatttaaaaccaaaggggtatgttgaggcatgggcaccctggcagcagaccccaaaccaaccctcttgacttgtgcctgcctttcaggatatgttcccttcctgaatttgtctaagaaggctgagttggggggtggttgctgatttttataacatatagccagttgttcataggcctgtgttttaaagaagggcaagcctgaactcaccgtcctgcctcagggcctgggctccatacctggggagtagacagtcttctactttctaaaaagctggacttgaaatttggagtaaatctcctggttgagtgacaggtgtttcgcagctgagcccttgaggagattctccagttgggcagagacatcccttcctcagacgccttgtgggctggactcctttggcccagttcaaagtgaggggagggctcccaacaggccgggaagacagttgacttcaccctccttgggtttgtctgtctgtccgtctctgggaatggtcgcttcctgttttcccttttccttttaagcctcgccttgttcccctcttctctctcttcatgaactactccgagtcttggtctccgtccctctatctctggctcctgcatctgtctcggcttctggccttcctctccccctcccctcccctccctcgcgctgtcattcaccccgctcctctccgcgcacagccaatggagagacccagtcgaaaccgcgaagctctcttgcaccgggctttttcgcctggtgattgatgtcccagagtcaacagcgagcgagcagccggagcggggaagcagaagccagagaggggaagaatacggcgccccctctctccctcccctcccccttctactttagcctttctgcgcacttcgcttccaagtctccgcgcagccaggagccgctgttgcctcccagcccctgctagctgccccccgagccgagcgcagcgagcgccgccgcccgggccccccggtggggccagggccagcatggagcacctgggtccgcaccacctccacccgggtcacgcagagcccattagcttcggcatcgaccagatcctcaacagcccggaccagggtggctgcatgggacccgcctcgcgcctccaggacggagaatacggccttggctgcttggtcggaggcgcctacacttacggcggcgggggctccgcggccgcgacgggggctggaggagcgggggcctatggtactggaggtcccggcggccccggaggcccggcaggcggcggcggcgcctgcagcatgggtcctctgaccggctcctacaacgtgaacatggccttggcaggcggccccggtcctggcggcggcggcggcagcagcggcggtgccggggcactcagcgctgcgggggtaatccgggtgccggcacacaggccgctcgccggagccgtggcccacccccagcccctggccaccggcttgcccaccgtgccctctgtgcctgccatgccgggcgtcaacaacctcactggcctcaccttcccctggatggagagtaaccgcagatacacaaaggacaggttcacaggtgagtccggcccgcgcgctccccgcctggccgcggcccgggctccgtgctacccctgccccgccgggtggctccccaaagccggttctgcgctccaggtcgcccagctcttcttggtgcttcccccaagttgagccgcccgcccgattctataacgcagactcgccatgcttgaagagttctctcagcctggacccctctctgtctcccgaaggacccctgctcggaggagctctccctggtcccctctccggatccactagccgggtcaggcagagagaaggaggccatagattcaggaccaccttctgcagctactcttggcctgggaatcttagagaaaggggtgcaacgtgaacagtttcttccgtcctggctgctgttctaggacccaggaagcgagccccaggatcagacacaagaaaagaacaggttcccccacctccagtcccctacacacatgcacttcgcgcccctagctccggtgcccgtggtgctgcggggccagtgggggctctgagccccggtaaatcagca

SEQ ID NO: 621 - DNA, 21363 bp, Homo sapiens
  source 1..21363: mol_type = genomic DNA
gccagaggttcagggcttcctcccagagtgccccgtcccctgatgttgggtctggggtgcagacctgaggagcgctgcgaccctcctaggctattgactgttaagtcctcaggtttggcccagattccagttcgtgcctctgaggtccaccagagggcgcatgaagcccaggctgttgccaaaccctaccctgccccacaccaaggagccagccaaaggcaaataaagttattgagtgtttagtagaaaggaaccaggtctgggtttgtgagtcccttgggatgggaggggcagagggtggggctggttactcatgtgtgctccctctcacagagctcagtgttcccagctggatggtggggcaaacccagagacttaagtgcaaccagcctaggccccgggccctcgggaccaagccctcagagctgccggccaggagggtggggtcccgctcagccttgaaacaataaagagaatcaaagaaggtattcagggtgtggaggcaaaaaaaagcactgctctttactgagtccaaatgactcgactctgggcctcagtttcctcatttgttttgttttttgttttttgttttttgagacggagtctcgctctgttacccaggctggagtgcagtgttgtgatcgtcagctcactgcaacctccacctcctgggctcaagtgatcctcctacctcagcctcctgagtagctgggaccccaggtgagtgccaccatgcccagttactttttgtgttttttttttttttttggatttttttttacttattttttttttttttttttgagacagagtttcactcttgttgcccaggctggagtacaatggcatgatctcagctcactgcaacctccaccttctgggttcaagtgattctcctgcttcagcctccagagtagctgggattacaggcactcaccgccactcccagttaatttttttttttttttgtacttttagtagagatggggtttcaccatgtttggtctggctggtctcaaactcctgacctcaggtgattcccccccaccgccctcggcctcccaaagtgctggagttacaggtgtgagccaccgcaccaggcccagtttcctcattttgtaagatgggactggagttgacatggactgaacctgcagtccatcccctcctccatctgcaaaactgtaggtatacatacagctctttgaggaagagagttagctctcatgagcttttggaaagggtccatggtgcagaaaaggtcaagcactacagccaagaggtctcttccatatccagtgatccagtgtgatagggttgagctctccctttccccacccaactcctgagccttcactagtctattgcatccgtccccggaaactgctgcagtaaagtgtatttgattaccttggaaaaggtgggacagcccaagccagaatgcagaaggaagaagtggatactttgggcagagccacacatactcctggagccatacagggttttaacttctagacataaactttattacatttatagttgtatccctttgtgtgatatagttaggatttctctattaagtaattaatcctaactatatccttgggctgatttgatttctgcccccacccgacagactgacccttgtcccccttccccattccagctcaaggcacttaatattacaaagaaggcagtggctggctggagagatgggcctcaagtcagaaatcccccagtgcaacttaagacaaacagagagaagtcaccttcctcttaggaccctccctgggttagcagaaggaaagaacccagaagtcttcagtaccacagtaggcttcggtatctccctagccaggtgagggacccccaggcattctccctgcccgcaccgagtctctcttcaccctggctacttcctggccacacgtatgactctgccccttactttctgctctgagctgcctgaatacaggaagcaagagttcactctgaccagagatccagaagcctgcaaggaggccccagcagctttcaagaatggggagcagatggccacatgtggcctgctctgtcttatagcgtcacaagccaggagcaagcccaggggagatgctgttccatgctggcctgtataggttactttgctcgttctgttatctgtcccccatccctaacccagataaacaatacatatgtcactgaaacaagaagggattgaagcaaggagacccatgggcacagatctcttctaccttcctgagctaaaagatgccaagccaaaggaatacaggataatggcctatgtgtccaggaggccggggacaaagctctctggctttgctgggggaagaaatagctccaactacgtagtcaagaagcctgtgacagaggtgggaggggaacctcgtgaccttgaagtcacttctacctttcatattcccttctagctatcgaataggctcttttcatattcctcacaaccccagctgttaggaagaatgtggtgtcatacagtaggtggcggggagaagacacatcttcagcctagtccctgccaagcccaccaagagcaacagttagtccctagctcctccgtccccaccaagtacccacacatccatagccagagaggccacctgtctccaggacagaaaggaaactgggcatgttactcaaggggaaggaaaggggcctaaagcccagaccacagtcatagggcccagccctctagcttggaagggagagcccaggatcgggtgaaaatgggggcttgctccttaattgcgatcccccatcagctgcagcacaaaggtgaagatgtagatgatgtctgtgtaaatctgcagggcgccagtgatgtagtcctcggggctgatggtgtgcttccggttccccaggaccagctgtgtgtcgtaagccaggaactgcaaggatagggaagccagaagtgagaactcaggcatcagtgtccagagctcatttttggtcagcagatttgtcttgggggcctatgcgccacacagtgcttagggccacattaacgcacagcataacatatgggctctatactgtagctgctcacagtctaggaaaggaggcagacacaccgttctcaatatggctgactagtgttctaatagcaggcagcttgaacaagagatggcaagagtgcccacaaaaatcaatggaatctctggacagtagtgagaggaatggcctgctatggccccattccctgcctcccaggcagtctaaattcatgcccccttccctagattcctcccctcatcccctcagctccccttcctagagtggggctgggacttaccagggtgaaacaaatggcccccagagcagcatagagcatgtggagccagtaaacctggagaagaaggggacagagaatggcattagaaacctcagcaaaccacaggcccacaggccccagcttcccccgggatagtggcatgagagtgggtagagctgggaagctagctctccatgaaaggctactgcctttccagatcttggaggaaattaagactggtgatatatccagcagagaaagcagaggccatcctgcaatggctgtataaaaccaatctccaaagccagtcaaggtacacaagtgtctactatacttctagaaaaaaagcagttgagttacagctctgaaaggggcagacccagcattcaatagaccagttcctacagcccagcctgggaggggtagactaaggaagaagggaggccccccaacccctctggtgagtatcaaaatccgggagcacccacaggacagcccacatgacatgcccacaggtggccgtccacagaaggacagagctggcccatgggcaggcagccctcgtgtccccatccttccccttcggcactgttctcccccagctgaacagaataaaggaaataattggatccagagacccccgcaaggtcccttccacctaggcccatcatctcagtcctctgggttcctctcccagtctgcctccgagaacctgattctcagctgccagccagattgaacccaccccttcccctaggagtgcagtgatgcagtccagggcttcaggtgctctggctccaaggccgcccatctccacacagagagtctaccctcacccagaaggatgctgcctccacgttggtgcctttgctagccagtcgagaggttctggaggtcagagcctgccccggggacctttggggcctgcgagaccatgctatataggaagtctgccctgagcactgggttccctgaccccagctctcctgggacactcacgtattggaagtagagcacaatgctagtgacaatcccagtcaccaggagcacaattcccaggacacagaagaggcctgtgcacgaggtgaagtccacctgccaggaagcaagaaagaggcacctgtcagatggctgtgacaaccagcccagtcagactggccctgccagggagtcccagtgctgcctcctagggggtatgggaatgtccacaacattctaaggacagaaacaggacacagttttgtaggtgcggatgaggagaaggggatcaggtctctagggaacatccctagtgtgccggggtccgggcctgataagaaaggggagtcggggggccagggaagggccctccatgccctcaccttggtctgaaagcagaagatggtgactgaaatggataccaccgcagtgatgatcattgcaatgatgacggctttggtttggtacatactggggagaagcaggagttacagacaagaggcattaagccacgtatgaatgacttcaaaatcaccacttccagaggggacctgcccagaatccacccacgcagctggctgccggcccaggaacaccccactccccacaatacacatttcccaagagtggtgctttatccctgaatgtacctggaaatggtgcccgtcatgaagcccatggcaaaagtctaagggaaggagagagacaagaatgaaacacttaaaaaggaaggaaggcagggtgctgggggagtggccatggtggcctctgccagagctggggaacgccaccaagttggaaagaggcagccacagaggagatcagaacaggcggcccagataaggtggaggagacagccaggacatccttctgaaatgggtccccatcccttccctgggagcagtctccctcacagcatctccacaccctcctgccacccttctagacttacaaaaagggtcagcagaatgatgttccatgggaaacggcgtctgaagggaaagagaagccttgattaaatgacttggggcccctcaggcgtcagaggctcctacagcagaaggaagcgcttggctcctgtgcctggaggattaagccttgactccaaggagggaggttggcatggcctttggcacctgttcaggtgtggtacgcagggacaacatgggccaatgagacagacctgtgttgtggcgccagaaacacctggattggtttgcaactcttaaactgactgcctgtgtgatggggagaaagttactcagcctctttgagcctcgggttcttcctatttgttaactggctaaaatgctacctgtcttgcagggttactataagagtgacagctagttagctcctaaacacacatggtcctttgtatacacctgaacagtagctgtcatcgtcatcctcctcctcatttcttgtaagtttccattcagctgctataaaggaatccttctttccaaaatactcggcccccatcccaatccctgtcacccctctcactgtgttaagtctctgggactcacctgggtccctggcagcaggcaaggatcaggtaggtgacaacgaagacagcactagggacaaagagatggggaagcagttcaggcccaaatctgccccgcttggcagcacacaccaggccagtgatttggggcccaaatagccgtttggaagtctgaggggaagcaactcaacaggaagcaagaacgagattacccccagccagggtcactgagatgctctgaagcaccaggctccggccaggaaggaggtctggggaggctgcagctgacgggctgagaggacatgggggctgcagcgcagcgtgcacgccaccaccagcaggtcccactcttgctctcgagttctaggggtctgctactcatctgggcacgcacacccacaccctctggcacgggaaactggcaccaacttgggggccctctcaaaaagcattttgatcctgccctgagcaaagctggtcacctagaaacagaagctgccacccctgcctccctgcccaaccacagaggagcacacactcactaggacacgtagtagacagccacatttctcctcacaaaggcgctgacaggttccctgtggggcacaggaggacaggagtagtcaccctgaggcttgtctgccccacccaggccagccaggcagccctggcttcaccttctctaattgcccatggtcaccctgagagcagggcccaccgccacccacacccccagcaggtgaccctgaacccccagggcagtaggagtgggtggcaaagcctagagacttacacaaaggtgaagatagcaatgatggccacagtgatgagcagctgcacggagatgatggagtaaacctggacacagacggccgggcatgggtcaccatccggcacccctggcctgccccaggaagctgccagcccccagtactttcctcccactcaagaaccctccctagctgcagcctggcccagaggcgaccccagtgagatgcctggctcagaggcaatgtgcacttcttcctcagccccgctcccatgctccctgccatctcccctcctgtccaacaccagcctcggtgactactgacttgccctgcctggccaccatactctaccagtatggcctctgcactcccagcagctcagtctgcacgctctatgcagctgtgagatggagagggtgggttacaagcgagtaggatcatttctggctccaagctgcctatagtctaaagggagaaagatgtctggggaaggcgggcgctgtggcagaacccacctaggagattctcccagactgaatgtgtcctcccaaaacatggtcaagaagagaggtgcaaaaagagagggaaccctggggttagagaagccaggtgcccctctgagaagcagacaaggctagagaagacaggcagccagtgtatttcatggaattgatgccctggggctactgtggcctacccacttcccattcccacagcctgaggggccccaggtacacccacctcccagcgcgtatcttacctttcggataaaagtgtgtcgcactttccggtcatcccactctccaggcccgaagctatcactcactgctctctcctccccatcatagccatggcctgggcctagggacagatgacacttgactcagctggggacctgagacatgtggcgtcaatcccaaagcctccctgacaatctcaaagtctcagggatctccagccaaaagacaagtgttataacaggaactcttctcccaagctggggtcttctagacaccctcagagtgacccagagccggcctgtcacgagggggcttaggtgggaaacgttcctcacgtgcatctgtggagggctcctgtgtgcccagcccacgccactgggggttcactggggggtcacgatgtagtggggaagccaggcaggagcaggtatgggcatccactggggcagccagccagggcagaacaggggatggggacagagggtaggagaaaaggagggcggcagagcgcagtttgtgcagcagcagggatagaggtgaagacagggatctgcatcagcctcacagaggcaggtgtgcaaagggtgtgcgtgactgtgcaggacccatgcgcagatccgcaccagcgcacatgtccaggtgagagctggctgacacccctctggggttcagagatgctgcagggctgcaaacattccctgaatgcctgaatgcctgaatgcctctttgggaactacttttaaaatccacgcttgagccacccaggaagactcactgcactctaacttcacctcatttcctttttttttttttttttttttttgagatggagtttcggtcttgttgcccaagctggagtgcaaaggcgtgatctcggctcaccgcaacctccacctcccgggttcaagcaattctcctgccttagcctcctgagtagctgggattacagacgcatgccaccacgcccggctcattttttgtatttttggtagagacagggtttcaccatgttggccaggctggtctcaaactcgtgatccgcccatctcagcctcccaaagtgttgagattacaggcatgagccaccgtacccggcctctttttttgttttgttttgttttttgttttttttttggttttttttttgagacagagtcttgctctgttgctcaggctgaagtgcagtagtgcgatcctggctcactgcaacctccacctcctgggattgcaagcgattctcctgcctcagcctcctgagtagctgggattacaggtgcacgccaccacacccggctaagtttttgtatttttagtggagatggggttttgccatgttggccaggctggtctcgaattcctgacctcaggtgatctgctcgcctcagcctcccagagtgctgggattacaggcgtgagccaccgcggccggcctcacctcatttctgaccaaacacaagcatgtccctgccatgatgtttaccaaacttggctccaaatgtcttttgcaaaagtcagatttcactttaaaggatgaggaaagtggttcaggttcccaaaggagttcctaaggaagtcgacaggtctgggaggtggcagcagcttgttggccgcttgttgggaaacagagctggtgccctgaggtaacccctcaggagtcattacttggcccagccccattctcctgtggtgtgtacgttctgggacatgcctcatggatctccttgaacaaagggggcagcaagtggctgggggccagttgctgaggcaaaaagtggagggtaacaaagacagaaacagagggagagatctcaacagagaagatgagaaagggatttaagggaaactagaagagaaaaggggcaggaggcggtggcctcatctgctccaagtgctgtccctcccacccaccttccatctgcccttccaggactcaccgtagttcatgggcatcgggtgggtggggggcatgggctgtgggtagccagcagggtgaccgtagccaggctgcgggtagccagggtaggcaggataccctcctggcaggacagatggctgcccatagcccccagggggcggagggcctgggtacagggggttgcggtcttcatatggtggtggggcgctggggttggacatggctgctcacgggctgagggggaaccccagctgctgggacctgaaatgggagaggagaaaagcaatcgtgaatgcccaggcccagctcactcagcctcatgggcccacttccagccttgtccaggctgcctccgtggagaggaacaccacctattttctccttagagggcagcgtgtgatttgctgtccacaggccacctccccaccaactgggctcctgtccctcctgcctttgcgcctgcttcttgtccacaggcctctcactgtgcagctccccagccataggaaagcaggaggaaggattcgctgaggagagagggaaccagggagcctgggaactccctgttgtggtttaagaaaaccttccagttttggtggcttgatggcagaaccagcgaagaagccagatgggccaggcacagcctcctggcgactcacagggccagctgggaccctctgaaagggtcagctctgcccctgccacagctgacggggatgccaggcctggaagccagagctgggttggagccaaggctcaaagtggagagccgggggaagaagtggaggaaaacaagctagccccagtgccagagctgccaggccccgaggaggaagggatccagggacccgggggccagtggcaggctgagtcaggaagcctgagaagcaggagtgggtggtacaggggctgggggcagggaggctgtgccaaagggccagcttgagacaggactttctggttccttcaaataacagcggtggcgtgtcagaaaggcatgcggcagcctgcgaccacagctgctctctggccttgctagggaagagagagtgagtgcacggcccctcgccctcccccttacccccaccctggagggggagacagatgttctgaatcccaggctctctgtgagttctacctgtcttccaggtgcagtgctagcagggaggacaaagagctgaggagtcaggccacaaggtcaagggaatgccttccctgcagcaggaagagccccatagccaggggagggccaagaaaccagggggagggaaccccaaactggagttggaagggacctcagggccataagccccaaatgctcacttcagatgagagaatgcaggccctgaacagggaagtgattccccagaaccccagaactcgcaggtcagtggcataaccaggacggaggccttccagatcctgggtccaggtccttcatgttatgcggtgctcttatgcctcctctgccagttactgtcctctgggcctggtggtcccctctgaggtagcagagatgcaggcttaggaggagctaaggaagcccctagagggcccctgcatccccagtaaggacaagccctggcagtctgggctcgacagggccaccacctcttctagagcatctacagggggctttaggatccccaaggaggacacccccagatgcaggtcagcagacaccagaggctctcagaggctctgctggaagcaagagagaccagcgtctctttttagggcacattgcatagttcggggatcaaataaaggactgtcttatctcttctcttttatgacaactgggataattcagagaggggaaggtggcagggagggttgaggagggggaattgaataaaagtccaggtctctaagtgggttattttgaggaaagctgttcttcatctccctagaggggctgggatagaaccagggcaagaatgtcaggtcagaaatacaaagctggcagggtgcggtaactcacgcctgtaatcccagcactttagaagactgaagtgggcagatcatgaggtcaggagttcgagaccagcctggccaacatagtgaaaacctgctctactaaaaatgcaaaaattagccaggcatggtggcatgtacctgtagtcccagttactcaggaggccgaggcaggagaatcacttgaacctgggaggcagaggttgtggtgagctgagatcgcgccaccgtactccagcctgggcaacagagtgagactccatctcaaaagaaaaaaaaaaaaaagcactggccggaaaggctctgtgggcagaaaccccaaccgtgatgtcaccatgacgtgtcccagcacctcctcagggtgcacctctgtgaaataaggtgggggcgacacgacctctaagcccactgccccctctaacaacagactatgattctgggaactcggctctgcagggcctgacctttgctcggccagagagctgcccctgctccctcctctgagccaagcagggcaaacagctaactttccagaccaagggactgtggcagccaccgggtgaaaggtgcctcagagagaagggtcagcctcggatgggccacggggactccaaggttctggtgcagctcagcgggtgctgactcagagcttcactcctgcctctcttgcccctccctttcaggcttttggtttcagaagcatgtgctagtaggcctgcctgcactgcacacagcagtttccaggccagtccttcgggtacctcagccaccagcccatccacaccagaaactaccatgaccatttcaactcactatgcctcagtttcttcacctggaaaatgggtctcacactagtaatagtaccctccacggggttgctataaaaattaagtgagaaaatacacatagaaggctgggcacagtggctcacgcctgtaatctcaacactttgagaggccgaggcaggtggatcacctgagatcaggagttcgagaccagcctggccaaatggtgaaaccccgtctctactaaaaatataaaaattagctgggcatggcagcaggcgcctagaatcccagttactcgggaggctgaggcaggagaatcgattcaacctgggaggcggagattccagtgagccacaatcgtgccactgcactccagcctgggtgacagagtgagactttgtctcgaagaaaataaaaaagaaaatacacataaagtgcttagaatgaaacccgacccctgatcaatggggataaaggttggttattttcattaaatccttacaacagtccagcaagttaatactgttattattattcccatttacaaatgaagagattgaggcacagaagaattaaatcacttggccaagataacctagctagagtgtgatgaagtcaaaatgagccccaagactgactcccaagcccctgctcttaatccctaacctgaaaacaccctgtctatccaaccttctcatcacttctgccatagcttccatctaaaaccctctcatgggttttagcctcaacaggaggctgacacaagtggaagccaaactactcaggccctccacaccaccacagggctcacagcctggccaacggccccaggagaagagggtggcccaggcttggagatacataaaggtcagagctggaaagaaactcacccaaggacagccaacccctcactttaccaactagacagccacagcacaggaacctgtccttggttaccgagctggtcctggggacaggacgagatcctagctgtctacatagagagacctgggcacaggagaggaaaccccagcattaacgctagccaggggagttgctaaactcagccacactcacctctgagcagtgccaagaacactgtcagactggcaagagcctccggggaccagggctgccgggtttggcagctttagagcctgctcttgggcttctgcccagcctccatgagggccctggccacttccacatcagcaaggcctccactagggatgaggtttggggctggcatctgcctaggtagcagcaaagggggaaagggtcagtgtttactttcgtagctatgtctaagggtggaggctagagaagaatggagggtaagggaaggagggagaaggggagagagatcacgagactgacacagagtgaggactagaaatcagatctgggttctgccagcagctactagaggggctcacagtctgcagggactttaaggtccccactggaagcctgaattttcccaaaatacagtaggcattcaccttctgcttgtttttgtttttctttttgttttggtagaaacggggtttcaccatgttggccaggctggcaaactcctggcctcaagtgatccacccaccgaggcctcccaaagtgctgggattacaggcatgagccactgtgtctggcccaccttctgcttgaaggaactccagcaacatggagcaagccccttgtctgcagacagctcgattagaacattcttccttgcctcacaatgcctgttatcaaggcattcagactgtgccctatccttgcccattatagatctaagtttgctcctctctcagggccccagtcccccattaggaaggaaccagagcccctgctttctaccacagcagcggcacaagtgggtgagctcagacagcaggacttgctgggtgtcaaggttttcagatgcagaggcggaagcacctcctcccctggagccctctcagtgtggtaatcctgctgtctgcctactgaggccccggctggggctctcctgggggtatttgaagggttaaggctccggaatctgcagaggaggcctgagctactggggttacagcaagaggagagtatgtgtactggagggagggatggaaaggagcagctgactggtccaggcagcctgccctcctccctgccagagacggatgcccagagtggaaaaaaatagctcagaatgcacatctcaggaaaccccacccagcaggcgcaggagcacagcccagatctgacgatttgttcccctcccttttcctttatctgcccccacaagaaaacactttatcctcctaccccagggcacagctgacctcatagccacgagagcaaatgagtaaaaagatacacccaggagtgtctgggcaagtcaccaggcctgattctgcaccaagggggcccagaatcaactaaatatccttccatcagcctggactttgggactaagaggatgaagccacagggatctaaacactaaaatatcagagctggcttagactttggatctcacctggtcatttgacagacaaggaaaccccagagccaagaaagttcctgctccaccccagaacagccctcttcttcgtcatgggtttggaacttcccttcccagccccgcccactctctgagtgatagacaccagcacacaccctctcccaaggaggggccagaacaagctaccattctctcagttctctagtgacctctcagctcagaaacagttaagaccgggccgggtgcagtggctcatgcctgtaatcccagcactttgggaggccgaggcaggtggatcacgaggtcaggagatcaagaccatcgtggccaacatggtcaaaccccatgtctactaaaaaatacaaaaaattagctgggcgtgatatcccacacctgaagtcccagctactcgggaggctgaggcagggggatcgctcgaacccgagaggcagaggttgcagtgagccaagaacatgccattgcactccagcctgggcaacaagagtgaaaccccatctcaaaaaaaaagacagccagccctcgacttctggcccccaactcgaggccacccctcccagccccctctctagccagggtggcctctctctggacccatggagaccgaggggtggctccaagctcccaggagggagaggctgtcctggggatcacgagaggacccaggcaccgcagctccgccacccttgtctggagcagaatcctgtgatcagaatggtaatctcgggttaccccacccaagtcaggatggcctgggagtacagataagggaagaggaagccattagcaggctgatgctataatacttctgagcacagtccctgttcacttccttctttgtttcatctcctgtcttttcattgaacttcaagattaggaggggaaagagacagacaaaggagactgataactaaccccaaaaaagaactagggaaggggccaggcatggcggctcacgcctgtaatcccagcactttgggaggccaaggcgggcggatcacgaggtcaggagatcgagaccatcctggctaacatggtgaaaccccatctctactaaaaaatacaaaaaattagctggatgtggtggcggacgcctgtagtcccagctactcgggaggctgaggcagaagaatggcatgaacccgggaggcggagcttgcagtgagtcaaaatggcgccactgcactccagcctgggcaacagagggagactctgtctcaaaaaataaataaataaaataactagggaaggaagggaaccacttagagtagttgaaccacttccagtacttactatataactaaggaagtacaggttgaatatccctcatttccaaaatccaaaatgctccacaatctaaaacattttgagcaccaagatgacactcaaaggaatgctcactggagcatttctgatttcggattttcagattagggacgctcaaccagtaagtataatatacatagccccaaatccgaaaaaatccaaaatccatgtgcttctgccactgtagatgtctgcccccatggctatcgtgactatatgctcgagtaggagagtaaagtgttttcttgggggtggaagggagttggggtgggtaaaagaaaagggagggaaggaaattgtcaaaatggtcccattttggataagagacactcaacctatagtaactaaggcacatctgatccttgcaacagtgctgtgaggtattcttaccctcatcccactctatagatgagataactgaaattcagaaaaaaagagatctagggtcccacagcaggcaaacagcagagatgagtttaagcatagatctcacacctgatttaaaattcagcctctttgcttttatatcaggcaggagtagaagcccctgaggcatctgtagcacgcacctgcgtgaataggcagcaccagggtggggccaaggcagtaaagatcaaaacgatagatagaaaggagctgagcaagctgttgttgctaccattatttctttcccctgcggaaagttgatctgaagcctgggtcctgggctaggaggtggggacctgaagttcttgtcctggctttgggactcactccactgtgagagccacatctctagacccagttttaacatcagtaagacaattcccctcaaatgaaagaatggccaggcgcggtggctcatgcctgtaatcccagcactttgggaggccgagccaggcggatcacttgaggtcaggtgttcgagaccagcctggccaacatggtgaaacctcgtctctactaaaaatacaaaaattagccgggcatggtggcacatgcctataatcccagcttctcgggaggctgaggcaggagaatcacttgaacccaggagatgtaggttgcagtgagccgagaccatgccactgcactccagcctgggcgacagaaaaaaaaaaaaaaaaaaaaactgaaagatcaaagtccactctgccagtttctgattctgaatgaacagcctaacaggaggcttcagggcagaatggcatggctccccaagaacctacaccagggggtcactactgatgtgcaactgtttccaaggacatcttcagaggcagaagtacatggcatgttctcagtatggggctgtccacaccctcccaaactgtccccataatgctgtctggaccctacggccagctcttcctgggtgatcagttacgcccgagctaaacagtatataacactctaggaaagaaagagtaggaggcaggaagtccactgacctgggttcatgaactagctgcaggaatccaggcaaatgacctcccctggcctccttttatccctaaatcagcccacgtgggggaaaggagtagggacttgtttatgggagccacagtggagaaacagaatcacctagccaggcatttcccagactgttctaaagaacacgccccaggagacgttaatgaatgagtgctggaaacagatgactcttgagaaacaatccacacccccttcttggaaattcacaatggcatattctgcccctgagaagtcctgcagtaagcaaccctgttcagctttgtttaacccagtgttccttcaaactcccttaagcctgagccacttttatcgaggcaaacctattaacaccctgtgggatgctgacccaggccacctttgtattacagacacccaaccctgagaatcattcatatcctaactcctcgtctcttataacctctgtgcgtacacccagctgcccctcagagcagtcacatgaagtactagacatgccctctcactctcagggggtcagcccagtgccaggatctctggcgagggtcctccccttcccccattccacacagctgctatcccaccgtgggatttactgccaagggccgggggacatatccagctaccacagaaccaggaaacgggcacccctaacctcacctctgtgcaacggggcaaagcacaaatcattacagacaaaagtgggagctcattaatatctcccttcccaccaatggaggtacctgccactgtagcctgtcgacttctggatatcatttctacttcaaaacaagacccaggttttggcctagaatcccagaatcttagggttggaagattctgtcaaggtcatcccttccactgtgtccccaacagaataggtccagaaggcccatgtcatgatcagacatgttgttagcagaacttcttcccagagaattgtatgagcttccactctctggtcgtcccagttcagccctctgaaaacacacaagtatgtgtgtttcccttctctgtggcttctgctttttctgaaaggcccagggtgaggcctgcggttggaggtgctctgaggtagacagcgtctggctgaggcacccattcccaggggaggaggctgagcccaggtggctattaccccagctcatgacatgaggctctcccaacacttacaggataacccatcattacctctctgaagggctcatttttacaagtgaggccttgaggtcatagcacagaaagacagggcccctgacactgtggtcctgcctcttccatttaagctataaactggttctctggatcctcatgactggagagacagagagaggaggcaggtgagaaggaagtatggctccccctttgcgccaataaagcagccccaggaggcacctggctcccctgccaccactggccagcccaaagtcgccagcttggaaaccaaagctcactaatgagatgaatatttcagagcccagagaactggacacctgagggcccttccatgacatctggctctgacctgcgttcccaggcctacttatcccatgtccagggtgctcaggtagaaccccaaactcctgggtaccacgtagaggccacagaggagggagaggagatggagaccccataggacaagaattggtgccgaccccacaaggccagggcctggcctcccagcagcctccctctgcttcctcccactggtccctggctcctgccccagtctctccacttgctttcccttttcccgtttctctgttttgttttcactctaacccaaagaagtcacgaggaggatgttactcccctgtagttctgtgaacccagccgggaaacagtggctggaagtgggactggcagagggcaaagtcatggtgatagaggtggccacttccccatgccaaacacttgagctgctcattggcttctgccccagctgcaagctaggacccccccttccccaccccttaaatattcacctgtctacaccgagactggcctcagcgcgtgtgggggcaacctggggtccgtgccaggccctggctgtctcccctccctcttccctcttctcaccagctgagggccatgaaagccctcatcccacacagctggccactcgggctggcatggtggataggccctgcgacagagaggccactcgtgcccgaaagagggaacacgaggacacccccagaccctggctccgctcaccagtgcccacaacacgctgctgggctcccaaggctaaccaggtgccacagacccggccgcccacccgcgcgcccagggagagcgaaacgccaagggccaggaggggagatccccatctggaacgggctccttgggcccaggagcgggcaagccgggagcgcgctccgaaaagtttaggcgccccggcgcatggccgccccagccctggaccagtccccaccgcccacagtccccaacggcgccggccccggccccctggcttgcctgcgccgttccagacggagcgttcctggcctcggagtgttgcaagtcctccggggccgggcagggctaggctcggctggggctccgcgccccgccccgtcgcgccggcctcgtggggcggggcctcagggcgccgccagggggcgcaggggtctgtcccgggcgcgcgcgcctctcagagccccgacgacgcctcactaataacacaggggtattttcggatttaaaggcaatacatgatactgataggaagctagaaaagacacagaaatgcagggaagaaagtaatttctctccacccctcctagttcccagggggaagcgttcgctttgggtccttctttggctattacatttctgtatgtattttgtttttctacagtggggtatattgtatggtgttttgtttactgcccttctttttactgttttatgatgaacatttttcttctcactaaatagtcttcaaaagcacaatcttaatgccgtgaagtattccattgcatggctatgcggattaaattaatttcctactggaggccgtttgtttcccatttttacattacaaataaatcagtaattaaaatccttgataattctgtgtttttgagataaatgcacttttcgagtttaaaactgcaaacatgcaaacctagaatctctgtttataattactcaaccaggaaagcaggtgctttcctcaagtcagaattcagaagtcctacattgagatgtagattactactgttaggtaggtcttaaccctcatctcagtgaagaatgcagtagcaaaggaggaaacagttttgaggaagttctgaaatattactggagcctgggcatggtgactcacacctgcgatcctagcacttttgggaggccaaggccagaggatggcttgagcccaggagttggagacccagcctaggcaacatagagagaccttgtctcaatttaaaaagagaaacattaccgagccttgcctgagtttctgtggttccaaagtccaagttctttccatgacaccaaggctgccagtagttgaccaactctgtttaaagtgcttatctcatgttaatagctataggtcagcaccacaccaccactgaatgtccttttttttttttttttttttttccagacagggtctcgctctgtcacccaggctggagtgcagtggcgccatctcggctcactgcatcctcctcctggtttcaagtgattctccggcctcagcctcctgagtagctgggattacaagtgtgtgccactacacccagctaattttgtttgtttgcttgtttgttttgtttggtttgtttgttttgtagagatgggttttcacgttgttgcataggctggtctcaaacccctgagctcaaagcagtcagcccactttggcctcccaaagtgctaggattacagacatgagccaccacgtccagccccaaaacagagatttaaaaaaaaaaaaaaaaaaaaaagacagatttttaaaaactgccccccatacacacactatgtatgtttatttctgtaaatatagtttaagtaggagttacttagggggactagtggccgttatggtgggc

SEQ ID NO: 622 - DNA, 443512 bp, Homo sapiens
  source 1..443512: mol_type = genomic DNA
tggggatcattcgtttacatttcttttctttcaatcaaggacttctttttttcttttgaaattctttcctgcactgatggtgagaaaagacccctcaggcttccttttgatgttggaccgagccagcccacggtgagaggggatgctgagcccgtggtgaggagctcaggacaggaggggacgtccagagacctccgaacccatggcccttcattcccagtcacaaggggggagtcggggtcccgccctcaaactgctcagaccacgcgtggcagaaagagcagagcatgagcatcaggaaccgcacagggaagccgctgagatcacctgggatcaccaccatgagggaggccagccctggagaaatcagagggaaaagatagagagaacgaagtcgggggggggggggggagggcggatcttccttgtctgagtctgcagagaaattgcctattgcaggagcaagtctagagaggggctattctccacccactgaaaagataataaaacacatgctatgggcggcggggagatgattggggagtggaagccccacagacatgcagtgaaaaatgatcctttcttcccctctgcgttctcgtccccttcccagagacaccgctgtgatctcgtgcctcgccccctccgcacacgcacaggtgcacacccgcatctgtcttgagcccgcaccccgccttcacgctccgctgcgcgctgcttttccgcgctcagtgatccagttaggagctctccccgcagcagctgcgcgggactttgcattccagatgtccccagccctccaggctaaagcagcggccacctgaagttgaggaatggggcgtgacgaccaccaggtcccgcagtgaccacgggagggtggggagaaggagtccagctccgccttgagcgtcgggtccctgggcaggaccctccgggccacgggccgctgtccgttgggcacccgggcaggagtctgcgaacgctgagtttctctggaaaggcgcggacccccggaggagccgtcccagccgcctggggagacgccccctcctctcccggtcttctttcccgggcacaccctccctagcccgggcgggggggttctccatctgccgcccctcccggcgggcaggcgaactctctcctaccgcaccctcaatctgtccgcggtcgcggggctcggcgggggcggggcccgggcgggggcgggggcggggccgggggcggggcgggccggcggctgcggaggctgcggaggctgcgggagaaaagttgtcccggccggagcgcgagcagcggcggagccggagccgccagagccagagccggagctgcggcggcgtggacccggcaggggcgggcctcggacagcagagacgcagcgggcccggccgaccgggctgcgggagtggccccgggcatggggcggccggcgggggccgcgggcgggcgctgcgcttcgggctggcggcgggctgcgtgagcggccgggacgcaggatgcgctccgagggtgcggcccccgggccggcggcgccgctgtgcggggcgctgagcctgctgctgggcgcgctgctgggcaaaggtaaggccggggcgggtgcctggcgcgccgacgcatgcgaacttcccggttccgggggagctcggggtgagggcagccgaagcgaggggtgcggcgggggcctcggcgggggctcggatcccatcaacagcgcctctgcgggtgccgagccgcccctaatccagaagggcgctcccagctgggcgccgggatccgggcaagttaggctggtcccgagtcccgaatctcccaccccggaccccccagacccagagctgccccgcggatgaggagggggcgtggctgagggacacggtgtttgttccccatccctgagttccgtgcggacctgccccagccccagcacagtcaccctgtggaactggcatccaggagaggtgctccgctctgtgcgctccttcctcccggctgtgtgctccctgtccacagctccccatccacagcttcggcactgtggggctggtgctccaggagggaaggcccggttctttgcatcccctttccgcaaccgctagggtctctgtgcgggccctagaggaacgctcactcatcgcgcagctcaccagggaccccagcttggcagaaaccaggggctctctgcgggttctctcaaatgagtcctttgcggtgggggagcgcggatggggaggtgggtgcgtccctcgcgacgggaactacctcaccagcggtcctgtccggggctccttcacctcagtgtcctcttctctacaatgggagtgacggccctgctttgggttggaggaatttaaaggagttaacgtatggcgcccgcagggctcacgaaaggtagccgtgtggtttttccgaccttttttattatgtgcgtgtgcggccgagtggccgcgcggatgcggcggcgggaagggcggggagaggcggtctccagccccaggagccgcggggcaggcggggagcaaggcctaggctctgccagggcagcagctgcccgagtcccggggcgcgcccagggcgtagaaaaaggagagcgtcgctttcctgctccccgcgccctggcgaaggtctcgggttcatttggttaaacggaggtgcgcacatgggtgccctgagccttcgcgcggcgccgcgggtccagtatcggccccaggctctgagcagagaacactcaaagccacccttctcccgcctaatgctctgaggctgagctagaaatgcgttcagagagacaagttgtcaatggaggtttaaaagtagcgtttgcttttcaaaagtcattctgcaccgcctgaaaatccagaaaaatctactttccttgaggctgcgctttcccagatacaccaaccagacaagtttgctatgttttatataagtgttcctttcttccaagagctccaggtagggaggagggtggggtgagagaggggggggaagaaggagtgagagaagagggaaagagagggtggggcgagagaggggggaaagggggtgagagacgagggaaagggggggcaagtcgggggtggaggagtaggagaggggggcacttttctattttatttgaaagagtcaacagtcacgatctggtgcctgaattctgctgttaattagctctaggttccagcgtttctaggattcagttttcctagatgcaaagtggccattgaagaattcccttcccaacctacctcccagcagttttttgttgataaaatgactgaatgggtagtaaagcactttgcagaggaaggcggtgctaattgagcagggcgtgaccgacctcctccgggttttcaccccttgcccttgagagaatttaaccaggcgaactggatgttccctttaaagcaagtgtggactgttcttcattaaggctcacattccgtgtgtgtgtgtgtgtgtgtgtgtgtgtgtatccagaggattttacttttgattacgagagtggctgttacagatgtccatgtgttcagtgctgggggcagtgatttggctggaaaggcaactgggactggatttgaagctgatatttgcacaacaagggaaagtgctgaaaactagggacgtagcgaagccccacccctatcccaaaccgcctctgccctctagctaagtgcaaccttgatttgatggggctttctttccctgctttttgctttacaaagttcaccacgtgatttgggggtgcataagggcctgcaacttatcatctgcaaaatacattttccgtttgtttctcatgatcaaaagcagcagttcattcccccctcggattcctccacacgtaaagcgtttgcaccgtaagatatcttctagagaggaaagtttgctgaccttgtttacatttctgctgtctttaaaaaaaaaaagccatctctgtctcttcctgcacacggatttaagtgctgatttctggaatccttgaaaccactgattaatttttaataccaattgtctgtttatttttgactgtggatttagaggctttgcaatttgtcagggttcggaaaaggcagaattgttcttgggaggttccataaataggacagggcattgaaagaaagaaatcttttcctaagatttaagacttgggccgaggcaggagaggcaaaacatccttgaattagaggttgatgtattgcgcctgtataaagcaagtggaagggcggtgccaggctgagatgccctcggaagtttagtgatggttgttagtcacatatgagaccttctgggaaggttatgtgggaccacattctcttttctgaaatctgtgggggcaaatgtatttcaagatttagaattactgatatctttgaatgacaagatagaaggaaagatagaaaaatagaggcatgaagtcatatgcatgtgtggtatggcacccttagtctgcgtctggagttgcagcctgtaattgcacatcgtgctgactttgtgtgcaatgtatgaatctttacctaaagaaggataataagaccccaaatagcttgacttcagatcagtgttggccacggaatgaattaaatacaaccaaccagccaaaccttgggattgtcagtgctttaggggttttgggtttctggtaagggatttacgttctatagcagggatgagaaataggatcctcctaggatgtcatcagggtggagaagcccctctcaactcacccgcattcgtgctgccaccaacgaatgatgctcttgtcttgtcctgcatacacttacatgtgtacacttagcacagacacataggttttcttttcatccttgtcccttcttatccctcaagtcgaaattccttactgtgttttagcctcttagtagttattgcaacttcttggaaatcattctattaaaccatcagatctcaatgtgtcctattatagttcttcttctatacccaaatttctttactagtgcttgcgaacttcaggacccacagacaagtactgttttatccatacaattttttttttcaaaggctcccaacatttaaaaattgtgagagttggtcaggcacggtggctcacacctgtaattccagcactttgggaggcaaagacagtggatcacttgagggcagaagttcaagaccagcctggccaacatggtgaaaccccatctctactaaaaatacaaaaattagctgggcgtggtggcgggggcctctaatcccagctactcgggagactgaggcatgagaattgcttgaatctgggagttggaggttgcagtgagccaagatcatgccactgcactccagcctgggtgacagagtaagacttggtctcaaaataataataatataataataataataataataataataataataataataaaatgaaatgaagagaaatgggatcattcacataaaaaaattaggatttccacaatgtgtacatatatcaaatcatcatattgtactctgtaactgtatatacattttatctgtccattataaaaaagattttatttctagtttgctagaagttgcatatagaattttatcaaatgctcttttgcatctactgagatgatcaaataagttttctccttcattatgaaaagcaaattaggatttccaacttctctcaaaagtgtcgagagtctgccaatcttgggtgtaatttcttttatggctaccttgtgccaaagctgagcaggggtgtcctcctctggagaatgtgtttattcaggtcctctcttcctctgctcactcgcctgacccttcccttaagcagttgagttttgcttcaacctcttcttcgttcatctcactgttcacagttagcttaatcaccagggtggctacagtcatgcagagaagagctcagcactctcaattatattagtagttaacacctccatgagcagaggttaaaacaaagcctttggatgtattagatatttcatacatccatagtcataaaaagcaaggttaataaaaatgtgtctttggtatattaattgaagtgaaggaaagtattactgaattaatggaataaatggaacatctgatcgatagaacatttttacagccatctactttgtttaaaagccaggcttattaaagtgtaatttgcacacaataaaattcacctctttgagtgtatagttctaagtttcgacaaatgcacacagtcacgtaaacatcactaggattgcggtatagaacgtgcccattactctccaaaatttctatttgcctttgtagccccctccttcctctacctccagtcctggcaaccactgattagttatttgtctctagagttttacctttttcaaaatgtcataaaaacaggatcatgcagtatgcagcttttggatctgctttcttctacttagcaggatgcatttgatagtcacctatgtatcaatagtttgttccttttcaatgctgaatggcattccattgaatgaacgcaccacagtttatttcatactgaaaagaccttaaaattatgcaagttttgggtaattatgaaaaatgttgctataaatattcaccaacaatcttcatgcaaacatatattttcatttctcctgagtaactagctaggattgggattgctaggttgtatgcagactgtatatataacttcataaaatactgcaaactctttttaaacatagttttagcagtttgcatccccatcagccatgtctaatagttggtttgtatcttcagcagcatttgatattatccattttgttttgattttgtttagtcattctgataggtgtataataggcatttctttgaggttttaatttttgccctcatgactaataatgttgaataatatttcttgtgcttaattgctgtccttatattgtctttggtgaaatatctttttcaaatattgtacccattttttattgattattttcctgttacgatttttgagagtgctttatatattctgaatgcaagtcctttgtcagataagtgttttaagatagtttctctgagtatgtgtctttggaagagcagaggtgttacattttaatgatgtttagtttattaatattttcttttagttattggttttttggtgtcacatctaaggaagctgtgccttacccaaggccacaatgattccctaaatgtgtatagtgttgttcaggtcttctatattcctactgatctgtttgttctgtcacttattgagagaagagtattgaggtctccaactatgttatggttttgtctgttttttattttagctctgacagctttcgtttcatgtattttgaacactgtcttaggtacatacttaggatttttttgttgttgttcaatcaatccacctttatgtaatgcctttctttattcttagaaatatttcttgttctaaaatctattttatctgatattaatatagccacctcagctttcttttgattggtatttttatggtaatatctttttcatctttttacttttaacttatgtctctatatgtaatgttggttgtttataggcagcatatagttgggtttcacttgtttatccaatctgataatctctgtcttttaagtgtaatgtttagaccacttatatttaatgtaattattcatctatttgtattaagatctactattttgctcattgttttatttatgttccatctgctctttattcttctttccctaccagcttttatattgagtattttctatggttccattttatctccactattggcttattatttatacttctttttaaattttagtcattgctctatggcttacaaaatacaattttaattaatcattacttgcattcaaattatgttacggtgctttgtatgctatataagaaatttacaacagtatattccttacactgttttcctctactatgttttcaagtacatgcactcacgtaccctaggtgtgactgggagaattgtcatttaaaaattatctttatgtctattaaagaagaataaaaattgtattaatggtgttgcttttgtttctaaatgggtacttctgatgttcttaaaaccagtttctcttcaagatgttattctcctacctgtgcactgagctcccttgttttatatgcctttaggaacttagaagttgctgcattcaaggagaaagcaaatgtgaaatacaacccatctggagtctaaatcagcaaaatttccaagacaatggattccagttattctcccagagagactgatttcttgtcttccacaatgtgtacgcattttttcttcctgattaaggatgttcttaataatgtgttaggaatgttgagtttacacttgcatatggctggaatcctaaagtaacccaaagacttaatatagaagaccatgtcttttctatgtataacatttttttctttcttctctcaatacccttcatcttgccagcaacatggtgagttatcacttatggactaattaggaaggttcagtatcatagaaacaacagcttaagtttgagcttctgttccaccagttcctggatgaattggtcagaagtctttggttgttagcaacagaaacatcttaataccttaattgcttattactaagttataagagattggaagctcttgactccagagaaagctaaaggacgaggtttcctatgagcaggaagctgccaggtgctgggttcctgtagctataattgtctggcttctttagggtaccgcagttggaaaacaggaaccattttacttatttttgtctcagtgctcatgttttagattccagggtgaaagaagcctataccttggctaaacttttcacctggggaattttgaaaataccaatccccaggccttatcccaaaccaatggaatcaggctctttggtagggatggagtaggggtgggtgtggaggcagggctgatcagttttactgtttaaaagctcttcaggtgattctaactctcagggatgcacacagattgtgtaggcccatctctatctagaaaggtataagacagcctcattaatagttccatcattttgtatccaaggggaaaggattttcctcccagagaaaaactgaagagctgttactaaaagaaggtgtgatggatgctggatgaaaaatcaaccaatgttcattccactggccctaagacctagtgtatgtagtgaaaaaataaaggacagcttttctgagcctcagttttgttttataagtcagggttccccaaccctctggtcatggtttggtactggtccgtggcctattaggaactaggctgcagagcaggaggtgagtgatggataagcgagcaatgcttcctctgaatttatagctgctccccatccctcacattactgcctgagctctgcctcctgtaagatcagcggtagcattagattctcatagaagctagaatcctatcatgaactgtgcatgcgaggggcctaggttgcatgctccttatgagaatctaatgcctgatgatctgtcactgtccaccactagcccccaagatgggatggtctagttgcaggaagacaagcttagggctcccactgaatctacattatggtgagttatataatattttattatatagtacagtgtaataataatagagataaaatgcacaataaatgtaatgtgcttgaatgatgctgaaacaatccccccaccccctggtccgatgtaaaattgtcttccacaaaactggtcccttttgccaaaaaggttggggaccactgtgctaagaagggataatatctattttataggatggttgacaatatttaatgcaaaagtggactagagatacttagcacgctttatgaatttccaagggcagttgtaacaaacatggaagcttaatgtaacaaaaattggtcctctcacaattctggggccaaaagtccaaaatcatatgttgtcagggccatgcactgtgctgagcccccaggggaggatccttccttgccttttccagcttctcttggctcctggtgctcttggcttgtggcagcatcacagcaatctttgcctccgtcttcacatggcctcccattctaaatgatccttacctgtctgtcttataaggataccggtcattggatttataacccactgtaatccaggatgatctcatttcaagatccttaatgacatctgaaaagagatttttttcttaagcaaggacatattcacaggttctaagtggacattcgcttttgaggccatgcaaactattgcatgcggtaagacttggcatatagtaaagttcaataaatcagggccatcattatttgtattattaaagccatggagaagaagaatccacagtacaatacaatggaaaccttacatagatattttttaaaaataactgagaataatttaaaacacaaagcaaagaaaacagaactgtgcattcaacaatatcggggaataggaaaactggtcaagtgtgaggtgtttgtttattgtagacctaaacagagagccaaaggtttatattctgagacatcccttgaccacttcatgcttaactacagcttaggcataattccatctggcttagtgttaggatattcttgacacgatcttaagcttcccttctccttctgagttctcagagtcatgaaaaccatccagagcaggccccatttctctcttaggttaattttttctcccaactctgcagttgacttttttcatccttcttgctcaattggtccctctggccccataattatgtttacttttgctgtgtttcctcactgtctctgcggacccagatgctgtagaaatgtggatcaaatgctggccactttggcacgcggtattctactagcaagtctttgaggcaacaagggattcttatattcccaaaataaaggaacttgaagaaaactgcctcctgcctcaacacacacatgtgtgcatgcatgtgcgtgcatgcacacacacacacacacacacaattctaggctagtttctggtcttatcattgagttacagcttagtgatgattttaagacaaaacaaacaaacaaaaaagaaaaagctcttacttatgccctaaacaaggtattcctgaaaatgtgatttttgtctccactggaaacaatgaggttgggtttgacacactgaagcagttttccctgtttgatggaaatgttttttgaatatgcaccaaattattcagtttcttattcacgattcctctagttacaaatgccaaaactcccagcttaagcaaaccataccaaagtcaaaagaaggaaaaaaataatttgttcagtaactgcaaagtccagatagacttcaggcacagctggatccaggggtcaagtgatgtcattggacagtttctgtttctcccaatctcttggctgctctgtcctctttgctgtcttcattttggagaggccatcattatcaacagcacctccaggcttatattctgtccacacagcatactcaactaaaagaaagtgacttctcacacggttgtagaaaaagttgcaggggcagatttttggcactcactacagcctttcgcccacttactgcggacttaagggaatggggttttctgatgatgcagatcttgggcacaggaattctgggagcctgggggtgaggtcacttccacccacaccactaagatagaaggtgtgatgatgcccaaacacaggtggagctgtttcagaagatggggaatgactgcccagcaggcaaaaccctattcatcaaccaaatgagcaaaatgaagggaatcaaaagccactggatggccacttctcacgggtgtgctccacattgtgggggcagcccacatgggaggtcagctcgtttctcctgcctatgcacaaacaacaaagtccaggacatctcaaattaggaaggtggccttctttatctctcatcacatctctacctctgggtggcttttcctcttttctgcttgtcttgaccttcattcattcttctctcattgatatccagccatccaacatccctccaataagagatgggcactgcaatagtagcatcttctatcactgacctcctcttgcagataaggagaccttactttcaacctcaggtgctcacccccaggactgtgggatccctgggctgagttgctaaagcctgccagtttctcatgccgcagctgtatacggtgaccctaaaaggcttgcccctctggcatcctgatttaggagaacaaaaatctcaggggaagtctatgtttcggggcatttgttctgctccggctttgttccctctttcctgcctcctaaatggcaataggttcttatcttcaatttttgtaaaccttttgggtcacgacacagccccgggttaccattttctttattttccactgtttaattgtaagcaatgaattgactgagagagcagacttttctcatttgccttcaaactcagtgttttcatctgtcgtgttcatatcctattaactaaatgacgtttcctagctgggatctctcactgccttctcctggtcagttgtctccctggccatgtcctggcccttgaccccagcctgtctccctgcggcaccgatgccatggaggtgacagctggcagtggtttgactgtgtggttgcctgttagttctgggtgggaaggggtcccctctaccattcacagaggcaagaagcctacaaacatcagctttttactaaaccccggtggtcagggtgtccatgatgactaagtttttgtcttaacttgtgtgggccacggttcccagatatttgtgcagacttgattctatacgtgtatgtgtgtgtgtgtgtgtgtgtgtgtgtgtgtgtgtgtttgggtgagattaacaaattggtggattttgataaaacaggttactctgcataatgtgggtagcctcatccaatgagttgaaggcctgcagagatcaaaaggctgaccacccctagaagacaagaaggaattctgccagtcgacagcatttggacgtgaactgcaacattaggtcttccttgggtctccagcctgccagcccaccctacagattttggacttgccagactccataattgcatgagccaataccttaaaataagtttctctccttatatactcactctattggttctatttcccaggagaaccctgagtaatagagggtcctggaagatctagtcccaggcaaagggaattttgttttctctctcacatatctcacctgtctattctccaagcacactcattatctccattccttgaagataatggattcccagaactggccacataaaaggaatatacttcagagacagaattggtgctgtcattttttttattattattaaatcactgctaatcctctagagacagtgcttccttactttgttcattagcccgacgggaagatctaaatgtccaccatcctcagcaaacaccagctgcatgtttaagcccttcttgactagtggtcagatcatgtcctctgccccaaattctctagtgtctcccatcacattcagaggtaataccacagtctgtgcggtgatctacaaggcgctctgtaatctctgaccccgtagcatccttctgacctcattttcaaccccacactctgctccagtcccatgggcctgcttgctgggctcaccaccccagataggctcccaccgcagggcctttgcacatgcctactgtggggtaacttctagataccctcatgacgcactttcagcttctcagatctgtgtgccaagggcacctcctcatggaagtctccctatgcacattgtctgttgttctccattcctgccctttctgtgccctgtccctattttgtcctttctctttgcacttatcacctcctgataaactataactttgacttatttaactgtcttcccattccctagaattaaagctccatgagaacagaaatttcagcctattgtttcatggttgtatttatctattttgctgatggctctagtacctctggtactctggtgaggccccgaatgcttgataaatgaatgaacggacaagtgaataaatgacttcagtctgtcttcggcttctcatattatctgtccttcattctgagccagtctcttgaatcttgatagcccaagattcatgctgcctgctacatacatgaaaatggggaggtaagttttatatgccagaaatctctgaaggccaccattttattaaaggtctctagctgagaatggagcctgtcttcatctcttctctccgtcagtcgctccagggaagtgcccccgtcaatttgaggtgagagtgctcagaagaggagtgtgatacacaaattcacatgctggccaggggcaacattttcaagtcgccgactttatttctgagttgtcctaccctcccttgtatccatctgcctcttactttcaggtgagatataggaggggctccttccttgtagacaagagattctcaaaactgactacattaaaggactaaacttcaaacacagaccagaattctatcataaatagtgaaaagcatcctaatatccttatataaggaaaacatgcttaaattcagttaacttaatagcgtaatcactagaataatggggacggactactaatgagtataaggtatcttttgagtggatggaaagatattataatgaggcatcagatgtgacttgatctgggtattcaattataacattagaatttgtttaaaaagtgatttactcggcctgttatactgttggcttccttattaggttctaatttgtggctcttggaagttccaagtttacatgcttgaggggtcaaatatctctctctcaataatcccagcaaaagtcatactgtgtttcattggctctgtttgtttcatatgccagtttctgaaccattcaacccagtcaatagaaaacaatgtgctctaattatccaggccagggagctgtgggaggagttcatatgggctagaagtgggatgcagagaaaaatgtgggtgttgttacccacatttgagaccagaaaaagaacgatacatattcctacatctccagctttgagactgtgatcaacacaggtcacaggaacatagaagagtcatgcaagcaagtagtatctctttcctcctcagaagtctacttggattagtatctatgaacaggagacagcatgaagatgtgttttcctagttgagtttgtgtcatacttgcctgaaaccaaggataagcaaacatcatgtatcactcagctgtcaacccaggctgccttcaatatcagaggcaaaatgagatagatacaagaggtggcccgagtgccagttggaagagagaaagatgagatctaaaacaggtttgtttcaacaagttaggaccccttcctctccagacaggtcctgtttgggaggcaagatcaaggcttggtggttatactggcctgaatcaaatccctgctccactgtgtagacatgggaaagccaattgtagcatcaaacctcagcttctgggtctgtcactggggctagtaaaatgtgtctcatggagttatttaaaaggatcaaatgacctaatgtctatttgtctttatttttcatttgcacattttggatacaatctccgttgttctctgtcctgctctgaaccctaggaggctgaccctgcaaagggcaactcctggttcttgtatctgctggattccatggggggctgactagtggggacatggcaagagattggagggcaagagaaaggagaagctggaatatttgttccccactcgctccttgtttgggcccatctctggctgtgcctttgtctccccatgaatctaattcctgttgggtggcctctgttcaagattccagctcccactgaccttgaggaacactcccttctccacttcccccttcaggtgaagataatgtctatttcttatctctaggtacccagcctcattatttcatttcttccataaatagttccttcataaaagggactttgaacattggagttggattctctttcctcctgaggctgacacctatacaaataaaaactactcatacatagtggaaaatggctggagttttttgttgtttttatgtttaaacaagctcaaacatttagaatatttcaaaaataggtgcctagaacttttgtcccatgaaccatctcagagtaactggctgagttgatgcttatcatccctgaatgttttgttgtgtatttcttacaaacaagacattctcttacaaaagcacaagataacatcaaaatcagagaattaccactgctgcattattaccacacaatactgttgtattattccgttttcacattgctataaagaattcccctgagacggggtaatttataaaggaaagaggtttaattgactcacagttctgcatggcttgggaggcctcaggaaacttacaatcatggcagaaggcaaaggagaagcaagtacctttttcacatggtggcaggaaaaggaagaggcaaaaggaaaagtgtcccttataaaaccgtcagatcttgtgagaactcactcattatgatgagaaaagcatggagaaagccactacccccctcctcatgatccagtcacctcccactaggtccctccctggacgtgttgggattacagcagttccagatgagatttgggtggggacacagagccaaaccatatcaactattgtcccaataattcacagcagaaggatctagttcaggattgcacattgcagttagttgtcatgggtttttactttttttcagtcttcccttgaatttcatgactttgacactgcggaagcttaccaggctagttattttgtgacacgtctctccattcagatttgtctgatgtttcttcctgattagtgattcagatgctacattttgggcaggaatgctccagacaggatgctctgctgttgtctttgtactttatcgggttgcatgggatttaaatgtgtcacaatattaatgatgttctctttgatcacctgattaaggtggtgtctgctgggcttctctactgtgaggttactcttattccctttgaaattaagacatattttgtggaaagatgttcagagtctacgtgatgatcctgttcctcattagaatttcaacatttcattatgaatctataacaggatgggttcctggatttcttttgtactctatggcttacatttcattactataactgtttattttgatgctcacaatatcacaggtttggccagtgggagccattttatgacaacttctgtgttgttctgacatgtcctccttctttaagcactgccctactttctggatgtaagatcctcaaggctcatctgtaccttccctgccccagttttggaatcagttcagttgcttttagtggggaaatggtatttagacatcaagatcctggctctgcatgtgctcatgactaatggggtgctctagttccactcagtggacagaggcaggaaatcattgtgcacacattggcctttctctcttcctctctcattacctctctacctccatctactgttctgtatctaggcatctctctctctctctctccctctgtctgtctctctctactaacctatcctagctatctactgttctctgtctactgttctgtgtctatctacctatgcctccagccatctatctattatctaatctatttatctgccttaaaaaccatgagttcacactgatgcctcagattctaatccagcaccacaggagtcattctaggtttcttcctttctgtgtttgtagttcccttttcctaatcccaggccaggccatttcccctgccttccccatctcagtccactcaatctccagcccctgatgccgcctgtcctccttgccactcctctgaccccctgcctcagccactgagtctccactgtctgccttgctgggcctctcctgatggtgttgggctgaactgttcagaagcaggaggaagaggggcagcatccagtttgtatcttcagttacatgaactccattatattatctgtttagaagaatcctataaagttcaagtcaaaggaatgtgctgcaacttctctacctcaggatacccattttttggcaggtcggggtggtgaatgagcacgttgaccagagaggaccatgggcccatgtaccaccatgtactgaccagccattcctaggaaaataacgtgagccaatttgcataacaagtctactcttacatatctatatcctattggttctgtttctctggagaactctgactgatacagcatctaaacagtcattcgtgtttaggagtgtatagtgctctgggaggaccatcatttgtgtgacagatatacatatgtgtgtaaacttactcttatggtaacctcaggagataagcacatttgttagtcctacaactggggacactgagagcatttctaaaatgtaaagcaaatgattggcagagtcagggtttggacctactgggtctatctccatggtccttggcacatgtgctgtgaccaccacactgtgagtgccctcaagcctatgtgaagccaatccacatcaatctaagccagctttcctgtaagaaataatggcaagaggtttcctgtaagaaataatggtgaaaggttagcagagtgcctcttctatgcacagattagacttcccgtgtaactctagcccacataaataagacaatttctacctatagcagttaaacatatagtaacattaaaagtcagtggcttaagttaattggaattatgtaaaataagaaaatgatatagatgaatttgggataaattatcattttaataataataaccctttctaaggctatggtatctcatagaatagaagtaaagagtagaagacagccagcatggtgtctcatgcctgtaatcccagtacttcggaaggctgaggtggaaggattgcttgagcccaggagttcaagaccagcctaggcaatgtggtgagaacccagctctaccccaaaaaataaacacaaaaaattagctgggcgtggtggtgagtgcctttagtcccagctacttgggagactgaggtaggaggattgttgaccttcagaggtggaggttgaagtgagccaagattgcaccactgcactccagcatgggagacagaacaagaccctgtttagtgaggtaggagggataagttccagcactgcagggtgactatgatgaacaacaatttattgtatattttcaaatacctagaagaacagattttgaatgttttcaacaaaaatggtatttgaggtgattgatatgcaattactctgatttaatcattacacattttgtacatttatcagaatatcatattgtaccccatgcatatgtacaattattgtgttttaattacaaataggaatgaaaacaaaaaaaaagacattttagtaaataaataaaattatcttatcaccagcttttaaaagattaaagagcttaatgtcgttgccagggaagaacattagactcttaaacacaagtaacaggttaacaccagtgtaggcagcagaggaacttttacagacaggcaagccaaggaaagattgactaaaagaggagaggaaccagccggacccaggggttcactgggatttgaatagggcgtcaaggacatattcattctctctctctctctctctccctctccctcccctcgcccccatctctctctccccatctctatccctctgtccctttctctctttctctctctctctctccccatctctatccctctctccctttctctctttctctctctctctctctctccccatctctatccctctctccctttctctctttctctctctccccatctctatccctctctccctttctctctttctctctctccccatctctatccctctctccctttctctctttctctctctccccatctctatccctctctccctttctctctttctctctctccccatctctatctctctctccctttctctctttctctctctccccatctctatccctctctccctttctctctttctctccccacctctatccctctctcccttcctctctctctctctctctctccccatctctatccctctctccctttctctctctctctctgcctccttcacacacacgcatgctttcatggaggcttcattctctcatttggattttctacattatgggaaatgtggcctctgagagctcctggacttcagttctcaggaaggtctttgcttcccttagcttatacgtgaacatttcaggaaacgactctgccttgcttggtggaatgtgcccactcctggatgcaggcttacaaactcaaatgcctccagggcccctgcttagacaggagtgaagcacattgattgggctatgatgaacgggaatatgatgctcagtttgtgaggccagggccactcccacatggtgacagcaggtgagagtagctctggcccccatagacagtagtgggtgtgggcagaataattcctaagccttattgatttacataaaccgggaaataaggatatttaaatatgaaatggcagctttcaagtgtggacagcaaaataaaaaattgttaaatgctgtgtgggacaaatagtctaggttatgacctcaggaccatttttcatttctgcctttgaccactgaactttgatggaaaggatgagatactagaagtggctcagtttgggcacacagtcacctgaggccaaagcagcaagatccacacagacattgaagttcccatccagtccatgcagctggagttttgagatcccttcccagaagaagggacgtgttggtaccagaagaagggagagagggagtgccgggcacgtgagattattgtccattgaacaggatcctggaaaacttgagagagaggggtagaaagagtaaagatgttggtcaagagaataagagaaagaagacgaagaaaaactatgttatctctgccaaatgatgctgcttttccaagaagggcagcggttttgccagcactacttgtgatcatgtctgtgagaaatcttgttccttctcctttaagttttgcagtcagagtttctcagcctcagcactgttgacatgttgggcaagattattgtttattgctggggtgggggagtgtcctgtgcagggctagatgccagcagcattttccctgcccacacagttatgacaaccaaaaatgtctccagccattgccaaatgtcccttgggtgcattgagaacctctggtttaaatcctgcccactctgtataaagtacttcctgcatcaaaatattgtcttaaactttttactaggaaataattttaggctttcagaaaagttgcaaaaatagtacaaagagtcttacatacttttcacctagattcctccaaattaacatttaccaggtttgtttatcagtatttttcttaatagctttgtctgaatgtttctctctctctccccctctgtctgcatatctatatctatatctatatctatatctatatctatatctatctgtgtgtgtgtctctaggtgcaatttttctgaattaattattagtaagttacacacattatacctctatcatgtgtattccttaaaataaggcaattctctgatataatcacattggtcaaagtaaaatggcattgctatggtactattatgtatctgcctcctttattcgaatgtttccagttattccattactgttatttaaagccaaagaaaactgattttttctgttggtccagcatctcatgctgtgcttccttgtaatgtctctttgtgtttttttatcagaaacaatttctcagcctttttttgtcttcataactctgacgtgtttgaagagtacaggccaggttttttagaagaatgtccctcaatttgatccgtgttgatttggaggtaatagctgcattcatttcgaattgatctagcccttccggacattgagttctgaattgggatgattgtgtgtttggtgcagtcttaatatcactgttgtccacagttatccctgcaggatcctctcttacttttttttttttttttttctgagatggagttttgctcttgttgcccaggctggagggcaatggcgtgctctcggctcaccgcgacctctgcctcccgggttcaaatgattctcctgccccagcctcctgagtagctgggattacaggcatgtgccaccacgcccagctaattttgtatttttagtggagatggggtttctccatgttggtcaggctggtctcaaactccctacctcaggtaatccgcctgcctcggcctcccaaagtgctaggattacaggcgtgagacaccacgcccagccctctcttacttttaatgtccccattattgtggctgaagggctcagaagccctctgcctctgagtaggacaccctcctctccttccctcccctgcagctgggtctgggctgtcctgttctggcgtgagtggtttcttctggccctgcctctttatctagtagagttctgccactgagttttccctgggacagccacatgggcacagctgtctcccaggcagcactaggggaggagatcaggctcccagctcccccagcatgacacagagctggtgggaatttcaacaggactttctgaacggtgagggacaacaggggccccatgtcactgtggaggctggcactcttatatattcatgggtcaaacccactgtagtctctgaagtctggcacatgctgttgtacctgagtgtcacagtcacaggctaaataagcccttttcttttacaaccttcccttcagtgagggctgagggaaattcacatcttcttgctttcccctccttcccttgatttccccaggacagccagctcttcttggcttttactgccccggagaagatgcttagacatacaggcctgcatgtgtgcaccgccccccacacagtcacacattcacacacgcatgcatgtgctcacacgctcatgctcattagcgcacacatgcacactcacattcacacatgcacctcccacacattcacacactcatgaacacacatgcacgttcattcacatgtgtgcccacacgtgcacaaatacatatgctcgctaacacacactgtaatgcatacatgcacgctcatacgcatgcactcacacacatacacctgcatactctcacttgttcattaatgcgcatatgcacctatacacaccctctcacatgttaacatacatgcacacttatacacacgcacacatgctcatgtgcgcacacacacacagacacacatacgtgaatgcagccttgtgactagccgttagtttttaagaacaagggaatctaaatccagatttaggaatttaaaaatgtccctaactccgtggggcacagtcctgttagtacatctatttgcgtgactaaccaaaacagtgaatatcttcattagagttaatggtaactttacagttttctccaagaacacggcgtacctggtttataggggtgcagctgaaaacacatgcaagcacacacactcacaacacattttggagaatattctgaaagaaagtaggcccaagaggtgtatttaacgtccccatcttcaaagacagaaaattgctggtaacttttaaatcagcattttctaatttgcagtctgccctatatgattctcaataatttttggcctatattggtatcatctgcacttccatttacttaacaacagcttttctctatttcaagtcttttaatctgagctttgccctaagcaatcatttccatgaaagtcactgttttacatactaattgcattttccccaaaacatcaagctaaatacataactgatagcatgtttaaaggtcctatgtttcacctcaaattatctcatatttcacatgaggcaaaccctgtcctgaggccctgatgaagatgggcaggcagatctgatatcagctgcttttctttccttgatggaacctctggattgcgtgccctatcctataatgtgaaaaaagggcttccagaaaaggtggaggaattactttctgaaattctgaaaggctggatccaaaggtgcagaaaggaacattatttcctaccatataaaacccagtagggcgtgtgatgctgggacactgtatgagtccattctcatactgccataaagaagtacctgagactgggtattttataaaggaaagaggtttggttgactcacagttctgcaggcttaatagaaagcataactgggaggcctcaggaaacttacagtcatgggaaatgggaagcaagggacgtcctacatggcagcaggagagagagagagtgaagggggaagtgccacacttttaaactatcagatctcatgagaactcactatcatgagaacagcatggggaaagccgcccccatgatccattcacccccgaccaggtccctcccttgacatgtggagatttcaattcaagatgagatttgggtggggacacagagctaaaccatatcggacactgaagatgtgtgacgcactgttccaccgggagttatagccccattgaattgtcaaatagggtcccccctggccaggtgctgaattattccagaccaggacattgctgggcttgggcccatcaaccaacatacaagtcagcatttcccaactttaaacatatatgccctttccaaataaacataaaaatccagagatttttctccactccttctctcagaggagagaacatgatcccttaaagatcctgttctttattctccaagccaaaagaacaacaaatagattcactttgccttctgtggctcatttaacaaaaaaaaaaaaaagaaataagtgatttcccaatttcataatagaaatgactgaatatgcattttaatgctaaacccatttcagaattctgatgtatacatatcccacccctcccagttgagaattgctggtccaaatggaagtttacatcttttccacaatgaaagccactgaactggagcgtgctgtaggtgagtgcaccatcctcctggtgaggtgaggtcctgcagctcttaggcctctaaagagctggatgacccgagcagcacaggaatccccaaattctcgagggacattcttatggtctgagccagctgcaaggcgatcccagaattcccctgcaagtacatccaagaagaaataaatatctatagaggtgttgcaaacctcccaggagtcatgacacaaatgaagtcctttgaagtccagttcccctctggtgtaggtaccgttttcaccctatagtgcagagtttctgtccccacacgctagatgccagcagcatccagcctcgctgatgacaaccaaaacatctccatacagtgccaggtgcccttttcccctggatgggctgatactgaggggctgagctgcctgcagcccgcaccaactgtgtgaatgcagccgacctgctgcgggaggagatgatgctgggattcccagaacagcagaaataggtgaaagggggaggagagtctgggagggattggggtccctggtttagcttcctgttttcccaaggctcagttgtcctgctgttcccgtaactcagggatatgccctggagcaatcccactcaatacctgtgctggttgagtcctgtgctggttgagtgcctgcctttccttcctcagatccatcctgtttcccctgctcacttctggattatagggaactgcacctcccaggttcccttgttttctggcttctggacacattctagtcctgtctgaggcagtggcagaagacaggagggagattgaagtggggaaagccacagtgcttttctccttttcttgcttttcttcctggactgcctgcagtgatggccagggcgtctcaggaaccccggctgaccggaggcagcttctgcgcactgtgtcctggtttgcaccctgccccacgggtggccttggcccctggaaaccccctgggacccattgttcctcctcccctagggctgcggggtgccctcctgtcgctggtatctaggtgtctcaccatccgtctctgcttcataactcttgcctcactacgtaatcaattcctatgtttaagcccttctgttccagtaactacagcattttgttttgttttgtttttctggctgaattctgacaaaatatcacttttttcttatgcacattcaagtttgctttctgtttcttgcagtcaaaagaatcgtggtcaaacagaatgaaaggcaaaacttagaggaaagccttggaaacaaagccggcctccctgagattcctgctgtgtacaagggagacaggcccacacttccccacctgaacctgtttttgacaatccctgcccaacttcctcacccagcagttgtaagaaatgggtttgtcaatggttttttctaacttgttccagtagaatgtaagctcctcgtgggcatagattttgtctctgttgccagtactgaaaccctggtacctagatgagtgctgggcacacagcaggtactttgtaaatatctattaagtgtacttagtacctaggtaccctagtacctagatgaggtattcataagtgtctgttaagtgtacttagtacctaggtacctaagttcctagatgaggtattcataagtgtctgttaagtgtacttagtacctaggtacctaaattcctagatgaggtacttcataagtgtacttagtacctaggtaccctagtacctagatgaggcacttcataagtgtctgttaagtgtacaataagaactgtggatcatgacacagtggaattaacttgatagactgttgctgtcagcagttttctttcataaacagaatagcatagaaattctattcctaatagagcacatttcacatggtaggtctgtgttttctgtgtgttggtgtaggtatgtgtatgtgtgtgtgtgtatatgcaagcacgagcaccaacttgtgttgtaaaatgtgattcttacagtagaccttgattttcaaaaaatttgaaagccggacagcaagataatagttcagctttttgtgaacggtaaggagtgtgcaaatctgaacctgtagtgtctcctggattgctgtcagtgaggacagaggatcctctttaaaaactgggtccaaactccctctggtctcattttgcacctctccacagtataaactctcctttccaaccattccaaataacttaattccctaatctcagggggccgtttcattgcagaaattgctgcttgttcacaaacttagtaaggtacttaaaaaagattttgtcatggttaataaaagtcacagggtaaattggtcttatttcttctttttagtgcaaaatgtaatcccttcaccctgattgttttgcttagttgtacacaccacccatcgggaggccagaaaacttgtatttatttctagagctacctccttacagaatttcaaagaacctcggggcacttgagaattggtgtccagacaggatgaatcatttcttcttcaatcaggattttttattttattttattttgctgggggataaagataaagatgattgaacttgttttatttaggggaaaaacagcctctctttgaactcttgatctccacttctcaggagtggagcccatttgtaaactctcaggtctctcattgccttctttgtctcccaacctcctaaggtcgagagtgattctttatggcaaagagtgagcattctggagactgcacagcctcctctgaacaaactggagcatatatttcccgcatcgtctctgtcacctccctgggttttattttaattgccatgcttttcaaaagcacaattcctattaaattattcatggtggtataatgtttatgtgatcagagtaattattataattacgcattgtgaattttcataattaatgacctcactcggatttcatttggtgcagaatatttccgaaggggaatcaggtggttgtgtctgctgggggaatcagaatggaataaaatggtgacctatcttgggttttgcagagcagtagaaacttcagtcattcactttggggactggggatgaggaggcatcttgagaaatggaaggaatgggatctacttccagttcactagaggcgtcctgacacccctagctcagcatcttcctctgtgaaccgcccatgggaaggtgtccaaaggtgtcctagtagaacaagcctagcagaccaacaggagcaaggagaccagacacgcgtctcacttttggggcttttgaatgagactggggcttaccaaatctgcagaaaccagccaacaatgctcaacagcagcaaaaccacacttcagtgactcacacagcaaggtggccctaacaggactcaggcttcagctgacttcctctccctctctaattctggaaagagtagaaaatgcaagccattggagaaatggctggtggcactctgagcatgggaagaaatttgatattttatgattggcacctgtcttagtctgttctagttgctctaacaaaataccagagactgggaagcatctaaacaacaggaatttgtttcttgcagttccagagcccagagatccaagatcaggacaccagcagattcactatctggtgagagccggcttcctggttcatagacagggcttctccctatgtcctctcacagtggaggggagaggaatctccctagacccttttataagggccctaatcccattcatgaggctccacccccgtgacctcatcacctcccaaaggtaccacctcctaagacctccattctgaagaggaggatttcaacacatgaattttcaaggaacaaagacgtttagaacacagccattttgtagtcagatttcaaatattttaatgcctccattttcctcatctttgacttgtatctgaggaaccaatgcttggtgtgagccctaaataaataaataatagatagatagataggtagatagataagaagttcaagcttctttgtcccccagcaaaaaaaaaaaattaaaaaattgagaaagaaatgatttatcctgtttcatcctgttttgtatacaaatagatgccagtactcaagtgccccaaggttctttgaaattctgtatggagctagctctagaaataaatttatattatgtttgagacagggtcttgctctgttgcccaggctggagtgcagtggcacaatcacaactcaccgcagcctcgaactcctggcctcaagcagtcctcctgcctcagtctcccaaagttatgggattacaagtgtgagtcaacacacccagtcccaaaataaatatttggtatagctatagctattcactaagacctttcatcagcatcattccctctcagcctcagacctacttgaggggaaggcagttccatccccattttacagatgagaaaactgagacgtgtagggtcacatggaaaataaataatgaccgccttgaaactgtgatgtccagggcgtcctgtctgtaacagcctgctaccttccaccccctcccctgggtatgctttcattccttacccgacttcttagacttgccctccaatgttactgatgtgccttttaagtccttcaaaaaaaaaaaaaaaaagaaagaaaaaagggtggggtacaacctgaagaaagaagaaaaataagagccccacataaaattctgctcagtgatcagagaccagtccagtcatagatttcagttttaagcaccaattaaaaaaaaaaaaccttaaaaatttctcctatttccttcttgatccttgtagaatattgtacttttcagaccatatttagttgtacattcctctgtctttctctctgctctgtcatttcttgaagacatgggcctttccttattaccttccatatcttcaggttgtaatgggatattcaacacataataagcagtgaaatgcatcttgcaagaatgagtgaacattggttttctctgtacctccccttgcctccctttcttcctagtgtccaagtccctttgtctctctttgtcccctatatttactgaagtagcacccttgttttgagagtatttgttgatttgagatgcaaagcttttggcctgatgcctgaacccaggagacaggactcagggcctatccagcattgagacctgagtttcccaatcattggaggttcacgttttataattaggatgctttgggctgcaagtaataacaacacgaatacagtctgccttaaatggtaaggaaacatattatcttaaaaagcaactccagaagtagggtggtttccaggttaattgatgcagtggcttattgctccccttaatgatcaaagtctttctgtctctctaatgacatcctggcttcaccccaagactggttgttctcatggtcacaggagagatgacactggtatttagggtacacagtttatatgtttatggctagaaggagtggccagctttacagaggcttctctcaaaaacaaaggagggccagcccagccattaatttcctctctgtctttcctctctgtctttctggtcatatttagagcacagagccattctgtagccagtcactagaaagggagctggattcgccttaaagggatagatagaacaacacttggacctgagaatggaagttgtcctccgtcaggttcatgactgtgagtgtcatgaggaagaagatggggcaataaagtcaagagtaggcaagaaattcatgttttcctttaaattgatgcatttctttaatttagcaaaactatttttaaaacatcagggtttgatatactataagtgttttcttctaaccagcattaaaataaatatatgataatataaataaaagatatttatctctgtaccattttgggaattgctagatttagactagacttcccaaactgcatatttcaccaaaacacaccccgtgatctttggacaaaataaatcccaggtttttatggatgtaggaaatacagctgtaattccgtcaaatggtcttttttttttcttaattgcaaagtgcatatgtaagttttcccctttttaaactttcatgattcaatagaaagcagcaagggtctgtttttaggggctggactggccatcttttcagttggtgctggcttgaaatgaagagcaacaaatagaataaataactgcagtgaaggggataatatggtattgactgcttggctctggttaattttctgtgctgtgaacaccatgcagaagttgggctggacgtgatggcctcctgccgataggaggccagtggctgtgaatattgtacgtttgtaaactcagaaggggtttagtgtgcagccagattcatttaaagtcataaatggattattggattactccttggtcatgcgtctaagtaatttacgggtgctatcatggctccgggtctctaataagcttcgccctccttgggatagtgactgtcttgccttaactgatgttgaatctttcccacttagtctctcctgcttagggttaacatttaaccaaggcctgcaaaagctggctttgaaggcactcgacttgaactgagaaggtctgactttaattctgacccttcacccccaaatcttttcagagagtgtagcagtgtctcctggtgggcacagttcttttcctttttccaggatttggtatctcttctgaactttttccttctgacacccacatgattttaagcaaaaactctataatttttcaaaaaaaagttaaaacccaatcatttacctccttagagaccccaagcactgaaaataaattatggggccctgctcaacctgtctacaattcacaattaaaatagtacttagccataaagcaaatggaagaaaacccaacaaaatatttgttttctcatgatgatgacttcaatatcaaatgatttacaaaaatattccctccttcatgttagtttccctgttttgcttttgtttggtgtgacagcctgtggggtaatctcaccccgcctttagctatgaatgtagctttaaaggttacaaagcattttcctctttttatcccattttatctcctctccttctgcccagtacaggttcaggatgttgccagagagcacctgtgagaatgcacatctaatcatgttattcccttgcttaagaccccagtgcggctcccattgttccagaaactaacccatgaccctctgtggtggagctccccaggctctccagcctcaggttctcccgccctctcctcccccgggccatgtgcattgtgttttgttgaatgtgttccttccgaaagggcaactggtacagcgcaaaatgttcttcctacagggcaattgttatgttgatttttttgtctgtttatttgttttaacttttttttttaaatagagactcacaggaagttgcataaaatagtacagagagccccaagtccccttcacccagctctccctggtgattgcatctcacgtaactacggtacgtacgactcacagccaggaaaccagcatcggcaggtgcctgcataattctttgccattgcatcctgtgggtaactgcctgcagccactgctctgaagacactaaactgtgccatcagagcctccctcctgctacctctgtatcctcacaggaagacatttctttgggggaagaaaacgaactttgcagatgaggctggagttgtctttgatccacatctactcatgctgaggacctcagctgccttctttgggggaatgtttttccccagtggggagtggaccaaggtcgctggtagagcaccttgtacctgtcctgcacagcatttccctggattgcagatatgtgctcatacatgttgtccccatttaacttgaagttccatgaaaacaggggtgttttttctcttttatttggttgtatgtactatcatttccccagtgtggtattggatttttcatacagtgttggtatttaacgctgagagcaacagcacatgtgtgtgggatgaatgtgataacttcctcacggtggcttacggtaggattagtatgaaaatccatgtatcctgaccctgagccctgtgttcaacctttaccttttaaccatcactctggagcttggaaggtgataaattttctgaaaactcaaaattgtactagagatattggtcatgagactcactgtcccaggggctctgtgctgccttggagccctaattgttaggcagccatgtttcataccatgcaatttccatcttctacactgaatccatgtttgagtcaaccacaagaaacacctgatccctgggtggttaatgtatacctggatgcctggttttgaaaagatgagctggtctcattagatgagctggtccatgagattttgagttaagcaatgtacacggaattcaccagctattgatggcatggctactgagatgctcttagaaagacagagctgatggtgccagttcagaggacccagatgagaaccagagacaagcgagacagtaacacacagagtaaaacagagatgtgagagaatagatgttgtcttcctctcaagcaatgggagaaaatcaaatttgaaatttgaaaacaattccagattgtttttcgtatagagagaactttggtagaaggttggagagaatcaggcaagggtgtatagcttggtcaccttaaggtaaaggtttgtgaaaatcctgctgccgagggtctctaaagctgcatgcagcccaggttcttcctttcctccaggtcttcactctatgaaatgtggtccctacctctcacccctacacgtgattgcaggtgggttcacataactctaagatgttagcactgagctgggtaggcacatcccacatcccacaccaggaagagaccaggagttaggtgccagtggaaccggggcaggatgcccacatttaaataattccgtcagtgtagtctagacacagtcggccagtgttcaatactagactagacacaataagaaatacaaaactcaagacaggtaagagcaagagtaaacatgtttgggcaaatccatgatcaaagcaggtggtgctttaaggagatagccataagcgtaagccaaagtctgcggggtggctccagtgactttttgttccctgggattgggcttcttttgaagtcctctaagcagttttttactggctttaaaagagaaaccgctgtgatgaaagactgggagaagtcctctgttcttcctcctggggttattgctggcaacaggaaggtggaagagcttacagagtgttggctcaggttccagcctcatgaacttatctccttgagcctgggaccttcctgaaaagcagagttcatggtttttctcatttgaaggaggcattatgatgggagagagaaaggggtctcttccgtgtgtccttgtgcttcctgcattttttcttctgtgaagaaagtttttcacagcatagttgtggtgggcactcttgagtgtgtttgcctgagttacagtgatgccttttcactgaggactctaagcctatgagaggacaccaagcagccgtattttccataagtgattctggtctccagtcagttctaagaaccaggggtggacactcattccaagctggaccaagaagatgtgcttccctagaaatatggaatcttggctgataccaggctctatttatggtggagctaagcgcctattaaaaactcaggctccagctgtgcatcgtggctcaatcctgtaatcccagcactttgggagacgtaagcgggaggattgtttgaggctaggagcctcaacaccagcctgggcaacatagggggaccccacctctacaaaaaaaaattcagaaatttgtcagacatggtcatgtatgcctgtagtcccagctacttgggaggctgaggtgggaggatatcttgagctcaggagtttgaggctacagtgagctaggaattcatccctgcatgccagcccaggtgacagagcaagcccctgtctcaaacaaacaaaacaaatgaacagaaaactcagggaccatggtccaactaccttttaccatgcacactgatgagaaacaaacaatgaatggaggagaggtgtgctgtgggaagcagaagtaggagagcttggagatggaaggcgaggaaagcatgaaaaaggaaaggaagtgtagggaggaaaaatcaaatagacacagaaatgcagagaaaaacagaaatacctgagcaagttattgttgcctcatcccagttagctctccagacctcagttctagttcccgcctcattgctgtgttcaggcctccccagtagttgccccttaaaataagtttttctattttaaaaacattgttcttttacttgtatctcaaagaattaaatatatcgaaatttattagtagtagtattagtattagcgttgcctgcctgcctaatagtttcccatcttctttttggctctaacatctacaaatgactgccatgcttctgccctgggaaccatgtgcctcccagagccagaatatttgccttgatttttgaagaatcaggtagaaatgatgggatggtagtatttataatgccatcaaagaaaggaaagaaatttgcaaggattggaggaaagagttccgtttcatttgcattgggacttggcaaacagatgcagaatgggcttccagtattactggtgtcctgtgaaggtagctgactaaggtattgtattagtccattttcacgctgctgataaagacatagctgagactgggtaatttataaagaaaaagaggtttaatggactcgcagttccatgtggctggggaggcctcacaatcatggcggaaggcaaaaggcacatcttacatggtggcagatgagagaaatgagagccaagtgaaagaggaaaccacttataaaaccatcagatctcatgagacttacttactaccacgagaactgtatgggggaagctgcctctgtgattcagttatctcccactgtctccctcccagaacatgggggaattatgggagctacaattcaagatgagatttgggtggggacacagccaaaccacatcagttataaatggctaaagtctgtcgagtgtgtcagatggtcactcacctttgtgcctgacattggtgaagtgctgggatcagggtagagagtgagagaaaactttctttactttgtattgtatcattggcaccaaataatttttgggtcttggaaggagctgaccactgtcatcacagtgctggctgatcttattattatctgtctcacaaatcaaatatgggtaaatatattctataggcagcagtagcaaaacatgcaaaatcagattacttgaccaattttcagccctgattcctactcctcatgttgattcctctgattagcttttcattcctctctgaaatgccactaaatggactcagatgccaaaatataatttgcatagggcactagctttgtccagaagacacagttgttattcaaatcaagccaagttaaaagagatcatgtagctctttcgtgtcacaaatttggtagcaagtttttattgtttatagattactatgagctactaagggaaaacagggctttaagagaatgtggcaagtattaagagacacagatacttctttggagcagcttgtaagggagggttaataaaacatatctacatgacacaatagcaaaacttcaaagccttcatcttaatacatatgaaatgatttatataaattgaagatccacgggctgaatgatggttcagagttgaatggattaaccctggtgaactgtttcaagagggtctttttaaaccatcatttgcagatattttgatcttcttcttgtatcagttttcagatacctcaaataaggttcacagccaacaacttgggaagcatctttgcaccctagggcaatgtgtgcccccacctgacctccagatggtattctccaacctgagcaagaatcaataaatcagtgatggggaaaatcaaagaggacgacacagctttgccttccaagaccttaggatatgtgttcatttattacttgggtgccagagcattaatgatgccatgtgggttcaggtttctccttatgggtgttaaaacaaaaggaattattctatctacttgtgttgaagcaaatggaaatttattattctttaaaagaaaggatactatgacagcaggaatacaaaatttatcagtaaaaatgagtccaaattttagtgtcttcagcactgtctcaggttgtgccttgcatttcccttcttccctttgatcttttatggggcaagttcagaagcagatattctgatagtaaagcaatgtagggatccatcgtgactgagcctgattccaaagttttctttattcgtgatgagggaacaatgattttaatttactgtttctgcagaacttcagacctgtctcttaaaataactcctgaccacttattcactggtcaactcaagcaaataatatttgtgtttgtccaattaacaaagagcaaaaaggggtggtaaaatacatcctgagccttaggcatcaggagaagtttgcacgtggaactgctgttctcaacgttgcttgctacggtagattgcagaaatggtggctgttttcctcgctgctgctaggcttgacatttttcagctcttaccatcaaaaggtagagtcttatttttctacctcttgcatgcagcaggccttctgattgtgttggccagtaggatgagttagaagtggcattgtggaagtcatttctgagctcagacctcaggaggtttctgcacacttctgtctttctcttggaaccttccacgttaccatgtgaacaagcatgggtgaaagtatgaaatatgagaaattaccagggaggtcttcccagtgaaggccattcttgaccaacgagacccaactaacctggtagttgggacagatgtgtgatcccagcagaacccagaattatgagctaaatcgatggctattgttttaacccaaccaagtttggggatgatttgttacgtaacagctgactgatacccttcatgttacacaagttcgtgagtaacaaaaaagtagattgtcactaagtatttttgaagagataaacacatccttttaatttatcttttattgagacatcttatttttttctttacctgagaatcgagcttccctacacattcaaaaatggcatttgtgtgtgcatcagatagaaaatgtgtgtgtgcgtgtaagtgcatgctcagctttagaaacagcctttcaggctgggcgtggtggctcatgcctgtaatcccagcattttgggtgggtagatcatttgaggtcaggaattcaagaccagcctggccaacgtggtgaaaccccgtctccactaaaaatacaaaaaattagctgggcatggtggcgggcacctgtaattccagctactcaggaggctgaggcaggagaatcgctcgaacccaggaggtggaggtttcaatgagccaagattgcaccactgcactccagcctgggtgacagagcaagcctccgtctcaaaaaaaagaaagaaagaaagaaagaaagaaaaaaaagaaagagcctttcagaatcactggctgtaatctatttggggagacggcatccacatatgtgaaaaaatctgggaagatgtaagtgccaagttcagtagccctgcctcagtggtcatttagaactgtgtccactcaaagagcccatagctttgtaggttcagaggtggataaaggtgcatctggccacttcagttaggaaaggcttttttgatgggacaagttgggtggaaagaaagattggtttggatgccatggggagttggaagggtagattctgacctggcaatgacatgaaccaatatacagaggctggagttgccattggctgtggctgagaggaggggcgaggaaagggttgattgccaatagattcctgttggggagagatagaaaatggggctactctcatcccttctttccatccacctttctttaaaagcgttgcgtattaggctgggcgtggtggctcacacctgtaatcccagtgctttgggaggcagaagtgggaggatcacttgaggccaggagttcggcctcggcaacacagtaggactccatctctacaataataataattattattataataactgtcataataataaaaaattaggcatggtggctagaccccgactttaaacagaaaggattgcatgtgatacctcagtctgaagagggagagttttatttgtaaggagaaagagccttaacattttaattatcttgatactactcccatcttggcagttactctgtttcccccaaattgctcaagagctggaaggcctgaatcctgaccttagtaccaagcctgagaactcaatccattctctaaacgttaagtttccgccgaactttagatgattctgcggctttgtgttgtggttttgtggcttttttttttttttccatttgaaattaaattatctggaatgacaaaaccacagctgttaaacagtgggcattagatgacatttaaacatcattatcttatgctctaatggaagaattggctcgtgattaaaaatgagacctcccggcagcagcaatctgaagaactgccatttgcaaatcgcctattttaagaagaaccctgaatctattggtattttcagagaaaatggaacactagctttatctgcgtctggatgtttgaagatggtgctgattgctggcagacctttccagcatgatcctaatggtttggtgcctgcctgtatagacgatgcctagaactgacggtagcctggtgatatttacaattacaaatggattcttattttagagattatctcaaggagtcagtaatccattttcagggcttgagacttaatttaggcttttaaaatctctgattgtgtgcagttaatgaagtcagtctgagtctatattcatcccgatagtgctgagtttgacaccaatgacactagattttattttccaaataggtatgcagatttttcttcccaagaaagacttccattctagtgacttcaggttgaaacatttagatgtgaacatttcagcatggaaaacacctctttaccctgtgaagaaattcttttttttttttttttgagactgagccttgctccgttgcccaggcttgagtacagtggcgatctcagctcactgcaagctctgccccccgggttctgccatactcctgcctcagcctcccgagtagctgggactacaggtgcccgccaccacgcctggctaattttttgtattttttagtagagatggggtttcatcgtgttagccaggatggtctcgatctcctgacctcgtgatctgcccacctcggcctcccaaagtgctgggattacaggcgtgagccaccgcacctggccaccctgtgaagaaattctaacttgtaatttgggggtttctgctttctcttttgtaatgttatttttagaaagctaaaggctaatgaatgattgaggtgtaatgtttatgggacagcaggatttctgtggcaggtatctatttagttatttttagtgtcctgttttttgaagacttcaagaagaacatataaaaggaagagacctttgtccacttccactgtagctcaatttcccatctatcaattggattactgctagggttttggagaaaatgaaaaatgaaagaatcagtgatgattccccaaagtaaattattgctgaaatgtgagataggtttttgtcctctcgttggcatgttgggaaaagcctgggcatatgttagcatggttagccactgagtgaacccatgttctttagctgtaagcaaagagtgagccctactaaagaggatatggactggtcctttaggttaagagggtggttgaaacccctcaactattattgaaggaatcaaagagaggagctacatgaagccttccaccattgctggaaggaataacctccttctttctggcatccttaaggttctgagtctttggcaagagttcagtttcccagggttggttcacacacccacccttggttatatggcaccataagaggcaaggagcttctagaaaccttatcgcctggtttcatagacttaccctccctcttagactggacataattgggggagaagtaatagcttcttctgtccccaaagtggggtgttatcatgaagggagaaaggatgttgagttatcaaaatatacaaatatctcaactggaagtcaaaatgtgtcttagaaattcagcaatgtctaagtaaagacactcagaattgtctgcacataaaactgtaagctccagctctccagatttgaaaaaaaaaaaaataggaaaaaacagcaaagctattaaggacccgtattttaatatgcattattacatttcacaattgttttgcaggataaatttctatcaggtgacatgaaaatgaggccagatattttcataatctcttgtgacccaaatgtattatgaattccttcatccagttttaatataactctaaattattcctcgatgtctattaataattaaggaaagcaaaaactgtattatctctttaatagcattttgactttttactttctttttgtaatagatgttcccagtgcatttcttgttatgtcaggattcttaagaacttcaagtcatcgtattgcatgactcttatgccctcagtttatgagtcctgctatcaaatggcaatgggtcccccactcccaccagtctcttcaccccaagaagtcattgccctccttgcaatgggccaacaccctgctttactttaggggagctgcccctccctgactgtcagtcccttagggtgggattccttccctaggcctgtccaatgagcgtggtacattccatgggaatgagaggcacagggctgggcaggtattcaaagtggggccattcagaggcaaggaatgtctgtccttggactttatctgcaacagttaggaaacagtgcttctctttacacctgggttgtgagtcctggagctgcaggtggccgtctttcctaagcataaagcccatgctgatggaagcagcctatggttctagtggcatcatctcagctcctaaatccagtctctttgggacccagatctttccctggacttcccccttgcaggagtccataatagtctgttttatacttaagcctcaacgaggtttttaaaattattattatttgttactgaatcttatcaaacatatcacccttggccagttttttttttcttttatttctagggattcagattctagaaatgcatttcttgttccacattctggaaacacattgcattgcacagccgatggtatttaggaagggagttaaccctaccacagggaccagtgcacagcagagaaattagaactgtgtccggcacgttgcagacactcaagaaacttttgctgagtgaatggaggaatgtttgtaaatctcccttagtgcttccttgggacagggctgcactctgttcaggagcaattccttaggctggagaagctcttccaggcagggatgagctgcgggttcactagggctggggcagggacaacctgtttttggccagccattgtcatcttctggggggagctgaccttcatgaagcatcagctgagcaccgtgcacaaggccgggggtttgctctgctggtcagctccacagcaggagacgtgagaaatcttctggtcccatcacctggtgctgaggctcttctttcctgtgaactaattagctctccggttcagttaccttctctcccttggtttccatagagggaaatggattttaaaaatgtgatggaaagcgttttcttccagtggtggtaacagggataattgtcattgctctgctgggatgaggggagtttttggggatatttggggtgtctgtgatgacagaaagtagaggagacaatttgggggaggggtggggatcaaggtcctcacttaagcagaaaaaaggacctttcagtgatctcccgtgacgggactgctgacctccagccaagacctggtgaggcaggggtggatggaaaggaggcagcttcagaatgaagccgtatcgttttgtttcaggaatgagaagccaaaataaagcagaaagatttaaatcttgctttttctcttcttagctctatgacacttggcaaatcagctattcttacggatcctcaggaccttctttgtgaacttcaaatgtttagcacacaataagcaccaacacttgcatttttaaaaaactgaggtgaaattctcatcacatactaccaataagcattttgaagtgtacaattcagtggtattcagcgcattcacaatggtgtgcaaccatcacatctctctagtttcaaaacttttccatcaccccagaagaaccccccatacccatttaatccgtcactctccattccgttttcctccagcccctggcaaccaggaccccaccgtcagtctctgtgagtttgcctgttctggaaattcacataaatggaatcctacaatatgtgacctctgtgtctggcttctctcactcggcatcacttctttagtttcatctgtgctgtaaaatatatcagctcttcattcctttttttcttttttttttttcttttttttcctgagatggagtctcgctgcgtcacccaggctggagtgcagtggtgcagtctcgactcactgtagcctcctccgcctcatggcttcaagcgattcccctgcctcagcctcctgagtagctgggattacaggtgcccgccaccatgcctggctaatttttgtatttttagtagagacggggtttcaccatgtttgccaggctggtctcaaactcctgacctcacgtgatcctcccaccttggcctcccaaagtgctgggattacaggtgtgagccaccgcacccagcctctcttcattccttttcagggctggataatatttcattgtacagacagatcactaccttttgactatgcaaacctttgactaatcaagaggttgattctaccctttgactattgtgaataatgctgccatgaaccttcatgtataagtatttacattttgagaatagtgatgataaacacaatgattatttttattagttaaataccattaaatacaaaggatgaagctagagagtggattggtggctaccagaggccaagaaggataatgggtgtattagtctgttcttgcattgctacaaagagatacctgaggctgggtaatttataagaagagaggcttaattggctcatggttctgcaggctgtacaggaaacatggcactggcatctgcttgacttctggtaaagcctcatggagcttccaatcgtggcagaaagtgaaagagagagttgggtgggggggtttgccacacacaagggagcaagcaagagagagtggggtcgggggtttgccacacgctattacaccaccttccatgaactcagagtgagaacctgttcatcaccaaggagatgaacaagccattcatgagggatccacccccgtaatccagacacctcccaccagaccccacctccaatactggggatcacatttcaacatgagatttgggtggggacagacatgcaagctatatctaccagtggggatggagagaagttgattaatgggtacgagcatatggtgggatagagaaaataagaccttgtgttagatagattagcaaggtgattgtagtttacagtaccgtgtgtttcaaaatatggagaagagaagaatttaaatgttcccagaataaagagaagatgactatttcagatgatggagatctcaagtacactgatttgatctttacaaattatatgggtgtattaaataatcacatgtacccttcaactatgtatatctatcatctatcaatataaaaaataaatgaaaaaattaaaaatacaaattatattatcaaatactattaactgttaacactattattcttacgaatactagttctaataataagcgtgtggcttgccacagagctaattagtcagacctagaccgcagaaatctgcacagtcctttaccctctccacatcttccgggagctctcactgacagtctccaacactctgacaagataagatccgtacttctttctagccaccccttattaactcagctaagctggatccgaaggttgcacgcagcctcgcctcacttctgtgaccgtactcctggtactcactgtaattatggaattgtgaagtgtcacccactcaggaagccagaagcctttttctcgttgagtgtacgccacaggggactgatgctgtggccctagatgagagggacacagcaggctcttgttgggaggggacccgcttctctgcctctattctctacttttgttgtttaaaggtaaaagtccgaaaatgttgccatagtgacagcaccaaatgttgatcaagtccattagatttgcccagaggtgcgcttagctcacccacagtactttcagaacagttctttgttccctctctccttcgtgcaagaaacgtggcacccccgccggaacctggtgccccgcaggctgcggtgtggccatccgcaaatggcgactcacttcacgtcggtcctggctcctcacgctgcctgctcaaacctttttatcaagcgcaggccagcgaggccccacctcttccccacgtccactgtccacatcatgccctcagcctctcctgaccacctctacgcagtgtttttccaggccgccgttgacggtgcaggggtgatggcaagagaccactcaaattcagaagctgagtcatatcctctgcttatctcagattgggttcatcaggatgctgagtggcgacagaaacccaacttccagctgtgctgaaagggaccccggagcggggctgactcggtttgcaaagtcgggcggtggagactcttcagggcagccggctggaggtgccctaaggataccattgagaaccttccctccctctctcagttctgctttcttctggggtgccttctgtgggtgtgaatattgttccccccaaatctcatgtccaccctgaaccacagaatgtgacctcatttggaaatagggtctttgtagatggaatcagttatgatgaaatcatactggattagggtacctcccaaatccaaatccagtgactggtggggtttttgtttgtttgttcgttttttgagacaaggtcttgctctgttgcccaggctggagtgcagtggcacaattggttcactgcagccccaacttcccaggctcaggtgatcctcccacctcagcctcctgtgtagctgggtctacaaccgcccaccaacacacctgactgatttttgtacattttatggagatggggtttcaccatattgcccaggctgactggtgtcttttacgggaagggagagggagacttggatacagaggcacatggcatagaaggcgatgtagcaatggaggcagacattggagggacacagttacacactaaggagcaccaagaatttccaacagccatcaggaactgggagactcatgaaacagactcgccctgagagcatccaggagagtccaaccctgccaacaccttgatttcagacttctggcctctagaactgtgagaggataaagttctctcccagtttgtgctaatttattatggcagctctgggaaagtaatgcaccttcattcacaggctgatgcacactcagtgaaatcaatgatggtttccagctgcactcagcttgcctcccgcacatgggctctggaggaggaatgctttcttgccttgtttttgtgtttccccagtggagggactacctaggctgcagggcaagcccattcctcagcctgctccatcctccctctcctcatggaaggaagaggagcttagtgcacagagaggcaacataacaagcttagcccaagctgctgcttcctctggcagcctccggcctgcaagggggtgtcttctcatctgctctgggttgggaaggcaggctcggggcagcacagagccaggccctctggactcaccattatgaagccaaatctccagggatccactttgtcagtgtcagagcagatgttttaatctctgctgtctatctcctgcacatatgataggacatcacctcataactgctcataaagagagttcccagaagctaagtcactcgtctgaggccactcagtgatgtgaaatggcagaatcagccttggcacccccagtctctatcttcattcaaggaattcctacccagtctgccatcctacacgccaccaccctgaggcagaccggaggccccgcagcactcagaattcttttcccaaaggcgagaattatccagttatcgggactggcttttctccatctttattaacagtgagctgagaacacgtgtgatagggggattaaggacttgctggcccaaacagcagcagaactttcttttctccaaggtcctgcaggacaagggtttcttttcaccatgattagcttagaccaattaggatctagcccctgggatggtggacggggccagcagaggagcataaataaatggtcaaactgggatcctgttaggaaggacgagagagagctggcactggcagtgaggatttctgctccatgaggtgattgcatagcacagacgctgtgggcagaattacagtgaaaacagtgtggggatcaagtccgttataactaggaggacaaaagaaatggccaagcatgtggggattaatttattttattatatttttcccctaagagagtctttgagttccctcaaaagaaaaacctgccccttgtttgaggctagatattcccttcctcctgcaagttgtctgagaagttgattaaatccatcactcacagctgagaagaaagggtgggaaaccctagaaatggttagggtccctgggagacacttgaatttggaatctctttaatagctcttggcacaaaagcaaacaagagtctctcggagatcaaaggacttttatcttactcagtggagaaatctgttacttcagtcacttattgttggagccaaaaatatccctggagtgagaaaagaaggaagaaatgtgttgtccatttctgtctttattgcagatcggggtaattggttttcaggtgatttctgagctttataaggaacaatctttaattggggaaggcatgaattcctagctgcccatcaggccttctattcgaggctgttcaaaattgcagttgaatgtgtcattgacagaaagctcccatactcatgtattcctcaatttttgattaagagcctaccatctggcatccggatagtaggaattcagtggtatcatgaatggacagtgtccctccaaattcacatccacccagaaccccagagtgtcactttagctggaaatagagtcattgcagatataattagttgagtttcaatgaggacatactggattcaggtgggctctaaatccagtaactggtatgtttataaggagaggagaggagacagagacacacagaaaagggaccttgtgaagaaaggggcagagattggagctcaggactgccggcggccaccagaagctgggagagacaggcacagatgctccctcgtggcttctagcagaaccagccctgctgacaccctgattttggacttctggcctccagaactgtctgagaataaatttccattgttttaagccactcagtgtgggccctttgttaggcagctacagggaatgaaatcaaatggttgtgagatgattcacagagctcacattccagctgtccagcctgtaaaatgggagggagacagtaaacaaggaaacaagtaaataaatgtgaatttcaaaaggattattgaaaaacattaaagcaggcaatatgttacccagaggcaggttgcgatgggaagtctattttgaataggatggatggtctcggaaggttcttcaatgaggaggcatctgatcagggacggggacagtttgaaggaccaggcacacaacccttggaggggacatgctcaggcagacaggcatgtgaaagtccgaggtacaagagagcttggagctttcacaaacagaaagaagccagtgtgtgcctgccccagcgtcagtgtgtggagaggaacgggatgaggctgcaggggtagggagctgccttccaggtattgctaaatgcgcataatatttacataaaagaatagaaaccaagtgtcagggccacacagttggatttgtctagggaaagggtaaaattagaggctagctgagttttaaaataaggaagaaaaccgcgccatttcagatgagatttgctgccagtcctgccagggtaacgatagccttttctactcaccaaatccacccaactttttggaaaaaaaaaacttgcattttcaggttgactctcttgcaggaagggtcgggagcctatggtggcaggacagagagatgtgtgtctcagtgcactggattgaatagtggccccccaaaatgtttatccatgtaggatctcatgtgaccttatttggaaacagggtcattgcagatgtagttagtgaagatgaggtcatgctggagtaggtgggcccctaatccagtgactggggtccttatgagaaggccatgtgcagaccccaagagagacaggaggagaaggccacgcagtgaagaaaacagaggctggagtgacgcatccacaagcccacgggtgacaagcacagccggagccatccgaagccaggagaacggcatggaacagattatctcgagggccctaagagcgagtgtggacctgccgacaccgtgatttcagcctttggcccccagaatagtgagagaataaattcctgttgttctaagtcacccagtttgtgacactttgtaagagcagctccaagagacagattgaagtgcatttagagaatcaaataaatcccccaagcaggagaaaggagtacttttgtaggtttattttgttttggtttcttacatagcgtaagaaggcacagtcacctgagcatattaccacgctttgtcactaattctattagactctctgttctaacaggaacccccagggaccttgctggttcccacagtcaggcggctccaagtgtgtggggtcccacatgggctacacatcttagcattgctggcaaaaccactggggcgaggttcccttcctcttccttcctcagtttccttccccaccacctccacagcagtaagatagacccaacggacttcactgaggatttgtagttgattttggagacaggacgtttccattcctgggaagggatgggagttcagcaggcatcccatttagaaaggaactgagtgagggcccactgtgaaatctttggtggaaaccaggctttgcaatagaaaatgcagctgtagaatgttggggaaacaggctctgaagctctgtgtcacagacatgcaaagaccacaatacaacttaaaattacgcctattcatggacctctggtgtcaaggggtggggaggaagagactgtctctgtcccattatttttaacagctttttatttaaacaattttaatgttatatcacctcaagttaatttttttgtctcattattaatattattgttattattttgaccacaggtacagaattggcttaatcataacccttgttccaagatacactcctttcctggggccatctgtgactcactcatatttacatagttatttgtttatttttaaatagtgtaatgagtacctgggaacccaccacccgcaactaaagctgggaccttaacaatatatccatgtgacctcaattttttgaatagctatcacccttatgtactttagaatgcagttacataaatatcctgagggcttgatcttttctgttgctcagtaaccaaatctgtttcaggcatgtgtttaattcccatgtgggactttttggctgctcaaaaccacatattccatcataatcttctgagaagactcttatcttctctactgacctgcaccaaatgcagttctgtactcattttttttttcctaagcaaaactttctcctttcttaactgatttctttgaggaacaaagccaagagcaactgggttgccatgtggttatacaataaaaagaagtaagaacagacgttcagtaaactcagctgataacacgtttatctgttcaagccagaaatgtttatcaattgtttaggggtccggatcttggtactggatgttcaaataccagatgatgaaacatgaaggaagaaaactgggcaaactcacatctatggagaaacaaacccgcccacaaacaagatgagtcaagctgaaaagaaagtttgatatagtctacatttcttttctgtttccttttacataattcccttaggaactttttttcttaaaggagcactttagaggagaataaaggttataaattaggccagtcacattggctcatgcctgtaatcccagcactttgggaagccaaggtgggcggatctcttgaggtcagcagttcgagcccagtctggccaacatggcaaaacctcgtctctactaaaaatacaaaaattagccagtcttggtgacacccacctgtagtcctagctactagggaggctgaggcaggaggacggcttgaacctgggaggcagaggtttcagtgagcagtgaggttgcagtgggatcactccactgtactccatcctgggtgatagagtgagattctgtctcaaaaaagttataaattagtggaaattgtaaagatctcagaaacaagtaaattttggctctgccatttgtgctatggtctcagagaagacatcaaaaatatagacagtttggaaagaggacagtgtatgtgagttagtttagacaagaagtgtttattgaggacctgttggatgtcaggctggggctcggctttgaggacatggtggtgaaaaaaacagacacggatctcaccctaactcttactgaggaatgaatcaaaaacagaagtttggaaaaaatactgaacttgacttgtgtttgaagataaattcctagaggaccagttttgagtttccttttcttttttgctggaccacaaatggctctttatcagtaatgaaaaacaactccaaatttctagttctccaaatctctggagagcaggtgctggaaaagtgatgttacttgcattttcctggcatcgtacatgtaaccaacctactggctaaaggcccattagaaatcattttgtgtacttaaatgataagtagaaacacacactcccctagaggactaatttgacttgctaaaggcttttgcacgagaacaacaggggtcattatgtgttcttgtggtgcatgacatcactacagcttcaagagttaattacattcttaattacagctttgtattgaattaggaaaactatcatccataacgtaattgaaaccctgctgagatcgcgtctgttgccagctaattgcatgccattttttactaaactttaaataaaaaccagtatttcatttgcctcagctttaattaattgacaggagacacttaattggggttttatcaatagattggatacgttaaagtgatcacggagagatgtgttgcattctagcatagcagccttaaaatattgaactggcatatgctttcatgacagttaggaaagaaacctgagtagaagtaatttgttgctccaagaaaagagtactccagcaggagtcagaagttgtgggccctcaccttgcaggggatcctttcttatcatggcaaaaacacttccccccagaccttacttcccctagagcttacgcatctccatctccatcatgacagttgggtggatcttaaaaatccctgttaactcatatcctacttttgtgacttagactgagatgttccagtgagggagggtaaatacaatgttggccataaggcaaactgcttaggatctggactctctgctcgtctttgtagagcaggcctcctttgtggtcagccacagaagccctgtggttgccctaatagagaaggaattacaagaaagacattaggatgatcaagatcagtaatatcacacttatcagttaacaagaacacaatgaccttgtcagagggttgctaatggaatgctaactcctgcatctttttttctctgactccctccactcaagatttgcagtcccgagagagagagagagagacagagagacagtgtgtgtgtgtgtgtctgtctgttgggccaagtgcggttcacgtgttctgttttgactgagggagtacaggaccccttgccttagtcttggagaggctgttaccatgagaagcaattggagtgctgtcaccaaaggaagggatattaaaaaatgggccaccaggccaggcacggtggctcatgcctgtaatcccagcactttgggaggccgagatgggcggatcacagggttaggagttcgagaccagcctggccaatatggtgaaaccccatctctactaaaaatacaaaaattacccaggcgtggtggtgggtacctgtagtcccagctgctcgggaggctgaggcaggagaattgcttgaacttgggaggtggaggttgcagtgagccgagattgcgccactgcactccagcctgggtgacagagtgagactccatctcaaaaaaaaaaaaagggccaccaaagtgaacagtcttcactgaccttcccatcttgcatcttcttgaacagacgcgggatgatctaagaaagtcctgctctgtgtgagatcttggacatttccaggtgatgaaattgttggcggcagtgtttagaaaaaattgtcaatgtaaagattatcatctcaaggatattgaaaaagaaagaaagaaaaaaaacctgttgaatcagccctatagtccaataaggcacaacccaagtcgccaaaagttgttagttaggaacgctcctgtttttgtttctgtaggtggtttttttctaagtatatttttctcggatgaattgcccttgtcataaaattaattccttttatttcactattcaagcttcagtgaagtgtgagatcaagtgagactgcctgtaaactttctttttctttttttttgcattttgaatgtctacaaatctccattttgtggaattgtgtgagacaattttgttattgttgacttccattgattagtgagcatagctgtttcttgaattatttgttgtgccaaaatatttaggatttgtatccctttcatttctattattttgctgattttttatttaccttttaaagtctagttgacaataacatattcaaaaggtgaagatggccaggtgcaagggctcatgcctgtaatcccaacacttaggtaggccaaggcaggaggatcgcttaagcccaggagtttgagaacagcctgggaaatatggtaagacctcatctctacaaaaaaattaaaaaatattagtcaggagtgttggctcatgcctttagttccagctagctacttgggaggctgaggtggaaggatcacttgcacctgggagataagaggtcaaggctgcagtgagctgagatcacaccagtgtactccagcctgggcgacacagcaagaccctgtctcaaaaatgaaacaaaaaaaggtgaagataaatacaaaaaaaaaaagaaagaaaaaggtgaagatatcaacatttaataataaaggattttaaaataggcctccaagaaatgagatgccatcaccaatgtccattttcggattgttgatgtgaggcccatgctctaggggtgtgtcaattaggcacacaattgtttgcctgcaatagaaattgatttgggataatttaagcaaaagcagacctgtcagagccctatcagggactcacaaaacctggcttgtaaaccattaacactaaagaggagcccagccatgatttgtaggaggagctgaggtccctgtccaggctgccatttttgaaaaataataataataataataataataataataataataataatgccaacatttcttttgcccttatgatgacactgcttaagattaaacatcttggagaaactgtctttcagtggggaaatggttaaacaaaccgtgtaccatggaataccacttagcaattaaaaggaggaaactgtcgatactcacagcaacttggaggaacctccaaggaagtatgctgagtgacaagaagccaacgtcagaaggctgcatatcatatgatcccacccaaataacatttttgaaaagacaaaatgtcagaaatggagaagagattagtgagttccaggtgttagagatggagagggtggtggagggatgcagctctggctataaagggagaaaggagggctccttgtgtagatagaaatctctgtatccttacctggtgggggtggacatacaacctacacatgggaaaacattgttacaactaaagacacaaccacatgtacatgtgcaagtaaaactgtggacatctcagaaaagatcagagaattgcatcagtgtccatatcctgattgtggtagtgtactattattttgtaagatgtcattattgggagaaactgggtagagagtccatgagatctctttgtattatttcttacaaatacatgtacacctctaatcatctcaataaaaactttcagttcaagaaagacattctcggagatcacctctttggcctattgcctaactccaatgagactgaagacaggatgtggtggaaggtccagcagagaccctaaggcttgtgtggtggaaagccaggactttggcccacctgaagtgccagaatgtatctccccagaatgaccatagtgatattaccagacccacacactctcccagaatcttactacttctcaataagagatagaaactattttccgtcctctcgaacctgagatgttttgtgacttatctgatgaatcaaatttgctgggtataaaagttgatgtggcttctgccagcctccatctgtctctcttgggttgcttgcccttggaacccagccaccatgttgtgaggaagctcaagccatgtagagaggctgcctgtaagtgttcccgctgacagtccagctgaaagacaactctgctgctagatgtgagtgactgagcttctccatggttctaaccccagcatttgaaccgccttgagtaataccatgtggagctgaggcaagacgtcctggcagagccctgcccaaatgacagattcatgagtgaaataaatgttgctttaagacagaaatttttggaatggttttgacacagcaataagttactggactaccttctttccaaacactacacacagtgggaaagaggaaattccctgttaggaggatgctggacagcaaaaaacaacatatggctacgccatgggggtctgagtcaatttcatcttttcgcacgcccgtcactcctaagagctcacttcagagactctggggagttcaaaggacatcagtaaccaacagaaataggtctgagaaactgccccaaaagacccttgtgaagcatctagtgggtgctactttatttaatattttgtgcaccaattatatgtaagcatggaataatctctagccaaaacagctctgttttctttaaggtttcttgagttttacatagattaactctttaaccatgctcttctgtccatattggaggagagatatccattgaaatgacaaacaggaggaataggcccagggaagattaaatatgcaatattattatgtaaaagaaggcagaacccatgcattcattcagcatatattttcaagtgcctgccctgttctaggactgcagatacagccataaacaaggtggagaaggtctctgctcctgtgtgtgtcatattctggtggagcaggactgaattaaacagacaaacaagcaaaccagctaatattcatcgttgtgggtgaagtactgagagcattacagaagaaaacttccagaaaaatgaagaatttatatgccaactccaggagaaatatttcagtgaggtcctggcttggtgcaaggatatggaaccagagccaagaattctatcagttaaaagcagcttagtttcctgagcctggactgatgggggacgtggaagacaaagtgtcaggtccatcagtggaagattggccttgagccactgtacacagaatggagagcccactggcctaaaaggagagattgtcaggcgtgacgaagcaggaattttagccgaagaatattcacaaattacaggccaagagggaagtggggacgttcgtcttctcttcatagccttgctcgttgggggaccagctgtcctttattgttaatagaaaaatcaatatagcaagaggcgaatctttgctgtgataacattggctcctttcaccaggcgtgtggaattagattactgatagatgcacctctgtcgcctccccaggctccagatagaatctatgggctttgccaataagcacggtaacagagtgtggatcaggaaccagcgggtggccaatggcagtggagaaaatgtaattcccttgcaagacaccgtcctggagggagccgggaagcagcttgcctgattgcgtatgctcagctgcgctcaggctggagtctttgaggggacgcttgggtacctgtgtgcagctgaaacactgcacgctggggaggcggcatcgattaagagaggaagagaggaggaaagaagaacaaggaaaggcaaggaggggaaagagagggagggaagtccagaagacagccaggcctgtaagcagctctttgagaaaacttcccagaagggtctttgcttaaaatgcagtcgtttcaataaagggacagatctcagtaaagagcatttccccagatatgctctgtgctacatggaaactaatttgtggacgtgtgatctgcttagagagtcgctgtgggccagtctttattcagtgtccacagagtcacgtggcaagcagcctgtctacaatccaccttccttatgatcaggagtggaagtgcaaatagagggttgcttaccagatgtggtggtggttgaaattaaacaggggaatgcttatggtcaaattttcagcttataaaaccaacataacatgtaaagtatgacatgcaaaccactagtagtctccaccggcctaaaaggagaggttgatcagccatatcaactgtcagtaattttttgtactttctgccaatttttcttaatctagtacttacttgctgactctccacgtccatgagtgcatgtgtgtgggtatcacatccgtgtatgtctgtcatagcatagatgtgtgtataggcttataaatcatgtttgtttacaaagttaaaaccagtcggtttttacaggttcctttttggtcatcaacaatcatgttgtgggccaagggcggtggctcacgtctgtaatcccagcaccttgggaggccgaggcgggacgatcacctgagctcagaagctcaagaccagccagggcaacatggtgagaccctgtctctacaaaaatatacaaaaattagccaggcatggtggcttgcagctatattcccagagcccaggaggttgaggctgcagtgaaccatgattgtaccactgcagcccagcctgggtgacagagtgagaccctacctcaaaaaaattttaaaaaaaatgttgtgagcattttctgacttcagaacatgatcttcaagaacgagacattagtgattatgttctacattcaattacattaatgaatatcttcatttccaattttttactgttataaaattttataaacaatcttacatataagtcatggaaaacattttaagtagatctatataaattcctaaaagtagaggaattcctgagctagaggggaggagaggtactacttgaaggcctgatactctgcagaagggcagcggctgcccacacaccagctgggagtgtgttcgtctcaaataagtcctgctttagtgcatgttcttatttattgtcacagtaagtgctagtgctgctgctgttaattttgtataggaaaacagaaagaaagaaactaatagcagatccctaaattcaatgcccagaatcctcttggaagtttcaaacaaggaaaacattagtgactgtatctagttaaaaaattgggccatgacagaaaggtaaacatgaacattgaatctgccagccccagtacagattaccttccataggatcaccattcgccgtttgctgtgatccttccagaaaacaaaaatacatgggtgtctctgtgtgtgcattatatgcctgtataaatgtatctaaatatctgtatatgtgtatacatgcatgtatatacatgcacatgtatgtatatatgtatatacagagtgtatattcttcatgaaagttacttaaaatgtgcagtttatacatacttgtctttcctgtgaagtttttcagtgtcttggagatgttttcatggtagcatggacctccctgtatgcttttacatcgcttggccatgacttgctgaaggatatcgtggctgtttccagttcggggctttcaccagtgggcatctggtgctcccccagttggatcctgctgttcccccatttggtgacctggaaggatcaccagcaacccggctgtcaggctgccctcccagtaagaggatttcagtgacctgaggtcatcgcagtgcggttgttggacagctagcagtttccttgagtgcaggttctgcggtggtagcttcttgctcctcggtctgcagccccacagtgagcaggacatatgtggtccctcgttgcacacgtgcggaggttgtacttggtggtattcctgggtcctgacgccatactcaggacatggccagtattcacacagtattggaatgaacgagtaaatgaatgaatgcatgcattcatgtttcttcaaagataaatatcacttctgtcaggtgaataaataccatttgtcacattttattgtttttatgagggtgagggaactgtacaattatttatcaaattgcaaaagaggcagtaagacaaaaatctgtcttggtttgagcacctccattcctccccaccaccatcactccatgaaccccccagcctccctgggctcttctccgtgtccgattctctggatatgagagtgttgttttccaagtgtagcagggtttcacttttcgagctgccagatctgctggagaaaattataaagatgaatacttctgagcctttggctgacgcttatccccctctggttcagatatctttgcaaaggcagatgtacaaatcatcctggttctccagaggggtcttggttttccatcctgccctgagcctagtgtgaggtggagcagcccaggcttccacaatatctagaattggaacagtagccccaggaaaagaaaatgtgcttggagacagctcctgcaaagccccaggattacagcgtgggtaattagactgtcactctcgaggaagggaacactgaagcaggatctctattagcctttgtgcccctaagacggagcaggctggaaggtaagaggcagagaagtttcgagattcatcagatgtctttatggctcccacatctcgttaccgacttcacaatattttttttttctttcttaacaacgtagtaaaacagcactcaggaattaattgtatttttaataaagcagaggcttttgttgttgttgttaacattgaacttccttaattctgggaagctcaagattagccgtgtcgtagggggaaaatgttagaacgactatttaagtaaaatttacttttagtggtgtaatttttccttttaggttttcttttatccccaacctttttgtctgtgtgcagattacatcataaggcaagtggagtcagtgtcatatcacaccatttattcacttaatcatttaccagacccagatggagtgattttaatggggcaggcagcccctgtcttcctcattagcagattgcttaataaggaagacaggtagaaacaaacaagaaaatatcagttgtgatgaaaattaaacaaggagttgtcgacaaaaagagaccctgtaaaatatttgaagagacttattctgagccaaacatgagtgaccatggcccgagacacagcccacaggagatcctgagaacgtgtgccccaggtgcccggggcgcagcttggtttgtttgtttgtttgtttgtttgtttgtttgttttttgagatggagtctcacactttcacccaggctggagtgtagtggcgcgatcccggctcactgcaacctccgcctcctggcttctcaccattctcctgcctcaacctcccgagtagctgggactacaggtgcccaccaccatgcccggctaatttttttatatttttagtagagacggggtttcaccgtgttagccaggatggtctcgatctcctgacctcgtgatctgcccacctcaggctcccaaagtgctgggattacaggcgtgagccactgcgcccggctgcagcttggttttatacattttagagagatagaaggcatcaatcaaatacatttaagaaatacattggttcggtccagaaaggcacaacagcttgaggggcagggggcttccaggttataggtagatttaaaaatgttctgactgatcattggttgagtttttgtcaacagaagggagtgtctgggttgtgatagaggttgtggacaccaagttttatgcagatgaagcctctgggtgcaggcttcagagagaatagatgtgaatgtttcttattagacttaaagtctgtgtccatgttaatgctggagggtagaatgaggtctgcttgaccccccacttcccgttatggtcagaaccagtctttcaggttaaattttagagtgccctagccaaggagaaagcccagtcagatgtgtgggggcatggggagtggagcttagaattttattttgtgttttacagagtgagaaagcgggtgattggaaagctttggggctatttttaggctgagctatttcaaaataactagcccatcaaactttaatatcatagacatggttgcttaaaacaaggctaatatctagatgagctggtaaaaaagagtaattattaaatgaaaaatatccatcatctatggataagaccaaattgggatgaggggatgacactgactgtggggaaggaactgttgtggtagaactaacactgaccccccggcttacatcaaacagagggcaggatgctgctgtctagggatggggcccagtggtatttagtttgatgcgaaattaactgtggtttttaccattaaaaataatggcaggctcaggctcagtggctcacgcctgtaatcccagcactttgggaggctgaggtgggtagatcacgaggtcaggagtttgagaccagcctgaccaacatggtgaaaccctgtctctaccaaaaatacaaaaattagctgagtgtggtggcaggcacccataatcccagctactcaggaggctgaggtaggagactcgcttgaacccgggaggtggaggttgcagtgagctgagatcgcaccactgcactccagcctgggtgacagagcaagattctgtcttaaaaaaaaaaaaaaaaaaaaaaaaggctaaagccgcaattacttttgcaccaacctgtaaaacaccgttgtgatttgagccagttataaagtagctaaggttgtcggactctggcttaagatttggataactgttgtgatgcatccctgcctatcctctgtgtgctttgggttttgttttgttttttccatgttttccttacccttggtttccatgagaacttccattgctattgtcttgagtcggagatttctaccctaggccccaggacttatcaggggaaggagcaggcctgctctttgagtgacaaatccagcgcagacatcattggccaaggcaaggttttggtaacccggggatttgcaaagcatttctatttgtttcatctcaggaattcagtatttcattcttaaagaccgcaatacggttgaaccttcggattatttcggagatgaaaaccctagtattagcatagttggattttttttctttctgtttaaaatatatatatatacttttatgactctgatctaagtaaactctgtccgggagtggggaagaaggaaaagcagttggaaggctgaagattaatcctttgaggaccgaggactgcaaagccttctggccatttgtacaaggctgaaggcgtgtggtaaaggtggtttggcggaaagaggattaacttttattggtttgtgaaaatataggttcttagggaagaacaaagttgtgttttcccagcccaggatctactggggggcagagtcccactgttctttttattctctgtgtttgtggacaaggagatggtttaaattatcgtcccacagatggatgccccttgatcagaagatggtatgcggaggtctggccgtgctgcacctcggagaccccctgcagtttctgccttggctagtcagctttgttgggggcggaggaggctcccagagctggaccccatggagaaggcatgtggagaccattaagctggtcccaagatgtctgggtggctaaacattactgagaagatatgttcctcaaatttataaagccaaatatttactcaagattgtcttcattaaaggtgctgaggttcgatttgtcccgttgaatggaaacttgtaaaatacggctgcgaggaagttcgtgacagcctcggtgctagatgcctgtgtccatgtgtacatgtgtatttccttgctgtccctatggcacgaagcgctctatttgcctgtaggcgagggcctttttcattctggttatgtctgcacaataccaaatcccgggaaatcaggggtctgatgaagccagtgagtagaagatagcatcactgccaccgcccacaggtgtctctgcaagtgcacaagtatacaggcacaatgccaacaagtacacacctatgcacgtgatatttgaacacccccagcatgtgcacataaagccccagtcacaacagcccacatcatgttctctttacacttctgttgccatggccaacaatttgattgagtaaactaatgtgatttgaaaatctggtggtgattcctctctgctgtgtgatccccataaccaacctcgaatatgttatacaagcaacattttttaaaagtgtatttctagggccggcatagtggtgtgcacctgtagtccctgctactgaggaggctgaggcaggaggatcacatgagcccaggagtccaaggctgcaatgagctgtgagtgcaccgctgcactccagcctgggcaacagagcgagaccccatctctaaaaaatgtttttaaagtgtatatcatttaatagattgatttgaaaaaaactcattttattcattttatagatcatcttctgactgctccatttagtcagaatgcctctaaactcttttcccttcattttgaaaatcatcttctggaatgcctgtcatcacttatatctcatgtccccactctgaattcctagtagaaaaattctagttttaaccaaaaatagaatccatgagttttcagttaggaaggtagactatgaaaagaagctgttagaaacatcagatttttatatacatgactgttaacatttccctgttataaaaatgaaaagacctttaaatgtatacatatatatatacttaaaaagagagaatagcatagtgaatgagataactaacatccgccacaaaatgacagatgctagaatttcatcctgtttgtgtcagatttttatccaacaataaaagaatgaaagaaagcaaacatcactgataaagttgaaatcctttgcaccctccccagaggatactccctctttccccctgccccccagtcccttgttactttggccccttcctctgctccccaatcctgttttctctactccttccaacagtcctccctccatccccatctctacccctttatcattcactaacgtgaatgtggtgctaatttttccagtccatatctttgaactttttgtaatatatgcacatcaataagcaatcgagttttatctattctaattgttttaatgtacaactttatgggtacatgtgcaattttgtttcttgcatggtggccaaatcagggcttttagaacatccaacatgcgaataatgtacattgtacccattaactaatttctcaatacttctgagtcttccttgtctatgattccactctctacatcacatgtacacatttttttggcacccacttatgagtagaagatgtgatatttgactgtctgtgcctggcttgtttcacttaggataatgtcctccagttccatccatgttgctacataaagcatgatttcattctttttaatggctgagtagtattccattgtatatatttatgtataccacattttgagaatccaatcattcattcatgggtagttaggttgaatcctaagttgctgttgtgaatagtgctgcaataaacataccagtgtaggtatctttctgatataatgattgcttttcctttgggcagatacccagtagtgggactgctggatccaatggtagttctatttttagttctttgagaaatctccatactgtttttcgtagaagttgtactcattcatagaagttgtggttgaatccattaaccacaagcaacaaagttgcttcaaacattttgaaactaggcatacagagtatcatactgtatctttctccagtttatttttttcacccaacatgatagtttcaagctcaagccctgatgacgcctgtaggtctagcttatgcatttcaactcctacattttatgggacatatgatgatgccacatgtttgcaaacatttcttgggtgatgggcatgtatggtattttgtttttcattattacacacaaacatgcttcaagtagtgtttgcacatatgaaagggcttttcggggagatgatttaaaatggtttcttaatgtcttaagacatctaagcatttctttcacttctgggaagatggagaaaggtgatttgtttgaagaaggtatgcctccctgttcttctgcagtcctttttctgttgttagaaaagctgtttttccagccagccccagaactatcgtctagaaatattaatgttaagagccacatcagttttctgtcttctgtttcaaaattgttaacagctcttccttgaagatgtattctctttctctctctttctctctctgctgtgagccacagtggttttcttggaagtgatagaccatataattctcacatgtcaaggttttaagccaaagccctcaggcaccacttctgattttcttgaaggatcaaaaataaaaggttgcaaccctcacagccgtaggctcctgcagcaactctttggtgcacctgtcaccctgatacctgggaggaggctctgagtccatgctgtgggaaggtgctggccttcatggatgggcctcccctggtgtgtccactgtggacctgagtgggtgtcccagagccctggctctcccttcttttcctctagaaagggaatcggcatgttcccaatcatctctgagattatctttattcttcaaggagttgcagtggctcttgccaagtgccctggggtcttggacatctgcctagtggccctgtagagacctccaccctccagacagctcagaatttgctaaagaaaatgtgaattttggagtccagggctagaaaatatgacatgggcacatagtgtcatgttttgaaaagtaaggtttagatgccttactgattatttgtgtgtatgtgttgtgtgtgtgagtattgtgtgtatatgtatgggtgttgtatgtgcatgtgtgttgtatgaacgctgtgtgtttatgtgagtgctgtttttatgtgtatgtgtgtgcatgtatgtgtgttgtgtgtgtgttgtgtgtgggagtgtgtgtgtgtagatgtgtgtatgtgtgagagtgtgtgatgtgtttatgcatgtgactgtgaccatatgcgtgttgcatgtgttgtgtttacatgggtttgagtgttgtatgtatgtggtgctgtgtgtatgtatgtgtgtgcgagtgttgtgtgtatgtgtgtaagtgttacttgtatttgagagtacatatgtatttgagagtatgtatatgcatgtaaatgcctgtatggatgagagtgtgtgtgagtgttttgtttatgtgtgtgagcattgcttgtatttgagagtggtgtgctgtgtctgttgtgtgtgtgttgtgtgtatttgagagggctttgtgtttatgtttgtgagtgtagcatgtatgtgtgagtgttggttgtgtgtatatgtgagaatgtgtgatgttgtgtgtatttgttagagtgtgtggtttgtgcgtggtgtgtatgtgttgtatgtgtgagagtttatggtgtgtgtggtgtgtatgtgtgagagtgtgtggtgtttgtttgttgtctgtatgtatgagagtgtgtggtttgtgtgtggtgtgtgtgctgtatatttgagagtttgtggtatgtatggtgtatatatgtgtggcttgtttgtggtgtgtgttgtatgtgtgagagtttgtggtgtgtgtatgtgtgagaatgtgtggctcgtgtttatgtgtgagagtgtgtgccttgtgtggtgtgtgttgtatgtgtgagagtttgttgtgtgtgtatgtatgagagtgtgtggtgttgtgtgtaagtgtgagagtgtgtggcctgtgtggtgtgtgtgtgcatgcatgtgactgtgtgaccaggtgtgtgctgtgtgggagcgagggaggaaggcacgggagaaggccgcggatgctctcccttctctggttctcaggaatctctccacctcaccccaccttaacaaacactgaaaacttctagatttgagaagagctggaaagcatcaaaaaggctgtctagttttagtgccaacattcagctcagatgacctggaaaggtggcagcagttacataagtactaaaatattgaaatacccaggctgcacctcagtgtcagcccagcccatctccacagaccgccaccgcccacccaccatgtcctcgagattcaaggtgttagtccccagccttggcagaggagccagctccggggcccgtgtgcattctcattcctcagtgccagtgtctccctattgagcctgatggtttccaactgtgttccatagacatgtaggccatcatcaaccctctttagaagacgtttaacatttacttctaatgtcattatcaaaaatcttttttatctcttaaaatcttaacctacttgagtttcccccactagtttcttgaaataaaacgttatttgttctttttcactttccttttttttttttttgagacggtgtcttgctctgtcacccaggctggagtgcagtagcccaatctcagctcactgcaagctctgcctcctgggttcatgccattctccggcctcagcctcccgagtagctgggactacaggtgcccgccaccatgcctggctaatttttttgtagttttagtagagacgggatttcactgtgttagccaggagggtctcgatctcctgaccttgtgatctgcccgcttcagcctctcaaagtgctgggattacaggcatgagccaccatgcccagccctttttcaattttgtagtgcacatagctaaggctataaattttcctttcaatgttactttggctgaatctctcagtgcactcatactttattagttctaaatagttggagatttccatgttgattttttttaagctgagagtcttacatgtatcatagattgcaaaagttacaggattatgccacatttcgttttaaaatttagatttgcatatgtgaattcatgtataacttggcatctgagttctcttcattgtgttatctgtgaaatattgttcaaacctcagatgatgctgcttggtgaaaaattaatatgctttgtgataatattgcgataggggatagatttatgatttttgggtaatatctgaatttttagcttttgcaaaggaatttgttattcacgaaagcatcctcatcttatcaacctcgtaataaataactgtaaatttgcgtttatgcaataaaggtacatttgtgtattggccttttgaatgttttacatattggcatttggattttcaaaagagagatcaaatttttcagaaagattaaccatcgctgttgtattctaactgcccgtcattatattgaatggggccaaggaagatcagtaatcaccagcatttgttaaaatgcttgctgtgcatgacagcactcctgcctgaataacctcttttgattatcattgtagctcatgaagaagggctggtagttatcctcattttaaaagagaggaaagttaaactaaaacaagtacaataacatgtcaggttctttcagtaactacgtgatgaagccagtattagtttgtgagtccccatagcagccccatggggtagatacctgcattatccccattccacagatgagagtattgagacaaagagagggtaagttacttgcccaagatcacccagttagtgagaggagaacccaggacaaatggagaaatgtatccttgccccccaggtgttctttccgttactctaatctctttctctctcataattattttgttggaaacacagagtgtagatattcttaaagatctaatccttaattattcacagtcctttatcccagctcattaaattagaccaatggaaagaaaagttttattttgcctctgtagtattggggtttaagtgatcacggtaattttccattatcattttgtgttttaaataaatacaacaggctttattgtgaaaatatttgtctaatattgggcagtaaatgtttaagtgattttggtttaattactattacagtcatactattacagtgcataaaatagaattcttcttgagtttgttcattagatgggaagaggctgcatttttaaaaaatatatgcatgcctataatactacatttaaatatgtgcgtatataaagagatgctttcttatttatatacatggtcattatagagctttgtgagaaatagaattttctctgtgcaatctgtactctgggaggggttatttgctgacactgtatgcccatttcctaacagaatgtctctagttaagtaatcatatgatgaagacatcccagctgggactctatatttaagccaagttactatttctagcaagactattcttttgaaaggttgagaagtcattccttttattttataagttaaatatcaaatatgtatcatttttttctcaaatacacagtcatttatccaaagagtctactgctactatgcacaggaatgaactaagccaatagtgatgagaaaccatcttggttagccatctgtctgtccctaagctgaggtgacatttccgctccctggcagcaggagacacactagttgaagtgccagtttttaatgcaaaagtccccaagacccagctcactgagaacagctttcagaaccctgcatccctgccatcttcttcctgtcttttccaggagtcaggagagagctcatctgggtgcaaggcaagagaggcttcctggaggcagtgtttcagaacaaggagtgtgttcacttcatatcccgcatttgtgccagcttgggttgagactccattgcttttatgtggaatgtttttattttatctacattttggcctccttccaagttggcatgacaaacttaagtctaatgccatggaaatcagaaaccagtcagctttgaagagactgctttaaagagaacaagagaaataagccacagagaaattaggcttaaagagagagaactggaagagatggtgtgggagtttcttgttttcttcttccctttttttttcatggtctctgatctcgttagcatgttctttcattactacagctgtttctgcaacattttgcctgaagattatagtgtctggcttattatattcaatgggggaatgactcgataagaataattatcactatgctggggtttgactccttgatgatatttttctattgttcgcggggactcgtgttgtgttcgcagttcagcctcatcattagctatgctttgctgcttaggcaatgctaaataaagaaaaggctttggaaatgtgtgtggatttttccaaggaggacttgtgatcgcattcctacctttttctgatttcgcaggttggaattccaccaatacgaaatgttttgaagtcactttctgacttgggtagaacaacaaatctgagaatcacttaggttcttggaatccaaatgaacctccaaactgcccaggaccagttctgaaagtacaaataaagttgcaaacccggggaggtctcaggtctgggaggttcgtccccttgctcctagcattcttttgttccctgcagacctttgcaattctatcagtctccttgctgtttcttttctttgggagagttcatagcactccttctcatatttcaaacactctctgtcagacctttttatcctcatgtttggatgatttcctgtccgcttaattccttccttgtggagctctggaaatggatgtactaacttgaaggtagattttttgtttttatcccagttcacaaacacgtgagactcttgatgttatagtaacagtgaggattccaacaccccagggaacaccagctgtgtgatgttcctgaaacaggaaccagggaaagaaagcctacatatccccaacttcacactccttgtctctgccttgaagtccttgcactccgaggtagcgttttacatctggctttttttttttttaaccttgatttttactggctatctggagaacctctcaaagcaatattcagattcctataaggaccagacgtaaagttgtctctttaataggtagaccaatgtcgtgaagcactggttaggtttgcacacagcatcttttagatcacagagagtgggaaattactagtccactcaggtagagccgagactcctgcaggtggaatcactgcataccaaaaagcgtgccttccgattagtggaagtttaatcaattgcgagtgctgtcacagcttaatcatccagggaagaccttatctctgggcatgtgctccttccttggctctcccttattttcccttggcacatgtgacccatttataaaatgcccttattgagtatgtgtgttgtttatcgaagcctcatggggtgggatctttgccattctgctcaccagcgtgtcgcatgccaaggacagagctgagcacatgctgggtgctcccatcactgttgctgaatagacgggtaaagagctggaaaaagttctccaaagcaagagttctcagcgggccccctcccactcctttctaagcttttggctgtctgtgactatacagctgtctgatcagctaactgattacactcagatcctgggctcctttcttgttttccttctgcagaaatatatatatatatatatattttgcacaaagatgaaatccgtcctagggtcttaagatttattaactgttgcctgagttgtttcacatgatgtcaggggaggaggcaagcccaggctccccttagaagttccctacacagagggctttgggtaattccctcgattttgtaaagacgttgggttggcttaaatgattagcaggagatccttaaggaggacttaacttaagcatttaaggttcttctgtgtctctctgagtgcccctcctgggttgcctggattttcacatctggcaggcaaatttagaaagggttttctagcctctcttcccctctgctgattttctgagccttgttagagtgggcgtctgtgttgggggctgggggttccctccttcaaagcactggaggtcagcccccactgccagcatgtggtctgtgttcagggagacgtgccagggacctccaagggcttccagctcttagaggcaaaggggatcaagttacagagggcttttttttttaagttcatctgggagggcagccatgggagcccagggggttggaggtctgtctgtcttctgctctaatcttgtctgtgctggtttatccagaggagtcaggaagttcagagaaaggagggtgtctgccgatttcatcccgcttgcatatcaaggcctgcggttcagcacagcgtgttcctaggatgtgcctgttctgttcggttcaagctgcaagtctcccctcctctcccactgatttagaggccacttaggaagtagccttgggtggttgtctctggctctggggactgctgtcttggtgctctttgttgtctttccacagctgcgttgagggggtcttcatctcattcacccctggaaggtccccatcactccccaagtcccaaacaccagtactaaaaaaaaaaaaaagctcttggcagcagtgcagcctgcagctctccatgcatttgaggagctgatcctgctgcacatagacctggagccagggaagaggaaagatgtaaagtcttcttctcattccaggcaacttgtgggcagcttcaggccacacctccgggatatcaaccaggggctcacacacccaagaatcttggcagaactgtgtccacacagatgtgaggacaattcctggccaccattcctggccacctttctgtgtttctctaatacaaacttggtcatcaatgcaactgtttgtacagacattttttaaaaaagaacagtaacatttggatggttcttttgagtttacagggggcttctatgtcccttcccatatttacataaggcactaggggcgtcttaaaatgacttttagctgttgtttcttttttgcttttccttggcaaggacacgctctgtggaaagtatggggatgtgccgaaggccttcaaagcttgggaacatggtagtcttaacaatttggagaccttgaaaatgagtagtgttcacattgaaaatgtttttttcccctgtctaacattaacacctgatatctctaggttcaaaaagtcttctgcctaattttgcttatctgcttgaatactctatcggtgcttctttcttctgagttgtttttttaaagacctattgtcttattacagtaaagcttattttagttgcaacaaaatgacaaagatattttatttttaataaataaagagctgttacaaattcataaggaaatataaatagactagtagggaaaaaagtaagaccagggtgatacatagagcaaagacccagtatattaatggcattaatagattagcctaattatttggtcatcagcagtcttcattgatctaagctatagcccaaatactaaaatggggttctgcaaggacaagatgaaatgtacaccatttggggaatgatactgctcaccatcctgatattctatgctctttctttctttctctttctttctctttcttccttccttccttccttcctttctttttttctttttctttctttctttctatttttctttctttctctctctctctctctctttctttctttctctctttctttctgtctttctctctctctctttctctctttctttcttccttccttccttcctttcttttttctttttctttctttctctctttctctctctctttctctctctctctctctctctctctctctttctttctttctttctttcttttttgacagagtctcactctgtcacctagtctggagtaatctcaactcactgcagcctccgcctcccaggttcaaatgattctcctgcctcagcctcctgagtagctgggattacaggtacccactaccaggaccggctagtttttgtatttttggtagagacggggtttcaccatcttggccgggctggtctcgaactcctgacctctggagatccaaccacctcggcctcccaaaaactctgtgctctttctttgggtatctgctggtgaagactaaccagcttctgtgttgcttttcatttattctcaggatgtctaggatggaaaggcaatgggaatacatttgttatttttaccaattgttggaattctcagtaagtattttaatttggagtagtaaaggaagataaaagtagtctgttgatgtaaaaaagtaattactgtcattgctaatcatttatctcccaaggtgttttattttactcgaatggatttaaaaatagtttagctcaatgtcaaccacacttttgggggaagtcaggactcagtcaacattatgtagtttatcggaaaaaaatatattacgcaagctctcctgaaacacaatggagctaactactctatacaataaacataaatgggcatgagtgtgcagcttttagacagtgaacttgaaaggaatgaaggtaggcttcttcctacttcttcttgctgctgattagaatgtagacatgatggcttgaactggtgcagccattttgggggatgaggtagaagtagagaatggcatgcagattcggggcctctcatgccatggaactgttaactcagcccctgcaccatttcactactttgtattttaaatgagaaggaaagaaatatcttaactactcgataaaccactggtgatttgagttattccaactaatatctatatattacagtccaccacccaccccctgcttcctgctgtcttctctctctttccactaccacagtcaactccaccttccaggctaaaagttcacctggccacacttctttttttttttttctttgagatggagtctcgctctgtcgcctatgctggagtgcagtggcatgatctcagctcactgcaacctctgcctcctgggttcaaaagattctcctgcctcagcctccagagtagctgggactacaggtgcacaacaccacgcccggctaatttttgtatttttagtagagttggggtgtcaccatattggccaaggtggtctcgaactcctgacctcgtgatctgcccgcctctgcctcccaaagtgctgggattacagatgtgagccaccacgcccagccagcctggccacgcttctttgaaattgttcagcaagaaacaggaagagaagaaagtgtccttttgtgctagatgcattttgagaacacctttctaataccactgtacaaaagtattagtcaaggagtccagttatcttgattacataagctagaaaatcttccaaacctgtttgaacagaagaaaggagctgagacatagcccccagtggatgcccctggccgaggtgtcactcatcactctcacagtttgatctcaggacatcatttcctccctccttttcttctgttctgtgggattctttgaagagtgttgagaagcctttacatctgattttgctccacaagccaaggctcctcttcagaccaggtgggttttcttttcatcctgctttgatccttcccagggagggcagagaaggaattctgctgcctggaactgctgctctccttctctgcccgtgggcccctgggcccctgctggatgcttggggatgtttcctattagtgggcagagcttcccctccgccctttgaacttcatttccttaggagccgggaggacctgccctggctgcctgtgcggtgcatttgcattgactgcacagtgcagaggttgctgatggaggtccattctttgcaatcttcaggggttctgaacatcctttgatcgtgcaaagtaagcaggatccccaagatgtccccagggagatgtagcaaactgggatagcaaggtggcccaagagaagtttagggtgacagatgctgccaggtggcagttggggaacgtttaaggcaattgagtctgtgcaggtgcatccggggagttaaaacgagctgtggccaggtgcgatggctcatgcctgtaatcccagcactttgggaggccgagacgggtggatcacgaggtcaagagattgagaccatcctggccaacatggtgaaaccccgtctctactaaaaatacaaaaattagctgggcatggtagcgcgtggttgtagtcccagctactcaggaggctgaggcaggagaatcacctgaacctgagaggcggaggttgcagtgagccgagatcccaccactgcactccagcctggtgacaaagtgagactcagtctaaaaaaaaaaaaaaaaaggagctgtcttcttccttatttagatatccctaaagtaactctatactgttaccagtttctcataaggttagagctgttggcccttactgagtatcttatcctgttgttgaggaagtgattgcaatattccactaaatcatttttttctttaataagttttattgagacataatttacatgcataaaattaacccttttaaagtctacgagccaatgacatttaatatattaagagttgtacaatcaacggtatcatttaaatttagattatgttttccacccagaaaaaaaaccctgtattcattcagcagtcactccacagacctgatttcctcaccctggtcaccattatccaatttctgtctctatggatttgcctatttgggacatttcatataaatgaaaccatacaatatacatacaataaaattctgtgtaatatgaacaaaacttcatacaacacaatatgcagtgctttgtgaattaatttcatttagcgtgaggttttgttgttcattgtgtcattgcatgtatgaataattcattcttttatgactgggtaatcttctattatatggatattccacatttagtttatccattcattcgttgatagacgtttggcttgtttccaccttttggctattacgaataatgctgctgtgaacatttatgattcatgtacatgttttcgtgtggatatatgtttttatttctttttatttttttattttttgagacggagtcttgctctgttgcccaggctggagtgccgtggcgcaatctaggctcacggcaagctccgcctcccgggttcacgccattctcctgcctcagcctccagagtagctgggactacaggagcctgccaccacatccggctaatttttttgtatttttagtagagacagggtttcaccgtgttagccaggatagtctccatcttctcacctcgtgatccacccgcctcggcctcccaaagtgctgggattacaggtgtgagccaccgtgccggcagtatatgtttttatgtcttttgggtatagtcctaaaagtggaattgctgtgtcgtgaggtaactccatctttaacattttggggaactgtcaaactgctttctgaagttgctacactatagagccataagagcaatgaaagagatgtccaatttctctgcatcctcatcaacacttgctattgcccgtctttatctcagtcatcttgttctgtttgcagtggtgtctcattgtaatttcgatttgcatttcctgaatcactaatgatgctgagcatcttttcatgaacttatcacctataggtgcatgaaattatgtgcttataggccaattaagaattggttctatatatctatataaataggtagatctagatatccaaattgttcttatttcaaagcaaaacacaaaccatacacatgcaggttctgttgagcctaatgctttccttcctaaaaaagatgagtttctttttttttttttttttaaatttccagcttttattttaagttcagggctctagtggtttgctgcacagaacatcccatcacccaggtattaagtccagcatccattagctattcttcctgatcctctccctcctccccgcccaccaccctctaacaggcctcagtgtgtgttgttttccccccatgtattctcatgatttagctcccacctataactgagaacatgtggcatttgtttgtctgttcctgcattaacttgctaaggataatggcctctagctccatccatgcccctgcgaagtacatgatctcattcctttttatggctgcgtagtattccatggtgtatatgtaccacattttctttatccagtctatcactgatggacacttaggttgattccatgtctttgctattgtgaatagtgctgcagtgaacgtatgtgtacgtgtgtctttaaaaaagaatgatttatattcctttgagtatatacctagtaataggattactgggtcaaatgatatttctatcttcaggtctttgaggaatcgccacactgtcttccacaatgattgaactattagataatttacactctcaccaacagtgtatcagcattctttcttctccacagtctcgcctccgtctgttattttttgactttttaatagtagccattctgacagatgggagatggtgtcccattgcagttttgaattacatttttctaatgatcagtgatgttgagcttcttttcatatgattgttggccgcatatatgtcttcttttgagaagttcctgtttatgtcctttgctcactttttaatggggttgtttgtttttttttcttgtaaatttgtttaagttcagatgcatagtttgcaaatattttctcctattctgtatgttgtctgtttattctgttgatagtttcttttgttgtgcagaagctttttaatttaattagatcccatttgtcagttgttgattttgttgcaattgcttttgtcatctttatcatggaatctttgcccatgcctgtgttctgaatggtattgcctaggttgtcttctatggtttttaaagttttgggttttacatttaagtctttaatccatcttgagttaatttttgtatatggtatcctttgtataaggaaccctttctataaggggtccttacacccctgcatatggctagccacttaccctagcactaattattgaatagggaatcctttccccattgcttgtttttgtaaggtttgtcaaagagtagatagctgtaggtgtgtgatcttatttctgtttttttattctcttccattggtctatatgtctgtttttgtaccagtaccatgcagttttggttaatgtagccctgtaatgtactttgaagtcgggtaatggtgatgcctccagctttgttctttttgcttaggattgccttggctatttgggttccttttttgttccatatgaattttaaaaatagatttttctagttctgtgaagtatcttaatggtagtttaataggaataccattgaatctataaattgctttgggcagtatggccattttaacaatattagttctttctatccatgagcatggaatgttttaacatttgtgtcatctctaatttttttgaggactgttttgtagttcttcttatagagatccttcatatccctagttacctgtattcctagatattttattctttttgtgagttgtgaatgggaataggttcctgatttggctcttgtcttgactgtcgatggcgtatagggatgttagtgatttttccacattgatgatttccctgattgaatgatcttggcaccctcgtcaaaaataaattgaccgtaagtgcgagggtttgtttctggactctgaattctattctactgatctgtatgtctatccctatgttagttccatgaagtcttgatcaatatggctttgtaataagtctcaaaatcaggaactctttttattttaaaattttatttctagtttttgggaaacaggttgtttttggttacatggataagctctttagtggtgatttctgagattgtggtgcactggtcacccgagcagtgtatactgtacccaatatgtagtcttttatccctcagttccctcttatccttccccctgagtccccaaagtctgttatatccttcttatgtcctggcatcttcatagcttagttctcacttacagatgagaacatactatatgtagttttccattcttgagttacttcatttagaataatggactccaactccatccaagttgctgcaaagaccattattttgttctgttttacagctgagtagtattccatggtgtgtatataccacattttctttatccactcgttggttgatgggcacttaggttggttccatatctttgcatttgtgaattatgctgccataagcatgcatatgtatgtctctctctctctctctctctctctctctctctctctctctccttctttctgacagagttttgctctgttgcccaggctggagtgcactggtgcaatctcggctcaccacaacctctgcctcccaggttcaagtgattctcctgcctcagcctcccaagtagctgggataacaggcatgcaccaccaaacatggctaattttgtatttttagtagagacagggtttctccatgttggtcaggctggtcttgaactcccgaggtcaggtgatccacccgccttggtctccaaaagtgctgggattacaggcgtgagccaccacgcccagcctgcatgtgtctttttcatataatgacttctcttcctttgggtagatacccattcatgggattgctggattgaatggtagttctacttttggttctttaaggaatcctcatactgttttccatcgtggttgtactagtttacattcccaccagcagtgtaatgtcttccttttattcaagactgttttggctattcttggtctcttgcaattccatgtgagttataggatcagcttgtcattttctacaaaaaggcagctgggattttgatagggattgcatgaatatgtaatcaatttggggagtgttgccatcttaacaatatgcatcttccagtccatgaacatgggatgtctttctcattcattcaggactttaattttcttatacaatggtctgtagttttctgagtacaagtcttgcacttcctttgttaaattgatgcctaagtattttattattcttcaggctgtggtaaatggaattattttcttcatttcattttggattgttcattgtatcatatagaaataccattgatgcctgcatattgtgtatcctgtaactctactgaattcaagtgtaagctgtaatttttctttatggattccttaggatttcctgaatacagatcatgccacctgagaagagaaatggttttatttcttcctttctaatctagatgcttttccttttctttcgttacctaaatgccctaactagaaactccagtacaacatcaagtagacatggtgagagcaaacatctttgttctactattgatcctaggaggaacacattaaatctttcactatgaagtatgatggcagctgtggtccactgagtgcttttgtgtaaaaatgactggcatttcaggccctttcttgggtgtccaaccaacctagttttcctggaattgagggatttcctaaaacctgaggcttatgccaaaactggaaggtttccagccaaccaagaagacctggtaatcctagagctttgtcatctttctgtgaggtgaaagtgtttacttatttatttcctaaaagtaaatcatcattagggcttctttgcagctcaaacacgcagtttctttgcatccctgagaatctgtttctccttaatgaaatgtcactagagatctgaagaggatgtgtcactgagagaattggctgaaaataccagttgccaattatgacatgttttctatttgaaaaatgctttgttttgaagttatttgtttgttatttgtaaccctgaagtggtatgggtggggaggactctgggtggtcttagagatggaatctcactctgttacccaggctggagtgcagtggcacaacctgggctcactgcaacatgtgcctcccaggttcaagtgattctcctggctcagcctcccaagtagctgggattacaaggttgtgccgttgcacccagctgatttttgtatttttggtagagacggggtttcaccatgttggccaggctggtcttgaactcctgacctcagtgatccacccatcttggcctcccaaagtgctaggattacaggtgtgagttaccgtgcccagctgagcccttgtttttaaaaggcagagtcaccaccatcaaatgacccatgctgcagggcagagctgcctgccaggtgagcatgagtggcccttggcatgccaccactgaatccttcaagcttggtgccacattcctaaagctttctttctaaagttatgtcttggatcacgggggttgggggtttatgctactacaaaggaagagatagttgagacaagcactccccacctccctaaaattctatgaatattcatacatacactccttctaattgccactcataggttcttgtcaaattgcccccaaatttattcttctaccaatacctattgggctccttttgtgtttcaggtatgctaggtacataccatcaaagcaggctggacaaagattcttgcccttatgaagcttgtgtgccccagttgggattttttcacgtaatttctttggtggcagtaatgcaaaatttccacctgatccattggaaaaaatagaatgtctacttgtaggtaaattctcctcttttctctctctgtattaatatttctacttctttttctttctctgtctcctccagagtgcctctggctctctaaatatgtatgaacacgtaccgtacacacacacacacacacacacacgtgcaagcatacatgtgtgatttcagcttaaaaattacttttgagaagcacatctaatacaaaagaggatgtctctaaaatagccgcctgtgagttgaaattcatcttcaattacatttttatttcattcagaaaaactcccatttgggcaaaattgtcttctatgaattatcaaaaatgaagaattttttggatgcaaataacatgaaatcatcactccttttttcgtttattcaactaatgttgatgaaacgtctattttttttcttaagcagtttgggggctgagggtacaagagaggggtagccagaaatccctgctgcttttgcgttgaggtgggagtttgggtgcgggactagatggcaagttagagatgtgaataccatgctgggtgctgggagtgagaagggctagggggcaaagcaatgctgtagagaggacagagcgtgacggggccaccccttagatgggtgaaagagaaggcttctccctggaacctcacagagacttgagtgaagtgaagaaggggcactgtgaatatttggggaggagctgtccaggtgaggggacagatagtgcaaaagcccagagtggaattagctgggtgcattggaggaagagcaacggtgagatggccatgtggctggagcagagtgagtgtgggaaaggggtgggggatgcatcagggacatgggcagagtcctcttcatgtggtccaggcaggccacatgtgtcccagattggagctgttcccagtatccactctccctttacttcttgaggaacagaactcctgatggttagctgagcgctcgaccacccagaataacgactgccctttccagcctcctttgcaactaggcttggcctggtaattgtgctctaaattttgctatataaaggcagttacatatattactagaggcaccagtagcttccaggaagtcaccttaaaggtaggggcattgcctacttcttaatggctggaatatgaatataatggcaggaccccagcagctgtactgaatcatgaggtggccctgggagtagaaacaaaaggaagaaaagagcctgagtctcttactccataaaatgccccaactgtccaagaacccaagagagaaatgaactgctctcttatttaagcctgtgctgtgtggggtcgtcctgtaactcaccactgaccctaagccgttttcataccccatagtaaggactttacagtttatttgaattcaatgggaagctgttgaagagtctggggccaaggagtgatatgacctggttcatttttttaaaggctcactctgtgtactataaggagactggactcctaggggctgagaagggacatagaaaggtctgttggggccattgcagtcatccaggtagaaggtaattatattagtcagggttctctagagaaacggaaccaataggaagacatatatattcaaatatatcatatatattcacatgcatatattgatatatatgaatgtatgctacttaacaatatgtctgtcttatgccatttgtattgctataaagaagtacctgaggctgggtaatttataaagacaagaaatctatttggttcatggatctgcaggctgtacaggaaatatggtgccagcatctggatctggggaggccctcaggctgcttccactcatggtggaaagtgaattggagcaggtgtgtatagatcacatagtgagagagaggaagtgagacttttcaacaaccagttcttgtgggaactaagggggagggctgactcactcccgtgagaatctcatcaagctatccatggggaatccaccctcaggatccaaacacctcctagcaggccccacctccaatactggggatgaaatttcgacatgagatttggcagggacaaacaaaccatgttgaaagcagagcgatgtcatacgtgtacatgtatgtgagtaggtttattataaggaattggctcatgcaattatggaggctgagaagtcccaagatctgcaaggtgagtcagtgatctgtaggcccaggagagccagtgttcctgtctgaaggctgtcaggcaggaaaaatgtcttactcagggaagtgtcagtcttttgttgtattcaggtcttcactgattgcacaaggcctacccatttaggaaggacaatgtgttttacttagtgtgttagcctgttctcacactgctaataaagatatacctgagactgggtatttataaaggaaagaggtttaattgactcacagttccacggggctggggaggcctcaggcaacttacaatcatggcagaagggggagcaaacatgtccttcttcacatggcggcaggaaggagaagtgtcgagtgaagttggggaaagcccctcataaaaccatcagatctcgtgagaacttactcactgtcacaagaacggcatggggaaccatgaccatgattcagttacctcccactgggtccttcccacaacacatggggattatgggaactacaattcaagatgagatttgggtgggaacacaaccaaatcatctcacttagtctactgattcaaaagttaatctcatcccaaaacatccagacacaacaaaataatgtttgaccaaatatctggacacctagtcaggttgacacataaaatcagccatccccataattactcagatgaaggaggaagggagggagatgatggacgcaatcacctttcaaatgcttttgacttcaggtatatagatttgatttgtagaaccttaacttttataaacagggagtctaatagttcacagctctgtagctactttgctttgattgttcaaggagtttgcctcatagcaccctatgcaggatccctcaggaagccagggccagggcaaagttgtgattttcatgtttctggtgagagaggaattacataaaggaaagaaatacctttttctaatttagttcagtgaggaagtgtgacatctggaagcaaagcacaagggaactgtccgaggtgggagggaagcagggtctcaggggccccaagtgctccagagaacatagccaggcatcctatttctgtcccatacttggctattctgtccattttttctaaaagatcttctctagcactcataaagcatataacaaagtagagaaatacaagagacaaatataaatcaaggccaaagaaaacagaagtggggttgagaccaggaggaaataattcaaacactgctaatcatccatgtttatcaacagtgaataaaatctaaaaatgcaactcccgaggcttcctggcagcatgagtgaaaagggaaacttgagcaaacacctgcttctccctgtctggaggagaaagaccagagatgtggtcgtggtgaaggtttcctgccatctaggtttgcaagatggcgcgggactttcacagagaacagaggtgctaacgctgcgatctgagaccccgggagtctgcgactccttcaatttctgccaaggccggctgctcctggaaatgcagtggcagcattcacaagggcgttctcccatggtgttttcttagcaaagctgaggacaggtcaacaaaggaggactcagaagagccgttttatttattgcccctactttgcgcagctcctcccctcctgcagctttttattggggtgttgcttcctctgaatggtgtcaggataacgatgctgtttgttttcccacattggcagagagcacaggaggaggcagcctggctggaagtgctgtctctgccttggctctggaaccaagggtgggttgttcaatctcccgggtcccactttcctcctggtagtagtggccgcaacctggtgggcttcctgtgagaattaagtgaggtgaaaggtaccaagtgctgaaaacagcacccagcacaaagatgcgctctgtgagtgctgcttcctcgtatcacggggttgctgttgttttccatttgtttttgttttcaaaagaatactgttattttgagctacctggagtcagacatttgcacatcaggtaatttaaaagctggatgctgtaatgatgtttctgtataaatgtaaagggtcgatgaagaagagaagcagatcttgccagggtggcttgagtctcttcacctccaggttacccagttggaatcaccattatctgcaaactgcgcagttagattgggccaaataaattgcatttatttggctcagaaagagacagacagaagagcagactgactttctcgcatgaagcccctaggtgtgtgagtcccccaaggagagtgactgagaagctgatgaccctgtacccttcccctctctgatccggccactcagtggagggaggggcattagatagggtgaagtctccctccctcacttcctttcttctctttcttcctctctttcttctttctgtttttccttcctttctttctctttcctttatttttttcttcttcccttctttaattctttttcttcctctctccttccttccctgccttcttttctttcttccttccttccttttctgtcttttccttctttctttgcttccctccttcttctctctctctttgccactccctcccccacctctctcttccttctcttccacaacagggtgtctaaattcaaaaccacagctttctctgggattccaccaagaatagaaggaggactcaggaagaaatggaactttcctgtccttcctagacaatttaaggggtttgtcaggagtcatttgtctttccgtgatttacactttacctgcagacattatgtgatctgtgcgtctgcagaacactgagaccggagctataggcttgaggaagaggtgagccattcatacaagttggagattgatgggtctgggtgagatccccacccttcacaccatcaccccctgttccacagacattatcaccaggtagcctgaaaaccagcttacttgaaacctgaaaacggatcacccaggtcaggggacaagtgcctcttccaacttccactacctaagagaatcactgcacaccccctctagagggaatgtgggcaaacctttcagtggggaaaccatcccggtttgggaaaatgttttctttatgatgattctaaatccctccccctgcagttcaaagacatgaactttataggaggaagagaaaacccttttgagatattacattttaagcccgcagaagcccaaagaagaaacaaccctaggattgaaatagagaggcctccattttcacaggggcactgggggacaccaagaggatgagcaggaataggtgaagggtcccagaccatggagggatcttcaggagggaagggatctctctgcagggttcagcatgcatgggtttgtgcctgaggagggtccctctggggctgccatctgtattgacaggatgcacagtgaagttgctttttacaggaagctgagtttcaaagctggcacatgggcctcaggagaatcatctaggtgttctcagctggaccagtgcaagagcctccacactgattttcctgtttcactggctgccgtaaactctgccctcaaccacagagatcctcttaaatcctgtcagtcattgtcacccctctgcttgacaccctccatggctcccatcttattcagattaaaagcccaaatcatctataaggcatgctatgtactctctcttcatacctccccaacccccaggcacctcccctgaccctcttcccttattccctcctttcctccacactgtcctccttgctgtcccttagacgctcaggcaagctcccacctcagggcctttgcacatccctgtccttgcctgcaaagtgctcccctcccacatctgcatggtttatagctctgcctcctttggagctttacttaaatgccacgtgcttagtgagggtgtccctgggtgccctacataaaattgcagccccctggcactctttacccccttcctgccttgtcaccatcctgtcacggtgtattttactatttatctttccctgctgcaagcaggtcatctctgtgtggttaggtgtcttgtcattgttgatctctgctttatcttgagcatctggagcaaagccaggcatgtagcaggagctcaccaaacatgtgtccaaggaatgatggaagaaatgaattacccttgaacacccttagggtttggatggtcggattctttctcaactccaggagaaatatttagcttgtgtttcggggccaggttgtatggaaaacgcacctttaaagactagaataagcaagcaatccaggaggctgactttgtaagaagccagggatcggagccccactgagtgggtgaaaacccagaccccgtgcctcagccttcagctgcaaatccctgggaaggatggcaggatccacaggctctggcacacgaacctaacctattctctgtctcctaaagagttgaatttgcatcaataaaacgcgtcgactccatgtatacccacctgcagaaacataatattaaaaccatgttattttattgtcttctcagttaggaggaaataaatgactctctgagcagcaatagctccccagaagggatgttttacacccagatactagagttaaaacagaaagcaagaagtagggggctctgcatgttaagtaggttcagcaaccgtaattagtgattttctagggttgaacaggacacttcctgctttcatgggaaaatcagtttgctgctgaccaacccgtacttctagagcactgagtaaccagcctctaattcggttgtaatgaaccgtgtattaatgttgcagccttctgcccgctctggagacctcacgccatgcctggccttgcagtgagtcttgtgcttgtcagttatgggggcaggactttcttgcaaagctgcttttgttttcccactaaaaatgtgcttatttctaccttaaatagagatgaatcccacaacttgcccaagataaatatgggagacgaaaatctcatttatatttaaggtcatgtgtagttttctatttctcgctctctcacacacatacacacacagagagacacacacttacatcttaaatgtctgcaaacattatactaaaaaacccattaagttaaatacagaattacagcatgtctgtttctctcttgaatacagcaggtcgggagcccacgtgtccaatttgaatatatttaaatgaagaagaagtatcgggttactttggggagaaaagttcagacctgtggcccaccaaactcagaccttcctgtcctcctggctgtcatcccgtcctatccctggcttaggtttgcagcccttctgtcctgccactttctcaccaacaggaccaagggaattcatggagggcgccccaggagacccccccggctccatcatccaaaatacccacaagtggcttctgttcgaatgcagtcagattgctaaattaagagggagcccaggccgggcacggtggctcatgcctgtaatctcagcagtttgggaggccgaggcaggtggatcacaaggtcaggagtttgagaccagcctgacgaacatggtgaaaccctgtctctactaaaaatacaaaaattagccaggtgtggtggcatgtgcctgtaatcccagctactcaggaggctgaggcaggagaattgcttgaacccgggaggtggaggttgcagtgagccgagatcatgccactgcactccagcctgggcaacagtgagactccgtctcaaaaaaaaaaaaaaaaaagaaaaagaaggagcccaaagaagcaaatattcccccttctcccagccaagggtaaggccagtgcagtcctgggcttctggtttctacttctgttcttgggacagagaaatgtcccaccccaccacacccacccgaggcctcccctccgtccacagcacatcacacacacatccccaaccatggactgggtttctctccagttctgcttgtagaatttcagacaccatgaatggaacacacggccccaccctgctcaggggccaggagtgtccttggtccccgggggttttgtgtcggcatcattgttccttctcagagtcccatccctgcattgagtcattcaatctgtggggagagacccctgtgagccattcgaggtttgaatcccctctggggctggagctgcacggccctgggcagagaggcccagggtggaacagtctccactttctggaagtttcacagggagtggagaagggaaaggagtggcctcaggctgtggctactcagaagaggtaggtttacaaagtctcctttgttgagaaagaaagattcctacatatgcacagcgggacactttaaatctttaatacctgcttatcctgctcaaaaattggtaagaacccacggattggactgctttctaaatttatgaactgtcaagcaaaaccaagctaagtgtattttatgtgttctaatgttagagtttgatttttcactaaaaatagcagtagcaaatactatgaagcagttatcagaagatgccatgaccacttttaaaattgtgtgtgtgtgtgtgtgtgtgtgtgtgtgtgtctagtgcatgtgcgcctgaacttcctaaagaaccagtacgtggcgtgatagttttaggagctaagtgtcttggccacacaggacacaggaatagggccttgaaccaaccatggggtcccctggtaagagcgtatgccttaaggtgagaccttggagagctccatgtgatacccaaaactaattgaggcacttatagtgggacgatgtctcatacccaggcaatatgtaggcctaaagaacatttaaaagaaaaaaatgcacaaaatttgaattgcgcacacaggcttccaagatatgtgaaggaaaccctgcccatatactcatgttaactgaatttgctttctgtgctctgctaaccaaaataggaagaatgctcaccctggtaccagtcacacaaatggtagtattatagcaaaccagtgtaaagtgcttgcatgtgccagaggccatgctagacactctactgcacatcaacacatccagtgctcccagcagcaagagaggtaatagtattccatcttacagatgagaaaatggtggttctgagcagcttcaggactagctcaaggtcacaaaagctcatgaagtagtggagcccaggactcacctactactcgctttgtcattgtacctgctttgctgtatgagtgtgttctcctgctgctaataaagacatacctgacactgagtaatttataaaggaaagaggtttaattgcctcacagttcctcatggctggggaggcctcacaatcatggtggaagagcaagggacgtcttacatggtggaagacaagagagagcatgtgcaggggaactctcctttataaaaccatcagatctggcaagacttattcactaccatgagaccagcatgggggaaactgcctccatgattcaattatctccacctggccccacccttgccatgtggggattattaccattcaaggtgagatttgggtggcgacacagccaaaccatgtcatttgcctttttgaggagtttctaagactttccacttgttatttggtatttgctatagtcacatgagaaaaaacagccacttctattccctgaccctgttctaaaatcagacaaacaccaagattattacttctgtttgtattctctgagggtgttttcattctgtgaaatcccttgatgacatacagcctcagacactgtgagtgtggcgtctagataaaactcagacacctaaacaacactttgtgtcttttcttgggggatcatgttggtgttactcatcaagtagatgccgttcaacagaaacctgattggcgctaatttaaagatagcggctaattagtctttatagcaggataaaactaatttgaagcatgctaatgagagtgaagttttatagcagggaaggcaaaatattaatttagaatccaggaggacgggtgatgaaggatgttttaatttttaaaattttaaatttaaattctgttaaattgcaggtagaatgacaatcactgtggtgggtttggaggttgtgcctgcattttgttccacaggtatttattgtttctgatctatgctgatgatttgcccagcaccagacaggcaacaataacgaaaccaacattgtgattgctcttgcagctctgtcatctaataggtctcatagtctaatagaagaatcaaatgcgaagtgagtaagtatacagtaacaatgttagattgataaaggacgacacacacacacacacacacacacacacacacacaccccaggataacagagagagaacaataggaggaatctagatttgattggagcgattctgtccaacagaatttagatgatgatagaaatatcctatgactttgcaatccacagggaagccatgagtcacatgtggacattgaacccctgaaatgtggctagtttgacttaggaaccgaatgcttaacgttatatagttttaattaatttgaacataaatgtcccctcgtgcctgctgataagggcacccccagttcctcagggaaccacttgtctcccatccttgctccttagagttgagaggaattgaccctacccatcattccgagacaggggatgtatctcagcctgaatcatcaggaagtgcaataacttgaccgtggtgaatggtgaagggaaaagtccatcagacactctcttcctggagtttgagttttgagcaaggctgttggaatgaatgaattttccatcacggaagctttagaccttaggagccgccttgatccctgtccatccacacctgcttctccaacttccccaccaattctccaggtgccctctagcctagctggagtgtaccagtgaggtcttttcctacatacatgagctaaagttgtttctatttgcttgcaagctgagactgtgtctcatagagtgtctccatgctgaccatatttctcattcactgactcaacacataggtcatgagctcctactatgtgcttagcattgcttaaggcattggacacccagaagtaagacagtgtttgtgtttatgaagctcatggtgcaggagttgggcaggggaaggcggatcatgctcgctgttagatcataatgcttgagtttgatgctcgttgctccgaggaactcacctactctgtgtgcctgagttccctggtctgtaacccagaggattggcctaggtggcccaagaatttctatctgtcttcaaagctgtgttgctacaaagcagagagattgtgggtggatgcaactgaaattctttggggtttatcaggaggggaaggatgggaggatacttgaaaggctctgaggacttgtgtgcagttttccacatgttggccagaagctccaaggatgtcttttcgtctatgtggggaatctcaaatttgcgggcaccaacgagatcagaagtgcctgcctgacccttgccatcacattagcctcagcaagaacagaccttttgaagtcaggacttccccatataacaaatgtctccattggtggtcttgaaatactttgtaattgggaaaagagtacacagtgattgctgggatcatgggcaacatcttgaactgttttcaagcgtttgaggctctacgaaaactgaaacatatttctccaaactcctctttcttttgattttttttttttttaatactgctgtgcctgtgggaggagatggagaccatgtgctttcaattcctgggctcttaactttccaaaatacacttcagtgaaggatgtttgatgtgtgttcatttctgaggacttggggccccgttgataagctttttcttctaaggattttcctcaagaagggaggctgctattccccattaggaaacaaatgtgaatcacagaaaggcttgcaactccaagactgtgccatttcagcaggcgtaaagcttgtggaattcattcatcagagcgggagtgcagatgagcagcctgctagagagagccaggaacaagcaggttgggggactcggagttcaggacaccctggatttctccaggagaggaagattctttttagatatcatcagccactcactgggcagctgctgtccccagtcagactccactttcttacttgtgaaatgaccaggttggtttggagagcatcagttgtggcctcagctcaaaagctctcctggtgcctttcccaaaggcaaaatataaaaacctcacaatagacagtgagcaaacggtgctggaaactccaagcaggagagtcagtatgatctggagatgggctgcagggggacgggtgcctcatcacccatgagttcttgcatcttgttagaaggtctctcagtagccagatatctgttatctaattacccattgtgagactgtgttaaaaggtagatgttttcatctcaagcgaagattcattaatggtgtgagttgctaaaaagctagctagtggttgcagctttcataggatgagagtcttgttcattctctgctttgggggactagaagtatctgccactacaggttgagtataccttatccaaaatgcctggcaccagacgtgtttcagattgcagatttttttcacattttggaatatctgcatgtaatatcagttgaacatcccaatgtgaaaatccaaaatcctaagtgctccaatgaggatttcctttgaacgtgacctttgaatatcatatcagtgctcaaaaagttttagattttggagaatttcagattttagacttttcaggttaggaatgctaaacccataaaatgcaaaacagtgcagtgttttatgaagtgagtctgcaaatcttgcaaaagacataggatttcctgaagttcatgaaagtgattttttggtgagctgctccaaccacaaagcctctgaaaatatggcaaagtgaacgtctagtgggcttccaccagctttcaaatgaagaagtgaaaataaaaagagcatgaattaaatatcaaaagatgaagagagggcctgagcaaaactgaggaaacattctaagcctttgccaggaaaaagaaaaaaagatggccttctttacgattgagctacaaaagtcaactataaatagattgatttactgacagtaccatcactccgttttgtaggaaaaagtcaagttgccattttttcactggaagtaacaattttttcactctattctaaaaatgagcacatggttttaattaaaacttatatattgttaaaaggcagatcaaatgcaattattttcataactgtcacttttcaaaagaaagtcccaatcaaagcctgctctgcccactccacttcaacgacttaacaatgacattttactttctgtttgaagtggattcttcctacttttcaatttccagggataatcactggaacatgaggccttcctgcacaatctatgtaaccggcttcagtaaggtgccagtgttgttccaggctttgacccaatcacagtaaagctaacagagtcagtgtgggtgcacccaccatgtgtcagccactctgccctgcacaggggagacggggagaataagatggggttcctggccaggtgcggtggctcatgcctgtaatcccagcactttgggaggctgagggggcggatcacgaggtcaagagttcgagaccaggctggccaacataatgaaacccagtctctactaaaaataaaaaaattagctgggcgtggtggcacatgcctgtagtcccagctactcaggaggctgaggcaagaaaataactcgaacccagaaggcggagggtgcagtgagccgagatcacatcactacactgcagcctgagcaacagagtgagactctgtctcgaaaaaaaaaaaaaaaaaagaagatggggtcccttacttcaagatttcatctcagcgtggtggggcagctggatatttgcatattccaataactacaacccaggagaatcttggtcagagaggaggaagcagcccttcctggaaggctctggtggtgcttcatggaggaggggacatcaaactctgccttgaagggaaagcaggagctaagttagattcctcatggctggaggatagggaatgaagtaactaaatcttaaaccagaaattgccgttaaaggttcaggatcccgcatctgacctgacccataaccacatttagggcactatgagttagaacaagttcgcaacattaaaacatcagattctctctctctctgttttcttcctccttctcctcctccttctcctctcttcctctcacccctccctctctccccctatctttctctctctctctctccccctcctcccctccccgcccccgcatcattctcactcagtcacacacacttagctaagctcgcagagtctttctgttggacgactgtctgtctcttgctcttccgtccctcgggggacccgtcgctcacacagggcacatggatgggccccatgctgggcgaagctccactcatttagattcgctgcctggaccctgcagacaaagtttctcatggagtccaagagaggggtccttttcttccaaagtggctccatccttctcactctccctttttctcctctgtccctaaatatttccattcagaagccatttcaaggctgtgtgtttacagacagagacccgggtggcagttgtggaaggaggtcaccttctgcctgcaccgagggggtctgcgggaccttcagtgagttccctccccatctgaagctaccatggcctgagggacacagtggtggtggcctctaaggggctcccactctgatgtgctgagggcttctgattcccactaatttgacaaagagccatgcccagcattctgagtgttgcactcagaaagggggctgggagggactgagtatccctggctcccatctggagagtccctcagctacaacccaggtttggacgtcagtagagagtgcgtcagccatctgcgggtaaggaggtgtccccagtgcttttcctggatcatttatgttgcgggtttcagatcaacccctctctgttccttaacaaccagtgatggagggacttggagaactggggcatcctgagttgaaacaagctccaggagggtttgaattgtgagaagtgagacacgacactgggggcaggaatctgtctggagccacactgtcgtaatcctctcttgactctgctcttgcttgattggctgatcaaagccaagttgtttggttccctttgccccgactgcaaaatggaacggtccaagtgctcatgatgtagaattgtaaaccaatgaaacacataggaatgctcaagtgcttgaacgtctagccagcttggtgtgagtactcagggaagctcttacccgttgctgctgttgtcattatcattatactattagatattattttacactattatactattactattattagttctattatagttctaatatgctattattgctattattagcatactttgactattaattaagtgactttactaatgtaagaattgtcctccccctacttctttcccgaccaaattcacatttctgaattctcttttcttagagccggaaagcatattatgtctggaaactaaaaatgcctcctcgcctctgattttagccgtggttgttggagtaccggttccagcaggagctgtgatttccattgagctctcaaaccaaataaaatgcaaatctccgaggatggctcctctccctgcccccacagttgtgctccgaatagtgtctgagtttcatttttacaaggggcctttaaaaactcctgggccccttgaaaactcccagccccctttgtccagatggggatggaggtggccaggctgccccgttgattgtgtgccgaggagccctccccgggaaggctgtgatttatacgcgcaggcttgtcacggggtgaaaggaagggccactttttcattttgatccaatgttaggtttgaaagccacccactgctgtaaactcagctggatccgcgggccgtgattaaacacattgcccgctttgttgccgagatggtgtttcggaaggcgctgtgaatgcacttccctttgcggggctcacacagacaagatgtgtgttgcaaggatgaggcgcctgctcggcctccagcccagggccgggaagggagaaggtgctgtgcgtcgctgcctgtgtcgcccgcggctctcctcccagcgacagactccagacctctatgctgtctgcttttccttttttacctcccctgtcccctacccggttttctagcctttgagggaactgttcagactgttggattcagactgttagtgccatttccccccagcgtggacaactgcacagtgcgaacttgctgactttccttagctgctcctgcagaatggggtttaaaacaatgcatcaccagagcatgcagccacccttaatgaccttctggctcctcagctggacgcggcttcttatagccccggatcacagaactctttgatggttctctggatctccggtggccatctgacctctcaggaaacagggcatggaaatggcccttgtctcccaccctgttcagtaagtttgaggcttgtgagatggaaacgtgccccagcctcacacaggcagcagggaagatagtgggagaacccttttggtgcccttgagtggtcaagccagttcctccttctgagtttcagaagcctcatctatgaaatttggggatggcactggaagtgttgtaagaccccttccagctttatttacttaattaatatgcatgtattaagtacgtcttatgtgctgcgtgcagagttacatactagggaaagagagtcctgagtcggaaagacagggtcctacatgacattcctgtggacagaggccaaaaataagcaagtgcttaagcaatcacgtgaattcagaaatgtgtgcagaagtaagtcacatgggtgacatgggagtgaggacctggggaagaacttggctttgatattcttgaagggctttctgcagaggtgatgactgagctggggccagaatgaaaagatggaaccagacttgggaagagcattctagaatgtgaaactagaacatgcaaaggccctgaggtaggtgaaaatgaagccctggaccagaaggaaaggcagccattgtgacaggggcttagggaaggaaaggaagttgttcaaggcaggagcttggaggggaaggccaggtctggatcactaggggttttgataagaggttgatcagtttccagaacacgtccagagatgtgtctgttcttgaagcacagtcctgaagtcacatttcttccagatgctaaatacttgagctctgtgttctgtgctcattatgcaaaatggtcaccttcaggagagaaaaatagcttttctggtgaggtgtttttggcagcttcacctaggtgacaatgctactctccaccccagagggttggaaaacaatagtgaggtgtgcatagtcaacagtcccatctgatgggctccagtttgggttaatgattccctggcacagtccaagggctctggcactgcccctagcaagcgcacagagaccaggagtccactggagtggccatttcccagtgattctagaccttccctgtccagtgcagtagccaagtgtacttgtgaacccttgaaatgaggctagtccaaactgcgatgagctgtaagtatgaaataccagattttgaaagcatagtatgaaaaaaagtaaaaaaaaaaaatcacatgaataatttacatagtgattacatgttcaaatgataatatttttgttttatttggtttaataaaatgttattaaaattaatttcttctgcttctgttttcctctgtaatgtggttactaggaaatatactattatatttagcccatatttgaggcttgcattctatttctattagacagtggcggctggtctagaccgtgctaactgctgtcagccggactttggagatgaaagaggtcagataataaaggacattatcagagctctggctttatacatggcaactttgcgtgaattagaaaaagctgatgcttctgcgcagaccaagaaggagacaataccccatcttccaggaagatctagccaccagccagggtgccccacttggcaaatggacatggggcatagttcatccccactagctaggagcttttatgaaggccacagtctgcatagcagcttgcagctcaggactaatttgtccccgctgctctgctttacagccggaagcaacgtccatttggtttgagtgtcagggaagccagatttgaagcaaggtagcgcagtggttatgactgccacctctgggaccaaacaaacatgcttgaatccagtctagctccgaaaaggtccagtcaatcttgggcactttacctacttaaactttctgggtcttcgtttctcccttcctaaagtagcgaagatgataagaaggtcctcctgggcttagtgaaagggttaattaatcgctccggttcctgacacatagtcatcactctggaaatgtttgctgttattacaatgatgaccatccttgatttagcaaaggagggtgggcatgaaggtgtaaggtatgcccagatgcccttgaagaagaaatttcacttctggccttggaggaacatccattggttggaaagcatcttgtctctccacaaggtatgaaatacagagcatgttttctgctcactgtttttaggtaactgttttatgttttttatctcacatccaagacaagcactgccagcccattccacaaagcgggagactgagagtcagggagtcctttctcaaggttggtgcagcagcttagaggaaggcacaccaaaggcacgaagagaggctttggggaactgaactcgcccctgagactctagagaattccctgagatcactagggatgacttagaaaaatactccagggatgtgctttgcaagctcctgttccctccaggttctatgggggcatttcagtgtcctgagaaggtgtgagtggatggtggttatttgctgattttacttattggaatactggtaagtctagtaaggcatttactttttatgacagtgacaaatatgataatgagatgaggatggtgataatgaagttgctggtaactcttgtttattaagccttcttaaattccagacactgtcttaagcactttacacagattatctcattcactttacacagattatctcattgatacttaaaatgatgagtttaatactattggactgagcattaaactcaatacaatgtttttttagaaactcattttattattaaaaactcattttattagtaaacattaatacaatgttcactatgaaaacatcgatacaatgtttactatgaaaacattgatgccaaatcagaggaagttctgtgatcattcccattttacagctgagaaaactgaggctttacaggttgcatatcttgttttggtgatgcagatgattcatgcttcagcattcatgcttaactagggctgtttaactgggtacagcaggaggtaacacaggcatttggcagagagtaaagacccaggcattgtaacccatcattacttccaattcatttgaataaaagactccacagttatcactcaaaatgattgcctgggtcatggtttttcttctcaagtttcagccttgggatggacatgtgtcctgttcagtggttgttctcacccaaaacctaaggctgccactgacaacgccttgaagctgtggcttgtttcatcgaggcgtgctgccatggaagcttcagtcctgttgtgcacacgttttggttcctcatttgttcctattttggagaccctcatatatgagcctaaattagtatatgcatcatgatatatctgccacagcgtttccctggctagaaatccatcccaaacattagtatgggtttaaaagcaagagttgggctctaggcccttgtttattgctgatggatcttgcatttcttgaaagtcttccctttttgcactaaatttttctgcctttccatatctgccagagtcctctgcacctgcttatcgtacaccatttcatggaacaaatccactgttgacttcctgggggcctgagcttagatgggcagatgccctggccagcaagccccctgccagtcttagggctcaggtgtgcagggagatccacaccttcctgcagtaagaatctggtacatgcacggggctgcctggtttcctctgagcaacagtcataggtgtgttagactattgcaggtgacctaaagatgccttaacatagcataagcataaccagaaaatgttcctgtatgggacaacatcctagcaagaaacagaatttacccagggtggtcaattgaaggatctattgactgagtcattggcagggttaaaggaacaaacaagacgtttcaaggtacccagggaccagcagcaaagcaaaggtgaagaggcaaggagagtagtgtttctagagcccagtgagagtggggcctcaggaaaggggtcaagcaggacggaggtagagatgcagagggaagtggccaccaccagaggcacagcaccaagaaaagggggaacttggaaaggcaccctgacctctctcctccaaccttctgatctcctaacttgactctaagccagtgtgagagggagtgcagatggtgcatctgtaagagtcatcttcccaaggctcagagaaaggcagtgtggatcgaggtggagtggggaggctcagtgaagaatttccagcacagctcctaaaactggcaaacagtttcccatttattcatagaattcaacttatcctgcacggcaccagaataatagcagctacccctgaggagctcactatgccccagacattgttctaaggactcatatactaactcatttaattctcagaaccaccctttgaggtaagtcttattactgcccttgtgccgatagaagtggtgaagcagggctttcaatccaggtgcctggctctagaatcatcgcaggtctaaccagcatgcacaggagcctcgtctaacatggatgggatgttagccgcatctaacatcctaacatagtaggatgggatttaaagggaaggggtttctgggggccaaggattgtgttctcatgtgaacagaaggtgcattggtgtgtggatagtgttgcctgacctacttaaaatctattttccctttttctcatagcagcacatggatttttctgggggaattatttctttttaattctctgtcaatgtaagtcaagtgcaactgacttccatcttggctccaggaaggcatatgacccacgcctgtccaatcaaagcatccatcttcctcaccaaagtgattggttccaagatgggcatgtaacataaatcagaccaatcagagccaacagactcatcttggggcttctgttggctctgttgagggagaagcatactctttgcattggaaatgttgaggcttccaactgctggaagtcatctttttgttgttgttgttatttatgtatgtatatgtgtatgtatgtatttattcatttttgagactaggccttactgttgcctaggctggaatgcagtggcacaatcgcagctcactgcagactcaacctcctgggcccaagcaatcctcctgtctcaacctcctgagtagctgaaactaaaggcacatgtcaccatgctgtgctaacatatttttaaaatttttttatagagacagggtcttgctgtgttgcccaggttggtctcaaactcttggcctcaggttatcctcacttctcagcctcccaaagcaccaggattacagacatgagccactgcacccagcctctttttgtcatgtaaacaactttattgaagtatgatttatgtactgtaaaattcacccattaagtgtacaattcagtgacatttagtcactttgcagagttgtgcagtcatcaccatgacttcagtcttacgatctgcatcaccccaataagatctcttatgcctctttagagttaatcttcagtgccatcctcagtccaggcaaccactaataaactttgcttctctcaattgctggctgccatcttgcccccatgaagggaggtcctgtctgagaatggagtaagtcagtctgagagatggagagaaaccaagtcctatgacattgagtccgtggagttagccattgctgaatcttagctttttacaacagctaccacaagatccttacctttaaaattatgtgcgtgtgtctgtgtgtgtgcgcatctgtgagttagtttcagtgaggttttctgcctcatgtaactggaagtattctgacttacatctacaaattataaatcataccctagagtgacatggacagagaaagacagagacagacagagtgactgaaagcacaagatgaaataaacgtaagagagagaacaaaagctacgttttccagtgacaaagctggatataatatatagaagtggtctttcttagctaaattggggatgtctttaccactactttgcacaataagcatttgaatgcttattaattactcatatcctgtctagttccaaaaagaagacttatcaagatgctgacaagatatattcctagattaagtaagttaacacaagaaaaatgaggccaaggggaaatgtgggctgagagagaagttggaactgaaagaaagctttgtaaacagaaagctgaacctgaggacttgtatacaacccccgagattgatgacagccaaattctaggctttatcgtaaccagagtgagagggaaacatgcttacgttctagaaacctggagtttgtacgtttaaaaccaagtaggtgctgaatttctctgttgagccactccatagtggaattcattagcagcaattttataggggctgatatgacacattcagaagcatccagtgctggatttcagttcaaagagcatgtgctttttgcccattacaaaggatattagaccagtcaggactgcttttggagacaagtaatggtgtgtcatgcaataaacacatataattgcctttaacagcacaagctatcggaggaggaactcaggcagggctcaacaacgtcctcaggaacccacattctttctatctctctgcttggtttaactcagctgttttgtcctcttcccacaggatcaaaaaatcatttctacctcttcaggcatcatactcttggtcaagaaaggaaggagtggagctggtcctctctgtcctttcttgtcaaggaaggaaaagctttccaccaaaacagatatccccctaattgtaattggccagaattggattgcctctaccttcaaggtagcctgagaaagagagaaagtgttcagagggaatgggattcctggctgacaggccaattatcattgccttgctgaattcaacaaaaccaagttcactttgcaggggagaaagagagaatgaatattgggtaagagctagtaatgtttgccaaaggaaaggtgatgattgggaccaattcctcgttggtggctcacctctcccatgcgtagcgtagtgggatgttcagtggaccgtggggcacagaaggtcagcaccaggcaccactgggtgatccaggaagatctcatgttgttgactgctaagccagatcttagaggatacgaaaggattcctttgggggatggggaaggaggtaggaagcactcagcagatagaggcatgagtgaacaccggtaggtctgaatttgttcagggttttggaggaagctcaagcagttcactgtgaaaacatcctaacacgagcatcagggagatgcaggggcaaggccagagatggccttgcgtgctgcacttcagcttagattccattcctgcagcagctgcctgcatcccctggcttcagtcaggcgagtagtgggatttaagacatgggccacccagcctggaccctggcttaagatcctgtgtctctcatgtaacctctgtgctttaactttctcctctattgaatggggataataagagtccctgctccatgctgtgtaagacacgatgaggaaatgcaggtggggcactgtggatgatgactggcccgggtggggaggggctcagcatgtgggaatgataacggtgacacacacagaggttgggggacatccgggagactattgcatagtttatgcgaaaaacaacgggactgaaactaggaccctccatggtggagtgtgtgttgtatatggaagaagtcaggtttcagaactgactgattactggtgtgagggaagaagaggtgtcaagatgagctcttggggtttgcgctttgttgtctgggcggagccattgctgctggcacccctcagactcaggctttccggtgcccctggagtgactacaagtcaatgaagttctcgggcacagtgagcactctgcagaggggtgtgggaaggagagccagcacctgccatttgcagacgtgtgccaggcagtgggtgggtttggctatttggcgcctgacagctactggctcttccacttggtgtcttttgcacctttatgccaagtgctgtgttaggctctgggcaccctgtggagtaagacacagtccctgtcctcctggccaggagggtaagacacacaggagcccaagacaaatgaccatacaacacccacagtgcagagataaggccagcctggccaagacagtgaaaccccatctctactaaaaatacaaaaattagccacgtgcggtggcaggtgcctgtgatcccagctacttaggaggctgaggaaggagaatcggtttgaacctggagggtggaggttgcagtgagccgagattgcgccactgcactccagcctgggcgacaaactccgtctgtctcaaaaaaaaaaaaaaaaaaaatgctgcaggatagagacagaaataaaagacagcaggggatgaaaaccattcccagcctcagcaccattcgctcttggccagattcttctttgatgggtgggtggggtggggggtatcctgtgtactatgcaatgttcagcagcgtccgtggcccctagccacagatgccagtagcatctccccagagttgccaccaaagatgcccttagatcttaccaaatgtcccctgtgggatggctggttgaaaagcaaccaggctgtcctggttgaaaagcactggggacagtgtgaccggggtgggcgggagctgttgtcacaggaaggccacgggagggctcctctgtcagcttctagggatgccgtgacaatgaccccgcactgggtggcatgaaacaaaagacatttctggaggccagaaatctgaaatccaggtgttggcagggtggcttcttcctagaggctgtgggggaatctcccggcttctggtggctccaggcagcacctggtctttcttagcttgtggctgcatctctcccttctctgccacctccttcagatgaagtttccctccgtgtctctcctctgtgtctgtgcatctcaaatatccctctcctttctttttataaggaaacaagccattagatttagggcccaccctaaatccaagatgatttcatctcgtgttcctgaactaattacatctgcaaagaccctgtttccaaataagatcaattcataagtgccaggagtttagcacttggacacagctctttgagggacataattcaacactatactccctaaggcatgaaacccaagggaagtgtgggaatgaggcacttgaagaagtgtgtgtgttgggagttggggatggtatgttccagggaaaagagacggatgcaaaggtgatggatttgaggcaagagcgagggtggcatatccagggtggccactgggtctggagtgtcagtagcagggcagatttagaaggtgactttgcatacctaggcaaggccagctcatgcgggatgtcggagcccatgggaagcaccttgcgtttgaggctgcctgcggtgggaagcttcagagtttcaagcggggctttgctatgggtttgttctgctttcccgttttcccctttggaggaggcttacagagatagtgatgactttgcagctgttaatcatcaggaagctgtaatcactaagaatgtttgaaatcatcagttaaggatttttagaaggaagtaaaccaaagaaatactgcagtagcctgccctaattatttcctgggcttaaagtaaccaggtgcattggagagattatttttcttcttctgatttatgaaggtctcagggtccaaattttgaaactgctgatcgaatttgttcttggatgttgtcatagaaatctgaaactttcctacttgtctgagagtgaaatttctttgattattcactcaagggtttgataggtttaaaaaaaggccttcgggacatctcttgttataaagtgtcaactttagatatcaagagaatcatgatatatttattactacaaaagagaaaataagcaactgaaaaactcatgaacttgaagcatgaagcaaaccccttaagttctaggggtttcaagatgtggatgccaacatgtgatgacatttaaaagatggatccaaatatgagattatttcgagcctcttggaattttgaaagctaaagagtgttgttacatgaatgaatgttattttacagatgaacaggtctagtaaagggtatgcatctcactttgtatttaggaacagaaaacttaaaagaagaagcagtctccttgccattccgctcataggtgtgtgccccgaagtgggcatgggatgtaaacctgtttttcctcacaggtctctgttctcctgagcttttcatagagtgggtttactgtgggaagataagcattgctgctatggcgtggacccccaaagcaggccagtgactgctgacatccagctctggaaacatccatctctctgatgctggagggagaaactggactccccttcagggagatgctggactcactgaactaagagatttttatgtcatcctttaccatgtgctttcttgattttttttttttttgagatggagtcttgctttgtcgcccaggctggagtgcagtggtgtgatctcagctcactgcaacctctgccttccaggttcaagcgattctcctgcctcagactcccaagtagctgggattacaggcatgcagcaccacgcccagttaatttttgtatttttagtagtgacagggtttcattatgttggtcaggctggtcttgaactcctgacctcgtgatctgcctgccttggcctcccaaagggttgggattataggcatgagccactgtgcctggcccgagaatctttttctatagatacttttgactctgtttttgcctcagcgggctcactacagaacctgcctaccacgtaggttgggattctattgcaccactgtcaggtggtgtttttcccattgtaggtaatgacccattagaaggagatgagacaaattcagcaggtatttaagagtcagactagcatggaatgaaatggaagtgaatacaacaggaagtatcagagtagaagagaaaacagtgctgtgtaatgagacttttattttggtgagatgaattcatatatgtgtatataggtgtgtgtcctgatggtgatgaaaatatttcaaaccgtgggacacaccccagcatgtttgtaaaccatccccgtcctctccgctgcccagctcctcattgttaggtcttaaagtaggaaaacacatggtgtgatttgggttggtgaatagtcgacttgtagatctgcggactcgtcaacattgctctgacatcagattttctgaagagcagtgtgggctccttccccagggctggccgagttttgaggggaactgcaggttctgatgtttccaactctgtatctctgccctcgtcatttccatggacaagttatttgtgctggtgtgagatccagaatcggtcctgctacgtgacaatgcctggagcacggagccaggaacccaagctgcctcaccagcgtgttagggttgttactgtgcccgttttagaagatcacttggaggtgcaaaaatagagcagtttttttttgtttttttttttttgacatggagtctcgctctgtcgcccaggctggagtgcagtggcgcaatctcggctcactgcaagctccgcctccccggttcacgccattctcctgccttagcctcccgagtagctgggactacaggagcctgccaccatgcccggctaatttttttgtattttttagtagagacggggtttgaccatgttagccaggatggtctcgatctcctgacttcatgatccgcccgcctcggcctcccaaagtgctgggattacaggcgtgagccaccacgcctggccaagagcagatttttttaaaaaaattaagtacctctattcatttgcaccttcactacccagtgaggagatcaaaatttcctagagcaaatgcattcgatgccactcacagatttcgacaggagagcacaatttcaggaacgcctacatcaaagcactaattggcacttttacagtgtctttctccgcacgtgagccttgctggtggaaggagctgtcatagtaatgcgtattcctccatgcccagtgagtagggtgacggtcaattcacagttcactaggcacaaaagatgacggggctctcctctgctcgggacagcaagaaggttgaggtgatacggtttgtcggtgtccccacccaaatctcatcttgaattatagttctcataatcccacgtatcgtgggagggacccagtgcccagggagaagtaattgaatcatgagggtggttacccccatgctgctgttcttgtgatagtgagttttcttgagatctgatgattttataaggagcttttcccccttttgcttgcatttctcctgcctgtcaccatgtaagacatgcctttgctcctctttcaccttcggccatgattgtgaggcctcctcagccatatggaactgtgagtccattcaacctcttttctttgtaaatggcccagtctttggtttgtctttattagcagcgtgagaacagactgatacatgaggatgccatgatggattggttgttcatcgcagccctgcatcccctaccatgcatggaccatgccatcagatggggttgggttatggttggtcagtgaaaggaaagataggggtcacatggtaggttgttggtgagaaaaagatattgatttcctgggtaatgttggtgcagattagctgagcagctgcctcctctgtctcccccatgttgttttggtcaatcagcccacacagtttggaggattctgcctggtttgtctcagctaggctttttacaacctattccagttgcctgggactgctataacaaatggcaacaaactgcatgacttaagacaacagggatttaattcctgtcagttctagaggcaacaaatctgagctgcacccactccagaggcgctagggaaggacccttccttgcctctcccatcttcaggtggctccaggtgttttggctggtggttgcattgctccagtctctgcctccatcttcacatgacctcctcctcttcctgcatcttttcttcctctggaaaaggacacctgtcattggattaagagtccattccaaatccagaatgctctcatctcaagatctcttccttaattacatctgtaaagacccctttcccaaggaaataacgccacatttgcatgttctggggcttgggcatggacatatgcttttagcgaccagcattcaacccactttaaacccaagaggagaaacatactcttctgtggtcagagtacagagttctgttcagtaatagtttgctaagacctcaccctgtgctatgagctggggatagtccgtgagtatgggtggagatagagacactagccgatcaagcacttgtcacagttctgccactgaagagccaaagaactttcagcaagagcttaatctctccatgcctcagtttccttatctgtaaaatctcctttcctcaaagcttctgctcacaagtcatcttttctgtaagatcttctctgatcaccgtattaaaacaacatgcactcctgtccttattttactacacagaaaggaagcttcagaaagatggtttgtctattctgtctattgttctggctcaggctcatagtaggtgagcaagagctgtgtgttgaaggaatgaatagtgttggagatgccctagggcatgtggccagatgtttgtgagaaataaatcagagaatccatgtagtaggagatcttgtgtaaatgccagtgcctgcccttccgcctcccatttcctgaattacttcttctgtaccagacctgtaatgccttggatgccactgagtcacagcaagaaatatgcaacaggatgttaaataataagggagcaagatgtattatttgagcatcccatcttttctaagacagagaaattggagggaagtacaatccattttcattattcacggtaggtatcttctataaagtctccataaacactaaattagcaaatactgaatcattgctctaaaggaaatataagccaggcatggtggctcacacctgtgatcctggtattttgggaggctgaggcaagaggatggctttgagtctaggacttgcaaacctgcctgggcaacacagcaagaccccatctctttaaaaaaaagagtgttttaagggaagtacagagctaggtccctacaagcctctggtcataacatattcatcaatggattaatgcataacctgattatatgcatttttctgtctaaagacacctgattagatacatattgttgactcattcacattgaactcatggccaactgcaccgtaactcatgcctgaaggaagctgattgaatgcaggtgttgtctctgtaaagcacagtgccgccttcttgcacttaggaacactagacagtgctttattcctacacttaggggatgtttgaaacagcaaaatcgccaaaagaaagcacagaagaccaaaaacatgaaattacaaggaccgcagaaaggccacttgcttatatgtagtatcgtggctgaagcaggacagtacaacgcgggcatatttgacctcaggtaggaacgtgctttgagccactcaaaactgtctctgcaccgccttattgggggaatgcccgtgaaagtaccaggggcactgatggactttagctagtaggtggatttgcaaatacagaatcccacaaatgatggggcttgactgtgaatccatctggtggagcagagtaggagagtgaagcttgtcccattcatttcccacagcctctcctgggaaactaaagttgtccatgccgaacacacgtggcaaccctgggagccggtcttcagggagaagcggctttctagaatcgaatctgagtgtttacagaggactcagtttagctagttgtggctgctcttttgaaagggcttaataataatataaccgaccagcaaacctatggacgtgagagaggaagcctgctcagtccttcctagggagtggctcctagggtctcctgcgggaatcgctgctctgaagatgccatcggaaggcacagtcactgggctgcagcagagtagagggagctgtcccagctgggaggctggccggggtttaataccctccacaaagagcagctttgagggggacggcatctggcggcttgaaagagtgccagtggcaagacacaaacttcagtggctcaaagagaagcacttctcggaagcttcccttgctttttgtcagcaatgaaaagcggtgggcagtctagcaacctcttaagaggaaaaggggagtttgcttttaagaggaagacaaccccgcaaaggggaaaccgtctcggatacactctgccctctcacctccttctctttgtcccgttgaagacccttcgcaacactcctcccccagggatgtccatttttggttttgttattcgcttttttttttttttaggtacacaaataatacattcatactttaatggcgaagctgattccccatggctcagccacccactgccgctctgtaatatttcagcctctccttaggcgaaagaagccattgttctgagcttggcacgagctcccggacccttcacgtattgtgtacatacagctttgtgctcacagaaaaatgcatttttttccctgagttttaaaaagttatataaatgctatcatactgacgtactgcacagactgccactgtaggaatattatttcctttgtgataaaaacacaaggtatttttaagatcccagacatcaaagatcgagatagcgctgactgatagaacttctgcaataatgggaatgtcccctgagcacttgaaccatggcgagtgtgaccaaagaactgaatttttaattttagttaattttaatatcaataaccacatgtggctaatggctcagtgttggatggtagcacagctctaggtcgttctttttattgtttttttatgatgggaaattttcaaacatctataaaaagagaggatcctattcctatgcacccaacctccagctttaataataatgattcagtaataagaatgtcaccattcttgtttctagagtcttcctttcaactctccgtggtattcttttacataaataaatacatgttttaacctttctcctattgacagaagaacagatattctaattttctgctaaaacacataaaagagtgatcctcttggtctatgtttctgagtgttatgtggtatgtatatctgagtatgtatgtgtatctgagtatgtgtgtgtttgtgctgtgtgtaccatatatgtatctgtgtatgtgtgcatatttgtgtgtgtgaatctgtgtatgtgggtgtgtgtgtatgtatgtgtgtgtgtacaggtctgtctctgtgtctgtatgtatctgtgagtgcgtctgtgtatctgtgtgtatgcatgtctgtgtgtgtgcacgtgagcatctgtatgtatgtgtatgagtctgtatgcatgtgcatctgtgtgtacatgtgtatacatgtgtgtgtatgcagttgtttaggtgtgtgcctgtatgtgtgtgcacctgtgcatgtgtgtcagtgtgtgcgcatgtgcacccctgtgtacatgtgtgtatgagcatatacacatgtctgtgtatttgtgctctgtgtatatacgtgcatgtctgtgtattcctctagggcaggaacttagaagtgggcaaggggtggatgcattttcagctttcgcaatggccaaccgcccgttggccaattcacttccacaagcagtgaaatcaacttcacgtggaaacacgctccgggtgctaaggagctcgcagccgtgctgagtcgacctgtcctcagggacggatgcttgagccgtttcccatggtgctcaggctctggcatccgactgggaatccctgggtgtcccgggattcagggcaagataaagcaggtcagattaatgacacaaagcccccctgttgtcctaatcatcttatcattcctaagttcaaacggaatttctctctccgcccccagggggtttctatttccccttccccagtccttgtctttgtagggcaggggaccatcggtgtttctggagcttgcttgaatgagtttttccaggcgagtactttcccataaagacaccattaatgcagtaaggaatcagaagcccagggagggaaaaggctaagccattttgcttacttaacggcttgcaaagttctgctctgcttccaggaatcctcgtagtgtagccactctcttactgagcagtccttccatatcaggatagttatggattatctacataacgacgctttttaaactgttaagagaactgcatctgtttagctggcctactgtggccctatggctaatgccaaagggtgcgttttagctaagctgcagagtttaaaaacaaaacaaaaacaaacagctccactaccaccaaagaaacccaaacaaacaaacaaacaaatcctacaaaacaaaaagaggtggtcaggttccagaaaaggggacaagggaagagtcaggtgggcaacccgtcgtcaatcattagaggagctgaagtctgaccttctccttcttgacagacaaaggagacaatttagagagtaaagtggatcaaataagtcactggtttgggaggtggtgagcatgggccacaggatgggaaaagatctgggggcgcaccctccctgcagaagaaaccgtgggttgtaggagctcccagggcaggggctctggaggggtggctcctccagcagttgtgccatccccagcctcgatgacaacggcaggcagggttgtaccatttggtttctatcagatgaagaagggtcaagaggttttaagaaccccatttaggggagggatctttgttttcatgttcaaggtctggcagcaaagtttccaggattcaaagcaaagcaagcccgtgatggtgggtcggatggctcttttatggcctttggtgaggccactgtgttggggactccattcctaggctccactaaagcttctggaagtcagagggttggatcagtcttgttcagttctgatttttacatgtatttctagaaactttttgttccacttcatcaggcctcatgcagtgagtgaatattctgtccgctccaaatccacctcccacagtggggcactaaaggctggcttagtgaggggactttaccttctactttcaagtaagtatccaccaaccctcccttcaaagatgcgcacactgagacataatgagcctcatgccaaatgccatgtaaatagagtccctgcaaaggcctctgccacgcaggacgtggtcctctccgggctcctaaagccttcacggccacctgtgatcttcacattcacgtctgtcaaagtccagcctcctgtcttggtgttcgtccctttgtctcaaaatattcgagaactttatgggatgtcatacccctttgcagattcggatggcaacagcgtgatgagaagagctcggctttggaatttacatgggtctgtgttgaaatcctgtgtgactggagacttggttatggtctcagcctccctcttcccatctgtggaatggaggcaaggagacctgctgcataggatcattgcaaatatttgagacataatcgccgagtcctcgcacagagcctgataggatcattgcaaatatttgagacataatcgccgagtcctcgcacagagcctgataggatcattgtaaagatttaagacataaacgccgagtcctcgcacagagcctgataggatcattgcaaagattcgagacataaacgccgagtcctcgcacagagcctgataggatcattgcaaagattcgagacataaacgtcaagtcctcgcacagagcctgatacatggcacatgatgatcacatttccttttgcccctaaaatgtttccgttttcaactgatgtgagggccgctataagagacctgagcccgtgggctttgtctgcagtatgtataaaatcatgactctgctttatacaggatacgttaaagatccattttagcatcctttaagtcattggaggagaacagggagtaaggaaatgagaaaccatctctgaagttaaaaagttaaagaggaaatgtcagaaattcaatttgggtataagtccttaactgaacctctgttgcataaaacacaacccatcaaaaataactagggaaggacatttgatctgcggctctgatttgccgcagccgcaagtgagagtcatacaccagtgacgtgggtgctgtctgctccatgagttgctggtggacagggcttgtatctcccaagccggctgcctactctgaacttggggtgaaggctacctcttgatcacagtgctcccacagagagctgggctatggcccctggaacagcccctcacgaagtatttggttctcgctggctcaaaggggttgctggtaggaccccctcacacttagacctagaagacacgcataatgaggctgtgtgttattcggaattttatgggcagaaagtgcctccccatcagaactctgaaagccactccttagccagatgtgttttcatcagaggtggccttttattcatttgctcctgcccacgtacccctctcagaatgttcatttatgacccatccagcagacctgacaggtgggcctctgaaagtggcaccgtttctctctttcgccaacatttaaccctctattttctagactgatggaagggccaacgcttgcctttgaaccacaggggagacaccctgattttccccctccaggggcacaggcacagaggtggctgtccctgcagaaacttccctccacattttccctttccgttgggcttccccaaatcctcatccctccttccacaaacccagaccctgcctggtctcatggttgtggagaattaactcaggggcaagaaggctggataaggagataagtgaggaaataagagaaataaaaatagaaatgccacagcagggatctcgtggcagtacccactctgggctgggattgttctacacgtgtgacaggcgttaagtcctcccatcttcttgataacactgtgaagtaggtttcattcttatcccccatcttttagatgaggacattgaggcagagaaaggggacacatttgctttacattcgctctgctagatcaggtcctgatgcgtagtagatgctcagtatttgttgagtgaatgaagatgtgattgataaaactggaaatgggaacagtgtggtggctcacacctgtgatcccagtaccttgggaggctgaggcgggagaatcccttgaagccaggagtttgagaccaacccgggcaacgtagtgagacccacatctctacaaaaaataaaaatacattaaaaaattaaccagacatggttgatgcacatctgtggtccctgctacttgggaagctaaagcagaaggattgcttgagcctaggagttcgaggctgcagtgagccgtgaatgtaccactgtactgcagcctgggtaacagagcaagactctgcctcaaaaaaaaaaaaaaaaaaaaagaaactaaaaactgggaatgggaatgcagtgggttgtgctgtgcaaagctctcagcaaagccccaattcgggaacccgcaggacaagtaagcatgtgtgcatgctgtcctgagctgagccttacctctagcagggatgctggcgtggaggttgccccagatctggggcttctgcaccaggaggtgtggatgcctctggttggctgtccacctggagcaccaggcttgggaaacctgtgcctgggagggaaccgcacacccagtgctttgccctgcaaggctttgagtaactgagttccattgtagactcctccggcaattctaaggaaccaaattgttctcaattcattatgatgaaaaacaaaaatcagctgggcacggtggctcacacctgtaatcctagcactttgggaggccgaggcgggtggatcacgaggtcaggagttcaagaccagcctggctgacacgatgaaaccccgtctctgctaaaaatacaaaaattagctgggcatggtggtgggggcctgtaatctcagctactgtggaggccgaggcaggagaatcacttgaacccaggaggcagaggttgcagtgcagagatcacaccattgcactccagcctgggcaacagagtgagaatctgtctaaaaagaaagacaaaaatcacggaggcaatttttgtgtgtggagacgtgggtgtttgtgcaggccagctgcccgtgcaggcgggagtcgccctgcctggctccaggaaccccagacccagcttgctcctgggcagccgtgcccggccgtcacctgtgcccttccccgccctctggtggcagagcttagaaatgtccactggctccttggccggcaggttcctgtatgggtctgacttagtcccaagaggccagggcttctatttcacccaggggatccctccacttccaagagcccgagcccaggaaaagcgtctgggccagtggcttcctcttctgggatccgtggtgtcagtgtggagagaggaagaggcttttcttgggctggcgtggccaacccagagaatacagggccaggcagggctggaatgccagggcggccaggtggggcctctggtgatccgaagacccaagggacggcccctccctgactccagccgatggctgccaggcagcgaatccagcctgctgttgccccaaatcttaacttttctaaagaaactaagaatctcagtttttatgtgctgtctctaattttaaagaagtggcatcttccctccctctcttcttccccttgtctcttctctcttccctctctccctgcctctctgtcattcttttaactgctgtgtgtgcaataaactgtctgagggccagtgaggccccctgggcctagagtttgagactgcttccctggagaaggtgtcgctgagtctgagctccgcagcctctgaccagcttggaccagcactgggctgggagcatgtgttccgggtgagagagggccccgcaggccctgccatcaccttgctgtgggggccaccccaaagaggtacaatcatcctccaaggaggcttgggccgtgtgctctgtgcagctgacgccggctggcttcactccttccctccacttccgggcgctgattttgtgttgtttatttcggttgccctagttttgatgcaataacggggaggatcttgtttccacttcttaacagagtgttggtttcacacgtagcttgaggaaaacagtggcagctggctaaacacataccagatactgaattcacaggaggctgctccaaaagaagtctgtgcgggcaacagaagaccgtgacagtttgtattttgccagactctgtggctaccttcacaccctgcaagagtccccctgggagagacaaagaccagagaccctggcgagatgcagaaatgagtccggggtacccagggggttggcagcctgagctccaagcggtgctaactcctttactttgttcctacttcattcattcattcattcattccatacttagtaagcacgcccaaattccagatactgatctgggcactggggacaaacaagataaagtccctctttcctgggctgcccagtctagtaggaaaagagagacactaagcaaagaaaacagcaaaaaacaaagatcattttggagatagcaggaggagccatgaagacagtgcagtggaggtggatggggacagacggggacagatagggatggggtgagagctgcttccgctgggacggtcaggaagtaggcttctgtcagagcacatcatctttctccagagagctcaacaccacccaacaccgcatgcctgcattctgttttctcccaccagaacataggtaccatgctagcaggaactctgctttattcacagccacccagaacagagcctggcacatagtaggtgctcagccaatgtgttgatcatggagggagcacttgcatcatgaaaagcctccatgaggatttggggaagagcatccaagaagaggacatggccagccctgtgcctctgagttggcataaacattccatgctggtctatgtggccaaaggcaggggcacactgagtagggggcattggatgaatccaggtagacacaggccaattaaggcccagccctcaccgcattaagaagcttagattttattcaaagagaagctgctgaagggttaagttttcttttctgttttgtattgtttcattgtgttttgtgtgtggcaaggtcttgttctgtcacccatgctgacgtgcagtggcgcaatcatagctcactaaagcattgaattcctgggctcaagcaatcttcccaccccagtctcctgagtatctgggctactggcatgccccaccatgccaagctaattttttcacggagatggggtcttgctcttttgcccaggctgatctcaaatgcatgggctcaagtgatcctcccactccagcctcccaaagcgctgggattacaggtgtgagccaccacacccggcaggttattcgttttctgggctactgtaatggagcgccacaactttcttggcttaaaaatattaagaattgattaccttatagttctggaggccagaagcccaccatgggcctcagcgggcagaaagcaaggtgctggcagggctatgttcctcctggcagctccggaggcaaatgcgtttccctgctttttccagcttctagaggtgcccatgtaccttggctcctggccccttccctattctgcagagctggcagctgtgggtgggtcctgctcactttgcatccctgcagcctcctctgccacctccctcctccacctctaagaaccccaggttacatggggagcacccagtcactctggatgatcctcctggcttactatcagccgactggccacctgcctccacctgtagccgcacctccgcctccctctccctgcaaacttacgtatgcacaagctccacggattaggatgaggccctctctaggagaggggacattattctgtctacagggttttagttcagacagggacagaatctgatttctgatgtataaagatccctctgtgctgaatggggaaatgggtcacagcctgggaagagcgaagccgggagcccaagaaaaggctgtggcgctgtccaggtgatctgcacaggtggcctggactgagtggtggccatggagagaagatacatggttgcttttagacacaggcagatacagggttgcttttagaatcagatcatcttctagcttcccaggcttttatgttgaagctgtaatttgaagagttgtgtgctgtcctcttggtgcattttatcagcttccagtgagtggaggctgatgccttaacgctgcggttctcaaagtggggttcctgggccagcaacatcagaactgccctgagaagttctttggaaatgcaaattctcaagccactctaatggagggactcctgcagtcaccctccctccaagtggtggccatacagtatgccacagtttgagaaccactacggtaggattggtgctaacacttaaatcctaactccactctggcggctggccagcaggatggccttggaggagtggcctgaaggccaggagaccctttctcatcatttttccgacaacttactcagcatcctttgcaggagttgagggcagacctcatgtgagaggctcactgtggtgggatggaagaggcgtccctgactccctcctttgcacgtgtatgttaagtgggcacatgtattcccctcaggaaaggtaccttcaatatccatcagctttccccgaggaccccagagcccagcaaaagattaagtagccctggtctgtgtgctagacacggtgagggaaccatcctagttagcatttaacgaacactttctgcatattggattctgttttaattgttttatatgcattgacatagttcatccttatgaactatccatcatgaaccagccttaggaggtaggtattgttagtatcattgtccccattccacagataggaaaactaaggcacgaagaatgaacctccttgctttaggtcacacagatgccaagtggcagaaacaggattcacaaaccttcagagcctgtgcattttgtccccacacagactttagaccaggggtctggcaaactagaacccttgggccaaacccctgccgtctgcttttatatggccttcgaactaagaatagtctttatattttttaatggtttcattttaaatggttacataaatacttacatagcatcctcaattttgcctcttgtcataaaatacctactatccactgatatctatgacctgaacctctaattaaaatttgcagtctcccccaccctctgctctctctgtctctgtctctctctctttctctctctctctctctctctctctctctctctcagagatgtgtggatgcaacacagacccttttctctatggagacagggagctccgtgctttgagataccctggtggggatttcaataagcctctgcagcagctcctggggggaggtgggttgtcactgccacttcattcatcaagaaaggcttgaaccggtggagccacttgcccaggcagccgagtttacaagtgaggaactgcaccttcatcgtgcctgatgcaaaagcatattcctccttctcaactgcctgcctggtttgaaagagcttatattccagtttctcaaataacatttgagtgtgagagagcctgaccccagaacgtcatggaggagcacagtgtggtttgaaagagcttctattccagtttctcaaataagatttgagtgtgagagagcctgaccccagaacgtcatgaaggagcaaagtgtgtagtccaggtgaaggatggggaggagacacagggagaaggaagggccagtgttggccaagggtatcaaagaagacttcctggaggaggtggggtagcaaagacaggcaaacaggtgatattcaaactttcttatacaaaaggatattatttcaggggtatccaatcttttggcttccctgggccacactggaagaagaagaattgtcttgggccacacataaaatacactaacactaatgatagctgatgagctaaaaaaaaaaaaaaaaatcacaaaaacatgtcttaatgtttttaaaatgtttacaaatttgtcttgggctgcattcaaagccatcctgggccacctgcggcctgcaggccgtgggttggagaagcttgattgatacgtttctctagctaaaagctgcatgatggtctctaacctgaggcatagatgtatcaaggtgcacaaacagtgcgaatctgctagttacagaaacctaaaaatgggtggttcaaacaaagttgggatatttttcttgcagaacaaaaagtcctgagagatgcctatcatggcatgcaacttgtcctaagcatcattgctttaaaatagtgctttattgacccctacttgttctaggaaatgacgatccacagtcaacctataacactgaacaatcttcctcttttgaaatatcctgaaattgccccccttgctcacttgcagctaatccagggccgtcaaatgtacatgaagaccaattggaaagtctctccccactttcagaattcccaacttcatgggacccttgccagtcagacacgtctcaggatttcctcttttactctataaaatagactctccttcctagaactcttgaatccttgctgaaaggaaatgacagacaacaggcttcaccaccacaagctcatgaattaacagcccttgtttattttgctgcagaatcaattttgtctttgatagcaccgtgtttggcaggaggttatattccaatttcagtgtttggcatatattaacataaatatatgtgcgtccaacatctcttagctttcttctgtgacaggaaggggttgctagatgctgggctgaaggaaaggagttttgtgtttggcagcctaggctggcatgatgcttcgaggtgccaagggggacccagttcctgctgttattccattcagttatcctcagcatgagcttcttgcctcatggtcacaaaaaggctgctccatctccagcatcagatcagcattgcaatcaggcaaaaaagaaagggcgaatgggcaaaggtacctgatgatgactcagccgtgctccttttaaggtgctatccttgaagctccacccaacaactcccttttgtagctcccggcctggatattggcacacagccatctttaagtgcatgcgaggctgagatacacacttctttaaagacggtgtattagtccgttttcacactgctgataaaggcacacccaagactgggtaatttacaaaagaaagcagtttaaggcactcacagttccatgaggctggggaggcctcacaatcgtgggggaaggtgaaaggcgtgtcttacatggcggcagacaaaagaagagagcttgtgcaaggaaactccacttttaaaaaccatcagatctcatgagacttactaccatgagaacaccacaggaaagacctacccccatgcttcaattatctcccgccaggtccccccaacaacatatggaaattcaagatgaaatttgggtggagacacagccaaaccacatcagacagccatatggcattccccaagaacatacggattccagacacaagaagaaaactgatcctgggaagccaacagcatcctctgctgggtactctctgggcttctttacaggcaggaaagggaacaaacttttgtaaggacttttaataacatggctaggcacaaaaagggggttgccagagatgtaaagcaagcacaacttgggttaacccatctgaactgctgggtactcacaaaggaaaaagtcctttccttcagcccaacatctagtgactccttcttgtcacagaagaaaactaagagatgttggatgctcgtatattcatgttaggtgcatcaccttttctcttctttgaagatagatatttaagaatagcaaagaacaagtagggaaaaaataagaaattctacctttaaagtgtgttgtgcacctgtcggaaaaccatacgagccatacacgggatagtatatatatctggtctcttttcagccagccaaatcgggtaatagcagctctgttgccaagggacactctcttaaagcagcatgttaattgcacagctaatgtgtgagtacactctcccttattttccaaaaaaaaaaaaaaatctagtaaagctaaaacacatgtgaccatcccaaagatctcatctcccttctactcctcttaggtaatcacttttgtaagtgtgatttactatttataatttttttctaaacatttatgtatatgtgtgagtacatatttacacacaaacacacatatagacatatatacaatcatagcgttgtgtttcagtttcttgttattgtaacataattattatattaaatttattaatattttatggtaataacagaatactaaatcatatttaattaaatatatagttcattcattttaatatattaaaattaatttaatagaatattaaactatactattatatataactactaatatcaatatagttgttttaacataattgttttagcataaatgatatgttccttatgtgataattgtgtaataatggtaactatctacataatatccactctcgcctccctccttacttacagaatactaaatttgttggaggtggcaatgtgcccagttaaaaacacagatgcttctctacttatgatggggtaacgtgctgataaatccattgtaaattgaaaatattctaagtttgaaaatacatttaatacacctaacctatgaaacatcgcagctcagcctagcctgccttaaacgtgttcagaacacttacattaacctacacctgggcaaaatcatcgaacacaaagcctgttttatgataaggtattgaatatctcatgtaatttgttgaacgctgttctgaaagtgaaaagcaaaatggttgcatgagtattcaaagcacagtttctactgaacgggcatcactttcacaccgtcataaagtagaaaaatcctacgttgcagtatcctaagttggggaccaactgcaatctcctgcctagacctccttgtggtgcaattatgagccaggatgggaagaatatataaactgatgttcactgagttaccggagtcaataaaaaaaaaggttaagtaaacagacttacctaatacagacattttgcccttaatttgtttctcctggaactcagatgcaatggctggatgggtagcagctttgtcgtggtcataggcatgaagccctttagtagagttggtggtacagaaagatacatggatgcggggtccttagtgagttcatggagccgttgaataagctctgggtagtgtttctctaaagttctgtgggggaaaaaactacaaagaaaacataattattacaaatacttgtggttatttgtttttacataattgacattgttctgtaacttagttttcacccaataacacttcttggagatctttctatgccagtacatgtagttctcctttccaactgcttcctaataatagtaaaaaaataataggtagttgtaagtgggagttgaacaatgagaacacatggtcacagggaggggaacatcacagactggggcctgtcgtgggggtgaggggcaggggaagagagagaattacaaatgctcgcatgcattagacaaatacctagtgcacgcggggcctaaaacctagatgacgggttgatgggtgcagcaaaccaccatggcacatgtatacctatataacaaacctgcacattctgcacatgtatctcagaacttaaagtaaaataataataataataataataggtaatgtttttgaggacctatcatgtgccaggcatgactgagcactttgtatttagtaagttgttgaatcttcaaaatggtcccaagaggagtgtgctattaagaagctcctatagatgggaacagaggcacagacaggctaagtgagcacccaccatcacagctaggaagtggccaggctgtgattggagcccggtgggctggcccggagctgccctctccacagagccctatcctctgtatctcttctctttctttcttcactgcattctctcctggggtttgctgtgttcaggcagtttactgtggatagcctcttctattatttccaatcaggcgcaaagctgcagtggacaccttagacatgtctgcctgtgcccaggagtgagagtgaccctaggttagccactgaccagggagcatcttaggtcagcggatggcactcagaggcttcagtgccttccaatcaggtgcccccaccatacatcagcagctgtgacccctggcagctactccccacagcctcactggccccagggtgggggagccttctagtagttgggctcaggacatctctctgccactcccccacgggtagaaggtggtttctcccccttcctccagcatactgtgtctccacctgtgcccaggggccatagggtttgcttaacctgaaggctttggtcccacagaggggagagaaaggtctggttagggcttcgccgtgtgtcttctaacatggtccattctgtctcccttgtgagtgcctttttttgtggtttgtgagtttgcaaaggaaggtgcatctttctggagcaattgcaacggtcaggggccttcagcacccagctgcagcagtgtagcaaggcaggcagcagtgaaaggtcatacgagggggtctatattccatagagaaacttacaaaccaccataaagcagagcaaaagtgggtctgctttttgctcttactgtgggtttgcaatttgaaataacaagttggtccccatggaggtggattgcactcgcccctccccttgggacattgcctcctccaaggcctgggtcccaatgcttttctcttcttcttctcttctgcgttccaaccttgcactcctgcagcgtggagtcctcctgcttctctcctcacatggccaccttctgcttctaaacaatgattagggtgcaagtctgccctcacctgtcatgtcatacgcccatgctgtcttcttcccatctgagcccttccctattgcgactggccacctcccctctgctcagcctcccacgagtttgataaacacagtttaattgtctgtgtgctccctacagaagcaaggcagcatggggtacagacaagcctcttagttaatgttgatggagggaagaccattccttatcctatccctctgttgatttttttcccccgattaacgttaagaccgagatggatgtcttgctggtgcaatattaaataagaaccacgataagctcagaggcctcatccatcagagcggatgctgagcatcagtcagttaagaatgacaagaaggcatctcagcctggctcaagccatggaggagaaaagtacaggggcctccagcttcaggcactgctggattcaggggctccatctcctgacctttctttccacgatgctagctgtacatacgtgcaagctggcattcagcatctctagactgacctgggcatcagccagtgatagttctgcaacctttgtgtctaccaaggactgacactctctctccgcagggaaaaatggagctggagtgagttacggatttgaaataaagcctgggtccttttgtagttcataagggtgaacctttgtagttcataaggttttcatcctcatgtgtgagacatgtctccctcagaccttgttatgatgttggcacgttgcccgtctgatgtgaaaaataagaaatgaataaaattttaaaaaatacataacataaagcctgtgctctgagacaggatagcgcagaaatgggcacagggatcctgagttcaaattctgatttcagaattcttagctgtgtgaccttggctgaattactcaatctctctgggcctcaatctctttatgtgaaaattagggataataaagatacttcacgcatagggatgttgaaagtacaaagaagtcgatatatgatatgcagcacccggaccaacagggtgttgagtgatggttttactgttgtcctcctcctgtcttgataatccaggtgtcacaaggataaaagatttcaccttccacttaacggatatttttccccactgacttttcagaattctcccttataattccccattccctcttggaaagctcagtttaaatgtccttttcacacgttaaaggctttaaaatgaaagagaaaattgcttttatcttctggtgtattcttttctctttttgtttactcaaccatcaggaaagcattttctactttgtcccctaagacttgtcattaatataatcattctaaatgctggtataaccaaacaaaactacagatgctaactagcaagcagatgaaactcacatgtgggggaaaaatgcggaagactctttggtacacacaagtttttaaaaattatctgtaattagtgggaaagaaaatatgtggactatattaaaaataagctctttatttttgaggaaaaaggccatcataaagaacaggaatggtgtcctttttatttatatgaattgagataattgggactctcagggttaatgtaagtttccatcataaataataccaccatctgtgataaatggatgcctctctctttcaatagatacagcgaaacattctcaaaccatatgctatgtgagcagcaaatgcacatatttaaattctgctgtaaatgcttgtattatacaactctaaatccctccagatttttttttctttttggtttccatttccaaactgttttggaggcacagtaaaaaccatgtttacattttcaatcaaagaggtaaacctggtctataaatcagattgtaaaatgcactgaagaaacactaagaaagttctcctatgcatgaaacatgactcggaaagacttcctctctatcaggggtccgcacactatggcctgtgggtcaaacacagcccaccaccagtttctgtgtggtggcctgaaaactaagactttttttttttatgtttgtatgtctttagatagttggaaaagtgttgtttaatagagaggcagtgtttttgacatgtgaaattcaaattctagtgtttaaaagtaaagttttattagaacacagaaagagtcatttgtttacatttgtctctggctgcgtcacaggagggttgaggagttgcaatggagaccatttggcccacgaaggctgaactatctactgcctgggcctttacggaaaatagtatgctgactccttctttatatgacttgcaaagcagagttaccacagtttggatcaagaaaggtgtgtcctcttagaagcttttggctgatagtgagagaaaaccctcgcgcactgaggaagtccactggctcacatggctggaagggcagcggcaaggtgagatccaggcgagcttctcccgggcccctcactgggccaacccctgggataaaagcacagccccttccctcactgtgcccacccgtggctgagcttgtctctgggcactcatgcatagattccagatggataacagtatttatggggagactggctcactcattggcccctggggtgaaaggcgtttgcttaagagtgagggaccttctttcccagaagtcctaacacacttctcctcataggtccttggcccagtttggccaggggcagggctttcccagcccagcacagtgatctttggggctggataattctgtgggcgggctgttctgcacagtgtaggatgttgaacagcatccctggcctctgactgcccgctagatgctaacaggatgccccccaaccccattcttttgtttttttttttttttgtttgcagggtggggatggagtctcgctctgttgcccaggctggagtgcactggcacaatctcggctcattgcaccctctgcttcccgggttcaagcgattctctttactcagcctcctgagtagctgggcttacaggcacgcaccaccatacctggctaatttttgcatttttttgtggagatggggtttcaccatgttggccaggctggtctcaaactcctgacctcaagggatccaccgccttagcctcccaaagtgctgatattacaggcttaagccaccgcacctgcctgccccccagccccattcttgacaacagaaaaaatctccagacattgtaaaatgtacccttgggagcaaaactgcctctgagaatcacgggtttaggcctatgtgtaactgaaccaggtaatgggaatgagcttggaattgccctgtttgatttagaccagggaatggcaaactacagaccatgggtcaaatccagcctgtcacctgttttggtacaggctgcaagctaaatacggtatttacatttttaaagattatgtaagtacctatatagaatgttgatttttgtcttctagcctgcaaaaacctaagacatttactatatggtcctttaagaaaaagtttgccaacccctggattaacaccaatcattctcaaccctcacctttatgagccatgaaacgaaatctctgatttgataaccttcatatgtacataattaaaaacaaatcagtatagtgctctgtcataggcaggagaaacaattcaaagtcaagtaatattttaacagatatatctagaaggccgaatgaagtagtcagatacttgctcctgtatttagagtcaccatgggtgtgtcagccacagacgcagactggtatagctatgttggagcaagttgcatttcacatgcagattggacattgtgatgtaattttcggaaaggatcaacgactttttagataagtttcatcaaagtctgatctccaccccagtagttgcaattctggaacacatacagtatgtggaatcattgcccttctcccagttatttagtggatgtttaagatcggctctttgcttggatcactgtaagtgggttcctcacctctgtgaatgtccagtggggcagcgtcatgcagaatctgggcaattctttgtggttgtagaacagtctcgtgctgtgcagaaaacctagcagaactggctgtgatctctacatgccagtggtgttcctccctctagtcattgtgataatcaaaatgccaccctccccatagatgtttacatccctatcgccagaggctgcaaatatgtgacctgcatggggaaaggaactttgcagatgtgattaaggtaaggctcttgagatggggggactatcctggatcatccaggtggccctgatgtcatcacaggggtccctgtagagggagacaggaagtcaggggcgagagaagctgccgagatattggcttagaagagagagactccaagccgaggactgcaggtgacctccagaaaatggaaaagggaacagattcttccctgaagcctccagaaggatcacaaccctactgacacttcagggtttttttgtttgtttgttttagcttttattttaagttcatgggtatatgtgagggatgtgcaggtttgttacataggtagccatgagtcatgtgggtttgttttatagattagttcatcacccaggtattaagcccagtatccattagtaacttttcctgatcctctccctccttccaccctccatcctccgttaggccccagtgtgtgttgtttccctagtgacactttgattttagacttctgacctccaggactatataaaaagaaaaaatacatatgtgttgttttaaatggctaagtttgtagtaattcgttccagcagcgtaggaaactgacacaccgtcccttagaggagcacctgtcctgggagagccccagcctgagccaatcagaacccacctgcagacggacctcggttccaagccacattgtgggtggtcagcgggggagggcaggtggaggatgtggaggaatcggccacgtggccaccaggcaagccattggctgagcttaacttgcggaaacactgacaccatgcagttaaagcagcccatgttagacttgtaacttcgcctggtaaatatttccctctgtgcctacctagggcacccttcttgtgctgatgaagtccaagactctgaagattttagagcattcgtctttgaaaggcacagttcctttgctgtacttctaggagtctgactgagtagcatctgagagtgattatggagcgctcccagagaaaaggggggaactatccccccaggggctcagaggggaatataagtacctgctcttttaaaggagagcttgacggttacgaaattgcaaaccgcgctatgtaatttcagcaaaggatattcaggctttgttcagaagaggcattgaaatcaaataatccatttatcaaggtgccttttgtttcaataaaaaggaaacaatgagccatatttagcagagagagagacattctgtgtctggggaatgttaataaatcaccaatggagagaggaaaaaatattcaggcttgcttgtgtttcaagtaagctgcagtgacttggaaggaaaatccagtcagggctctccttgaggcatatggagaaaggcaagtcctgttttgcaggtgtctgatatcatatgagtaaaccagagatgtctgatgcaggagacacctccaaagtcctgaaaagagcccacttcccttaatttcagatttttctttctcacgtagacatcacccaatttttttttcgcatgtggatatcacccttacccccaacatttctgtagttttaaaagcttgttactataactgatgaacacatttgaaataatggtaatgattatgataatagcaacaacaattcccaattgttaagcatgctgagtgcttagtttattgctttaagtgaggcggtcttatgtgattcccatcatcgacatgagaattctgaggctcaagagtttaaggtattttccaaaagacaaaaacaaaacaaaacaaaatcctcatctaggaagttgtgggacaaggattcattgttgaacttcgtgtcactccatgaactcctaaccactgtgatacatttcttctttctgggctggagaaggctttgattaaagtccttcccctgtttcttcctatgtatgtaatatctgacaaactacctcaggctttctatgtggatcaagttagatcagggtttgtcaacctcagtgctattgacattgtaggctggataattatttgtggtgggggcactgtcttgtgcattgtaagatgtttagaaccatccctggctcctaccgactagatgtcaataacagccccctcccagttgtgacaaccaaaaaatgtctgcagacgtcaccaagtgtttctcaagaaaatcacccttaaccctgacttagatgctgttcttgaaagccccttgcacaccctaaaacaattccacttgtgcctgtggattatttcaggggatgttatttttatttttatccaattcaagagggaagcaggacctagtaaaaatactatatttgtgggcatatttgtatatttgtgggcatccactgcctaccccatttagaataacccctggcttcatcccatctgcctggatagacttcccactcctcacatgctgggattctgagctttccctccccaatcttttggttatgttgttcttcatcctagaattcttgctgtaccccattcaatctccgcaggtcctacccatcctttatgtcccagcttagagaacatcaactgtaaagaatctatctctggtcaacatgtctgaaagtgagcgttgtgatgaaggcagggcatcacgttagtgggaaggctcattctcccagtgttatcctgtctgggcactgagtgacgtggccttgccatattccattcaacctcctcaggccctaaccatcctttatgtcccagcccagagaacatcagctctaaagaatccatccctggtcaacacgtctgaaagtgagcattgcgatgaaagcagtgcatcgtgttagtggaaaggctcgttctcccagtgttatcctgtctgggcactgagtgacgtggccatctccggtgtccaccatctcagaatctgaaaaactcaatttctgactgcagctttgtggtagagttctccgatgaacaaccggtggaggacacaatatccccaacactgacaggcaggtacagataaagaaaatggataaacaggaagggagacagcaatgaacgtgctgtccacatggaggccagataggcaggtgcagctgtcacctgctctccaggctgtctcccgtggccgtaggaaaccagcattggacttttccaggggtattgtttcaggtcaataaaaatgactcaattatcctatctttctgggagatgttggtgcaagcagatgaactggagtaagaggaaagacatttgtcagaactcgcaatgccatggcagccctggaattgtttccttgcagtcaggagataacgtttccgggagaaaacacacggcaaaggctggcaaccacttatgattccttaatctgctacctctgggcttcccaagatgagaggtaagtttagggagcgtacagggtgctgcagcctgtgtgggtgcagatggaccctgcacaggttcgtcgaggagtcgttcatgtgggcacctctgtggttggctgttggaggttcctggacatggcgcaaaatcgcctgttcaaccatatgagaaagtgggaatttcctgcttaattatttgaattattctgagtctatctaagagaaaatctcattttgcagccgctgtatcttcagcaaccaacacttgataatctccctgcttaacaaagaaatggcaaactatggctcagagctatagacaggcagcaaataggggatgtgaccttggttttttatttacagtgagattatttaaacagaactattcatttatattagtacattatttattacaattttaatttatgaagttatcaattattagtaagctcctggactgattaacagtgcatacattatctggttcatgtcatgagattgagggaggtgtgaagcttaggaaacaccaccctcagttgaaagctctgtgtacagagagctgcactaggcagtcttgggcatgtatgtactcaagaagttcttgataaattctcagcagcccccatggacaggtgctagtgcattattttactggggaaaggaatgattgttcttgtctgctgcaacaattgttagtttacttctgggtgaccatatgctctaaaagtatgcaaatgtgaggcaaagaaggtacttacatgaaggtgaagtttccttaacacctctgatgcactgacactgaatggctgcagagggttgccatcccctggtactggatgtcagaatgtccatggacattggctccaattcttcctaccacacgtgagaagttctgccttccagcaaatggtgtctacattttccctcattgtacaccttactgctgtgtgaagtggcttcgtcccccatctggcttgcttcatgtttgggctattggtcaaacttgatgcattcctcaagtgttgaatgagtcgtcactgagtcacatggtattcaagacagaagggtaccctgctggataaacacactatcctttttcccatggagcttccagtctgttagggaagatggtcattaaccaaacatgcacacaaacaaatataaaattacagctgtgtgaaaagatataaaaaagaggtgcatggtgttttgggaggggcactggacctagtgtggaagtcagggaggcttcctattaatagaagaggtgaggtggatctgggaaccgaatggaaattaattaggctgaaggagtggccatgtgtgagaccctggagatatgaaggagcaagatgtatttaaacttcgataataaatttaaaactctggaacaaggatgtactaagatataattaagatataaccctacttgcacccttattacgagtcaggcacttgctgaacactttgtaggcatcatctcaatgaacgctcatgcacttgggaggcagggagtagagcaaggtgagccctgttgccaagtggaccagaacatctagaaccacacagccaggcatgagtttcagctacatcacttacaaccaggagatcttgggcaacattacttaccttccctattcctcaatttccccttctataaaaagtgagcatcatgataccccataagattgttgtgaagagctaattgacattccacatggaaagcatttaaaaacacacctagaacatggtgatatggtttggccatgtccccacccaaatctcatctcgaattgtatctcccgtaatccccacatatcatgggaggaaactggtgggaggtaattgaatcatcagggcaggtttttgtgctgttctcatgatagtgaataagtctcacaagatctaatggttttataaagggcacttcccctgcacacacactcttgcctgccaccatgtaagatgtgcctttgcttctcctttaccttccaccatgattgtgaggcctccccagccatgtggaactgagaatccattaaacctctttttcttttataaattacccagtctcgggtatttcttcatagcagtatgaaagtggactaatcatacggtcaattcttgatgactgctggctgctctgtgagggattgtttcatgatgaaacaccctgaaatgtagaggcttgatcatgttcaaggcctcctgagtctcaggacttctgatcttggctggacttgctcacttgtttggggctgggcatgggctgcctgatgcaggatggcctcagctgggatcgcaccgctcgcctccacatggtctcttctccaggttggcccaggcttgttcttcttcctactatcaggtgtccaaaagaggcagagtggaaatgtgcaaggccccttgagacctgcgcccagaagaggcacgctgtcacttcttccatattttcttggccaaagcaaatcacaaggcagcccagattcaaagagtggggaaactgactccacctcttgatgggagaactgcaaagtcttatgcaaaggttgtagataagcgtgtagatacaggagatggggtgccattttttaattgctcttctattgttattatgctacatatctagatcaacaggtctcaatctctctttctctgtctctgtctctctctcctctttatggaaagtgaagctcccttagccactatacaaggccttgctcctttctttatggtctgtctcttcttaactcaagtcaaatctctcaggagctggaagaattcagaatgaggctcaacaggaagggatgagctaggcttcacttcacttcatcccttctcacttttcctcatgtgaaggataaagagtgacctgttcaaagaatggaagaaccctaagacaggaggtgagaccacaagcccactccatctgtattttatagaaaataaactcagcatttgcttaaaagcaaacgggtttcctttagacttttttccagttaagaaaaggagagaaaaggaatctttatgtctaggaagaatgaagaatgaatgacaagacagcttgttgacaaatacttcctgttggtgaatgctcccactgcagatgggcctggaatcctgtgccccgccccttcacagagcccttggctcacaaccttctccaagcagatgagtctctaagtccctacacttcaagatttaagagtatttttttggattgggataaatacctcaaaataaaagcatcagatgtggcttttggtttttacaaaatattacaagttgcctaaatagtccgtgtttaaggacatagagccagagctctttctggaatgtcatacctcggcagggccttttgtgcatgttttaagctgattctgaaattagggggttaaaatggaagcgccgagccatccctaaagagagggaggcgaatgtgcccttgttgctggtgaccccagaacaaggcctctgggctgagaacaggagagaatgttatttctttgaaaagccatcttgacaatccaagtccgtttggctgcagcaccaaaggcagctttgatctgctcgccagtgtccctgccgggaaaaggattagggtccttccagaggacagcagagccaggctgccccatatgctggcgggttgcacaggctgcactgagaggaagggacagcagggaaggctggaaagaaggagagagagcaactcccgtctcctctctcaatatacgaatgcaggcttgtttgggttttctgggggttttaaaaaacagaagcaaggagatgggctttcttgggttttcaaagttagcaattgcggcagttgaagtgtctgggtcatgagtgtgtagcaagttcttagccgtgccctcatgtagcataagctcatgggggatcttagcaaagaaaatattcaaatagcaaggaggttgcttgtggtccttctgttgatgtcagggatggttcaaataaccctggaagcaaggggtgacatgctgcactttcctaccttggagttgagcctgtgagcccccagtattcagcaacttagccagctgaatcttgtaaatcaggaatctcaaactcaaaagcacctgacagacaagcaggccggtccatggcgcacagcgggctcagtgtaggatgacagcaacactggggctgtaagtcacctcctcccatcatcaccatggggggagaaatcccaaatgtttccagttcctcccatcttcaaagacaagctggaaacccagagactccccagttttaaaaaattgagtttcactttataaagatttttttaaaaaacactgtgggccaagcaaaacctacctgcaggctgggtggagccccagagtgagcagtctgcgatgtcgggtctcaacagatgcagagcccagaggcatgtagtttacaccccaatcagtatcgccactcggtgtgctgaatctcagtagggggccagagggacccgagccttggaactgggctcccacccagtggagagagggtggcatgcttattcattctgctaactcattttacctggaagagttaataatgaacactttctccccggctaagaaagaagacgatgatgacaagatagtgtctttggtgatcaatgactaaaagacactctccacccaaatggatcaagattatcaaagaatctaacgaatttaggaataataatatggtggggcattgactcattatttttgagtaacatgggaaaaatggcttatcttattactattttttccaacaaatgaataaatataaacaggaaaaatctctaaggaagaaatgaggaattaaaaaaagaccaagatgtcttgcttacattttatttatttcaacgaacagttttattttgatacagttggagtcttaaagaagagttacaagaatagtgaaaggaattttcatatacccttcactcaggttcctcaaatggtgacatttgaccatgtttcctttcacctgagttcccctccaccccaagctgtttgagagtaaattgcaagcaaacataatgccactttatcactagttctgaatatatatacacacacacatatatatgtatatgtatatgtttgtatgtatgtattttgagacagagtctcactctgtctccaggctagagtgcagtggcatgctctcggctcactgcaacctccacctccagggttcaagtgattctcctgcctcagcctcccaagtagctgggactacaggtgcaccccaccacaccccgctgattttttttgtatttttagtagagacggggtttcaccatgttggccaggatggtctcgatctcttgacctcgtgatccacccacctcagcctcccaaagtgctgggattacaggcgtgagccaccgcgcctggccctgaatatgtgttttttaaaataaagatgttctcttatataagtatagtacaattatcaaaatgaagaaattaacattgatacaaaattattagctactttagaggcttattgcaaattttgccaatggtctcaaaaatattctttataggaaaataaaatttctaatcatgtgttgccttcagttttgtgtacctttagacgtctttttatccacaaatctggaacagttctttcaactttcttcttaattcatgacctcaacatttttgatgagtataggccaattacttcatagaatgaaccttagacatttcctcatgattagatgcaaattatgcaaatttaagcagaaatactagggaaccgatattgtcttattctctgtgtgtgcatgttgggggacagttctctgttggctgcattcctggtgatgtcaattttggtcacttggttaaagcactgcctggcagatttctccaccgaaacctacctgtgtgtcctttgtaattcagtgaacaacttggggctaacttgttggaagacaatttaagatgatgtgaatctcctgttactcatgaaaccctcaccggatagttttagcatcctcttatgacctttgcctggatcaatcactactgtgaatgttgtcaatgatcagtttggatcatatcataaggaaaaactgtcgcttcgatctgactttatgacagtatcatcgagtcatagattcttatttcatttaatggcttacaatcttttaacatcattatttattttgatgctcaaattatcttcagtgtgttcagtgctgctgttcctgcatcctttggacatattctgatcattctaagggcccttcctcttttctgacacaataagataggtgttccaggttcttcttgtactaggaatgagacacttttccaaggaatcctggtttcttttagtgaagaatggtatttagaaaccaatatctgggtactagatgtgattattgctcttgggatctcattgaggacagagttaagaaaaacatctatgtacatacacatgcacacatacatatgtgtacacaatctacctctatttctttatctgaatatatatattataaactggagtttatatataccaatcccattctaacccactgcaggtttcattttgcccatgtccctttctatatttgtaaccccttcccttacggtgagacaccaggctcccgggttcacaatatgtttcttatctacttgataagaaatatacagaaagtagtttcagaattgctaattcgtacttttgtccaaaacaaatttactcactatcattcaatgtttgtctatgattctctgttgtctttagcctcaggatttatagccaaaatatgtgtccaaaattacttggattagttctcccttaccctcctgcaatgtggttttgatattcattaatacaattaagttcatttctttccatttgtaaccaattcagggtttttactcacccgtgttgatattattatcatatgtcaaacattaacatgattccaaaggtcagaactatacaaaaaagcaacaccctccatcttttctccccatcttcagccccctttatttctgcctggttctcacccaatccctgttaataaccaaccttgtagactctgatttcttttcatgtgagttcatgtgtgttacatgaatgagacatttgcttatctccctgctatggtttggttctgtccccactcaaatctcaccttgaattgtaacaatccacatgtttcaagggcaggaccaggtggagataattgaatcatgggggtagtttcccctatattgttctcggggtagtgagtaagtctcacaagatctgatggttttgtaaatgggagttctcctgcacaagctcgcttgcctgccaccatgtaagacatccctttgctcttcctttgccttccaccatgattgtgaggcctcccagccatgtggtactgtgagtccattaaacctctttcttttttaaattacccagtctggggtatgtctttattagcagtgtgaaaacaggctaatatactctgcttctttcttacacagaagttagtatactcagccttctgcaccatgctttttcacttagcagtatatttttgaaagcactccatattgcttcatacagatcttcttccttttcttattgcagttcatgatactccactgtgtgtatttactgtagttcattcagccatttttctgcatagaggtatgaatgttgtgtcaaaatattttgcatttaaaaccaatgttgaggccaggcacggtggctcacatatgtaatcccagcactttgggaggctgaggcaggtggatcatgaggtcaggagatctagaccctcctggctaacatggtgaaactccatctctactaaaaatacaaaaaaattagccaggcatggtggtgggcacctgtagtcccagctactcgggaggccgaggcaggagaatggtgtgaacccgggaggcggagcttgcagtgagccgagatcgcgccactgcactccagcctgggcgacagagcgagactctgtctcaaaaaaaaaaaaaaaaaaaaaaaccaatgttgcaataaatgatcttgtgtgtatgtgttttctgattgccagaggtgtatcttcagagtagattcctagaagtaagatgaaagagtcaaagaaaagtgcaaatgtaatgccaagttcccttccagaaaggtcgtaccgcttttcattctcagcagcaatatactaagactgtctattgcctgtcgacttcccaacattgtgtgttatacttggtaatttttgtcagtcttataggtaagaggtggtatttgtagttttcatctgtgtttctctaattgtgagtgaggctcaatagttgtaaatatatatatataaataattttaatatatttttgtgaatatctgttcatatcctttactcacttctctctcaatttttaaaaatctttttcctcaaatttcaagatctgtatattagggccattagcccttttaatgtgatatatgtgttgcaaatatttactcccagcctgttattttccttttgactttatttatggtatttttgtaatgcaaattttttaattatacaggcaaatttattattttttaaattgcatttagattttgagtcataattgtgaagctcttcctaaacccaggttatagaggaattcatccatgttttctttagtgcttgaaagatgtaacttctttgatttatattgctgatccatttgaagtttggtcttatgtacggtgtggagtgtggatctacttttttcttaatggctgtacagttgtcctagcaccagtgatttaaaagtcaacatttgcagcaggtgtggtggcttgtgcctgtaatcccaacactttaggaggctggggttggaagactgcttgaccccaggagttcaagaccagactgggcaaaatagtgagaccccatctctattaaaaaaaatattataaagaagaaaaaaaacagtctatgtttacctcaggatttgagatgctacctttatcactgactaaacttccatatgttcttgagtttatatatggacttcattcattggcctgttttgctattcatgtaccagtgccattaagtacattttaaactcatgcaaattattaataaaatacccactttactcctataggtaatttaccatcattctgttaagttgaactctatgaaactgccaccattcaatgaatcttactctacagaattctcattttcatatgtttcaacctaatataactatatgcataattcgtggaccatgtagaatcgtttaatgacttattccaggaagaatataaaaattctagccaagtgggcttcagaatttctatccctcatttctaaatggcttacagacctaacagctaatgagcagcccattaataatcctgtctttgtctttttcttttctttctttttccctttttagtgatagagggtcacggggtcacagacaacatacagagattctcctcactgccaccttacctacctgtgagctaccacatcctcagagcagagacctccttcttcctcaaggaagccaaccaggacctgctgcggaactccagcctgcaggcgagggtggagtccttctttacctacaaaaccaggcagcccccagtgctcaatgccagctatggacccttttctgtggagaaggttgtgcctctggacttgatgttgacttcaaactttttaggtccaaccaataagtttagttttgattggaaactaaaagcccacatcctgcgggacaaagtctacctgagccggcccaaagtgcaggttcttttccacatcatgggcagagactgggatgaccacggcgccggggagaagctgccatgcctgagggtctttgctttccgagaaaccagagaggtgcggggcagctgccggctgaagggggacctggggctgtgtgtggctgagctggagctcctgtccagctggttcagtgccccgacggtgggtgccgggaggaagaagtccatggaccagccggaggggacccctgtggagctctactacaccgtgcacccaggaaacgagcgaggggactgtgccgggggtgacttcaggaagggcaacgccatccgtccaggaaaggatgggctggaggaaaccacgtcccacctgcagaggatcggcaccgtcggcctttaccgggcccaggacagcgcccagctcagcgagctgcgtttggatggtaacgtggtcatctggctgccttccaggccagtcaagcagggagaggtggtcacggcctatgtcaccatctcgagcaattcctctgtggacctcttcatcttgaggtaggtgcccatgcttgcccctgatcatctttggcatgcctggtgtgagactgggttccatgcgtggcagatagatattcaggaagcatcgattttcactaccttcagggaccgtttggcattaacaggggaaggcaaattatgcacctgcccacatgctctcaacagccctccttacaccgtgggttatggagggaagaagaggcaaagggcgggcagaaattatttccaaaaggagcaagatgagagtaatccgcctctctagaccttcagttatcctcacacttggagagggatgtgatttttcttctgctgtgaatcctttgatgagataccatttgagttgcttgattgaaagtctacgttcaagaagcccaagaaaaggcaggggagagatgagatctcactttgggtatatatgtgaaaagagccaaacatagtacccttttttttaattaggtggtgttaaagattgccagttagtgtctgggaggccttactgcatgagtacagcttagcaataattaagcaaacatgccgggcataaaactcttcagcaaaggtattccatcttataatacaaataaacaaagcagcagcataatccacctactgtcaccatggcgggttcaacagagagcagcatctgagctgtgacagggctgctctgtcactctgtataatgattctagaatttggtacaggagcacatgttttctgaggataattaatacggggctaaaattcatttaaagcaaatcctcttacaatgtgtactagaatgtcataataatgaaagaagtatttgttttaaatttgtttaaaaaataaatgggataaaaatgtttttttcttgttatagttaagaaggagttaggttgtaattgcagctatgctttggctcttgttagaattcagccctaatcacattttgaatgagttgcttggaaaaatatttgcaagctagaatgatagcctatcatagcatatttcatttctgtttaacttttgtaatatagctataaggatgcttatttttaaagttttttgttttttcatttacaaaaaggttcagaggtttccattagtttctcatcttaatcctacagattcaaataattgtcttctgaagtatgcatcttgtcatgatctctatagtttttcctttcaatttttaagtagactaattttgcagatcttcatttgctaatgttttctggatacgcttggaggactgctatgacacccctttcagcgacgtcatgaactcttacatctttttatgagatttactgtacaagggattctcattgcatttgcattgtgaaccttggtggtcagtgagggacatgctgacatcatggtggggagggacaggtctcgctgtcagcgtatcggcggcttattgaaagtatcatgaccttgtgactgaggagccgggagagtcaatattcagaaaaagggtctgaatactgggtttgtttccccatggcttggatttgaaaagatgctgatctgggagctctgagtttaatttttggtaagtcctcttgccccctgagtttcagatcaatcatgaaataaatgcatctatccctggctttggaagctggagacagaacgtctccagcatggcatgctaagtagttgtaaaattttagagtgatcatcttcccccttgcactttgttaatgtccctcttcagaaaatgtagtctctagcgtctaccagggtgagcatgagccaagccacctgggtccctaggtctaaggtccacaaccttacagctgtacctggaagggatgcttagatggggctcttcagagaggaggatctgttttctgaaattttcatcacaaagataggcatggtggtggtgaacaaaggtcttccaaccagctgacctcaattctgatcctatctgttctacttacagcctgtgtgttggtaggcaagttaactaacctctgtgtgcctcagtttcctcctctctaaagcagatgtaattgtagtacctgcttcgatggggttgtgaggattcagtgggctaatatttatttgcagggtgctcataacagtgtctggtgcactgaaacttctctgtcaatattgaatattactaacagggctgtttttaaacacccgtcaaaccttcaataagcattgaattgtatcttcgcagtaaacagacattgtgtgttgtgtaaaacaactaccaagtttattctcaaaattctattattcccattgtactatgattttgtttaaaaagcagtgtctttgtataatgacaggagtatttgtagcacagaggttactaatggcgtggctctggggtgtaagacttagtcacattaaagggtactgcttggtgccgtggagcgcagcagccgtattccctcccttccgatctttgccatcacagatcaaagtcctggggagagaagatccacctcactccctgttcaccaagatatggcacgtgttatatttccttacttcagattttaaattcgaagcaaatttcctaagggctaaaagcaattgctcatgagaaagtctgagcagcagacgttccccaaacacgtgtgcaaatgcaagtccttgtgtctcaggcgtgtcggaattcaacgaatagggaacaaacaaaccatctgaagacccgtcttggaggttcattctcattctgaagatggaatttcactgattaaaaaggggatgttacggacggcgtacacatttcagagtctcggcttaatttgagttgccaaaatgattggcaggcaacagtgtggcaaatggaattttgctctatgtggagtctctctgtttctctccttcccttaatctccctctttctctccccctctgtccaattctcctgtttctccaacatgactgaaggcgcttctttaaacaaattaacgttttatgtttttaaataattacagatttgtaagaagttgcaaaaatagtacagtgattgctcgtagacccctcccccagcttccgctggtggtaccacctcatataaccatagtacaatattgaggccaggaaactggcattggcataacattgttaaccgaactacagaggatgtttgggtcagaatgtaggttttagggtaccttatctctttccagcttatctgtgtgactgaagacattttcaaaggcaaggaagttcagttggaaaattagttccttgaacacctgccagagtctttttagtgtccgttaggaaaagatgagctcggtctgcttctcctgtatttttttattttattttttttaaggaatacagagaacttccttcctgtgcagagatgccatcttcgcaggcccctagatacgttgtgtgtttctgtatcatcaatgcaatgtgcaagtatccaaccatgaccatttgccaggcattgttctacagcagtgaatgaaacaggcaacacttcctgcccaagtgaagcttatgttctagtaggcaagataaaaataatcaaaatgtgcatgtgtgccaagaagtgacacaaccaaagggcatagttagtacagcctccaagactgcacgcccttctttctgaatctggtatttgtcaagaaaccaataggtatttgggcaccgtctgccttaagctagataacatccgagaggccctcagagagcttagcctcaagccagctggcaaagacagagtccctggaattccatcctgcataaaatgagcattatgaacagcaaactctctaggatgagtgcgaaggctctggacttctgtgtgttggctcacagctgtgtacaagagatgtacaatgctagacactaagcaccatggaattgcacagtgtacacaggctttgtgttcagttgtcattcagttcttctaatgctacagtgaaaagtcttgttctctgctagcatacctctaacatcctgacagcacctactaatcttgttttttttttttttttggcgaaaggaaagacaggtcactgtttccaagtcttcttcttttctatctggaattttagaactttgttctgctttcattgtttatggttattttcttttgatagcccaaatacaaaacaaacaaaacagtggttttccattttcactgtggatacaatatttcttttcattcacttggtaaatattgactcaattaatgtgtactgacccctgcccatttgccaggcattgttctacagcactgaatgaaacaggcaaaatttcctgcctgcatgaagctgatttcctagttaggggagataaaaataatcaaaattgggttgggtatggtagctcacacctgtaatcccagcactttgggaggccgaggtgggcagatcgcctgaggtcaggagttcaagaccagcctagccaacgtggtgaaaccctgtctctactaaaaataaaaaaaaaaatagctgggcatgatggcgggcacaggtaatcccagctacttgggaggctgaggcaggagaatggcttgaacctgggaggtggaggttgcagtgagccaagatcatgccagtgaagtccagcctgggtgacaagagtgacactctgtctcaaaaaatgaaataatataattaccaagtaaatacaatggatagtaataagtggcttaggaaaaaatggacaagggaggaagaatggaaagtgctggtaatacaatttaaggtgacagtcaaggcaggctttgttgaaaaagtggcatttgaatcaagcatggtcttggcagggaaacacgtgcaaaggtcctggggatgcttgcttggtttgttacaggaacagtaaggagacaaatgtggctgaaacagaatggaagattggagaggtagggggaggcgagctcagaggggagctgggattcacatcaccttgaactttgtgagccattgtaaagacttttgttccaggtgagatggggattaccggaaggttttgaagaaggaatgtcacgatgtaacttatttttatgtattgcagtaatctaggtgagagaagacagggacttggatcaggatagcagcagcagaggtgtaagtgagtgtgcagattctggattaaatttaaagctaggactgatgagatttgtgggcacacttgtgtgaaggagacacagcatcaggatgttggggatgaaggacagagctgccattcctgtgatggaaagcctgtgggagaggcaggttttccctttctagatagtgtattataattttaatgtaattaaaatatactttaatacttaaaatcatcgttttaaggaaaaaatattcaagaagcgaataatataagaggatgggcacagatgtgggaataacagtgaagttggcatgagtctcgctgaagtttgggaaccaacactgtattttttcattgcagtagctttagaggtacaagtggtttttggttatagggatgaagtacacggtggtgaagtctgggattttagtgcacctgtcacccaactggcgtacattgtacccaataggtaacttttcatccatgaaccacctctcaccctctccccttccgagtctctagcatccattctagcactctgtatgcctctgtgtatgcatagctaattgcagagatatggaatcgacctaaatgcccatcagccaatgagtgaataaagaacatgtggtgtatatatcatccatatctctccagctgcctccacctatggctgccggttagatcacaggagaaatccacccaggtcacagaatgttggatcatcgaggtccattgctggatcttttctattgggaaattcatggaggacatgcagggagaccttgaatgatgtctcctcactgagaaacccaaagactttctccaatgggtcttcgcacaatggtttcactgagagggcctggacttcttggaaatgtttatgggactaataacatacatggaaacttggcgtgaaccttcttggcaagatcattttcacaaaggacgctcttccgtgagccaaaagaagcagactggattttgtttgcaacttcacaaagtgaattcaaaggcaaccctcgctttataatcaaattagttcatgagacccaaaagtcaaggtgtggaagatggaacctttgtttcttgtagctataacattattttggaagccgattttaaaaaataaaaaataaaataattaccaacagaaatgaaaaacacatatgcagataggttttacaaatataagtgggttggctcatgagggtaagccctttttccatctctctgttcactgctatatccccagcccttggtgtatgacttggcaaaaaataaagccccactaaacatttattgaataaatgcaaaaccaaatgcctaatatcaaacctatttcataaacattccttttcatggatgttttctttcataattaactgagtcttcttgaaataaagatcaggattcctcagagaaagcataggcattatttacttttccaaggatgttcaaaatatattgacaatggaggtcatcagttctgaaaattcccactgccacctcagtgtacctctgtgctcctgaacccctggggatgctgaggatgggatgacttccactgactgcctccccaaagcctagcttagactgagctcacagaatcactctgctgccaaaatcagtgttagtttgactcaagttgcaggttgtaagtaggtaggtcagtcttgaccctgcaggttattaacgtgaagaacttgcgggtagggggtgtgaatgtttggccttgtcagtaagcaatgaaattgatacctaaagagcagaggcggtgatcattcatcctctccaacttaaaataagcccacttaattgaacagtgtgattcatagacatggaagagatttgttctctacttgtaaccaattccaaaccctgcattagggatgctaagagagtcataaagcgtcactcctgactgggagattatactctgctgctaacgtgaatttatgtgtagtaaatagacacatccccatgtctcaacgcagtgaagagagatgcttagcatagggactggcttctcaatctcaatatcatcagcgtttggggccagctaattcttttgtgttgggctgtctggtgcattgtaaaatatggagcagcatccctggactctactcagtagaaaaagtccagtagcacctccacctctgctccaggtctgacaaccaaaatgtctccagacattgctaagtcttctttgggggacaaaatcaccctggttgacaaccatgagcctacacccttgacttgcagagaatagagatatctgggtggtctgtgggatgtgggccttgtgatggtccctcaaacataactgaaaatagaacagcaattacatggcttctttgtcctttgctgggtgggttttgtgtgtcaggactgataatggagccttcaggacataaatcctaagagatttgtttttgaagttaaacactgtgaaataaggaggtagtcctctctcacgaataaagacagaacgaaagagagactagatgccaagcgtgcagtctttaatagcccttgctttgtaggggtgcactcagaaaataagagagcaaggagctgcttctcagcttcggcacagaaggtgatgttctttcctagctgtggggtatggggacctcctggttcattagttctgtcctgctttgactggtggatgaggcccagtcattttatcagtcactaaatctcccccaaccaagccaacaccatgctgcatgtgcctaacagctgcgtatgctctcaccatgttccaataaacaaacaggatgaagggtggacacagggaagaaagcctttgaagaaatgtgcaagatttatgcaagaatactgagagaagtattatttttccaaacaggatgaggtttataggtggattcacttctagaatctcactgtatgtcaaggaaattcaggtagagttgaaagactggcttttgcctgtagtcccagctactctggaggctaaggtgggaggattgtgtgaacccaggagttcaagtccagcctgggcaacatagcgagaccctgtctcttaaaaaaaagagaaaagtggatttcacctcctttaaaaggactttggggccagtgatggtggctcacacctgtaatcccagaactttgggaggctgaggcgggcggatcatgaggtcaggagatcgagaccatcctggctaacatggtgaaaccccatctctacttaaaagaaagaaagaaagggaaaaaaattagctgggcgtggtggcaggtacctgtagtcccagctacttgggggtgctgaggcaggagaatggcatgaacccaggaggcggagcttgcagtgagccgagatcatgccactgcactccagcctgggcaacagagcgagactctgtctcaaaaaaaaaaaaaaaaaaaaaaaactttgggaggctaatccattgcagactaatcctgagtttctaaccagctcagggcaaagggcagagtcacagattcccatgggagggtgagaggtgggattcatggaacatacctgttctaatagacaaacgccaatcatggctgctcagatgtgagtctcctacttatgcacaaaatatacatgattacaaaacacataaatgttcacatcagctttccttttgatggctgaataatataccactgtatgcgtagatcacctcatgaacaaatgagcaaaatgtgatatttacatgcaatgatatattattcagccataaaaggaataaaccactggtacatgctacaatatggatgaaccttaaaaacatgatgctaagtggaaaaaaaaaaaaagccaggcacaaaaagtcacgtaatacatgaatccatttatatgcaatgcctaaaataggcaaatccatagagacagaaagtagattagttgttgccaggacaacgggaggtggcatgtggggagtgattgccaatgggtttggggtttctttctggggtgataaacacatgctgaaattaagtagtggtgatggttgcacaactttgtgaatatactaaatactgaattgtatacttgacaaagtgatatcccaagagatgatgtgtgtcatggaaaaggctattgtccttgacttttctttattgcctctaaactaactacacgttgaacattgagccaattttcaaaaatttattctacagatggtttttccattaggtggccacatgttttgctttgcccattacttgacaaggttcttaggaccagaccactctttctaatttattattatgctttgtactgtatcacatttagaaaccccctcaacattgttgattagtgagaatggccaaaacaaggaccagtcaacttcaatcagatatgtgggttgaaggtagcacacttctgcgcctatatggctggccagggatataggtgagggaagctcccaggggagagggagaggtagtggtaagaggatacttgaaagggcctcagcatcccccaccataatctccattagccaggccctcaggccgcccagatcaacacataatctaatgaagacactatctccatgatgcagacgcagttctgatgcaaactccccacctgcacaccgcggccagcctttggtacaccccatcccctgccccttggcgctcatctgggaggggccgtagtgaatggcactcacacatgtgccctgttaaagggagcagccacatgacaagtctccttgatgtcagacatgccagaacccaagaacatagcaaccagagttactggctctaaagagaaattagaaatggaagctgacagcagaatcgcttctcgaccaccactgcgcagtttgggggacttgactgtgtctctcggtttaaatcatgcctcaaagcagaaggatgcattagctccctgcggctgccataacaaattgtcccaaacttggtggcttgaaacaacagaactttgttctctcacgtttctagaggccagaagcctgagatgagggtgccagcaaggccatgctccctccgaaggctctagagaaggcccttccttgccttcgccagctgtcctcgatggtccttggcttgtggccacatctctccaacgcctgcccctgtcttcgtgtgaattttccctctgtgtttctcctgtgtctcaatatccctgtcctttctcttactaggacatctgtctttgaatttgagacccaccctcatccagaaggatccagaaggctctcatttggagatccttaactaattccatctgcaaaggacctgtttccaaatcaggttgcgttctgaagttccccgtttgatgtgaatttgggggtgggtgaaaggcagcattgacccatggccgagaatacagactgcctgacgtgcttcagagcctgccactcagtctttccctggttcttttcaattgccacatgccccttggcaacaccaggccgtgttccctgtggtggaaaagcaaagttacaaatgggaatctggaccttcgccacgtggagaataaactcctctccgccggaggagtctagaccgcactcttaaatccactcttctaattactgagcacagtctgcatgcatgccgttatagcttcatttcagggagcgaagttttttcttacctatttgatatctgaggatatgagaaaccctcgaaggcattgtccacatacctggcttgccctgcatgatcgttggctctttctttcctactgggcataataaatctgcaggatcgagtggattcctcaggagcaagctgactgttcccagactcctcattagcagaagagaccctaaaacacgaccaagtttgcattgactgcagatttggagctaattcagagaactctggaaactcattttcccacagtctgtctgaaattcatttcccctgttgaatgtctccaaaggaagggtttgttttcattttcttcagcttgtcattttaaatgtattcttctggaacagagaaaaggaacaattttctttctgcttgggaagaagtaaagaaataatgtttcctgctacatcccctgtccccctccgcagctccccataacacatctgggttgccaggcagcccagctcccgtgaaacattggagagtgattttactgttgtgggaaacatttaaacatagaattgactccagctctgtgaaaacagaaaggaaccagaggctttctgacccgaattctgccttcttgcttccacgttctttagcccatttaagtgtcgtcttagttttcgagttctccaaatcacagctttgtctgttgtgaaagatttaacacatgaattagtggacctgtgacatatagtccctttctatctaaaaatttgtgtggaggagaggcaggataaggtggcaagtgatgatttcagaaacatgctgggtactccagtattctgggtactaaggcatctttagagtcccgtctgctggcacttgtttgtggtcgtgtcgttgctccagggttcctgaatattgcaaacctgcaccatttatgtcttgaaactccaaaagtcattaactgaattaaaatcttggatagaaaggaaaaaaacaggcatccctatttcaaaagcattttgattgcatcgtgcttgttgaaagtctttcctggaaccaccttgctgtatcagctcccatttcctgtgctcctagagaagtggggtgtgtttttttgtatttattagtccttttagtttctacttccaaaggggtgtgtgtgtgtgtgtgtgtgtgtgtgtgtgtgtgtgtgtgtatatatatttaaggagggtggtggcctggaagtggggacatccaggaacacaagaggaggatgcagtgtagatgggattgagagggagggaagaggcaggctgtgggtctcaggctcagcctaggacacttcccccagggctggatcctccagactccccttccccactttcctccagggtgagatccaagctctcgatactccatccagctacgttaggtgaacgcacatccaccaggactttcttcctccatcaccttcccgttaaggcactcggctggagaagcccggcatcctcacccccagcttgtggctctcactcagatgaaagcactcctcagtacaatgtgcaggagacagaggccatctctgatgttcctcgaaaataccagtgcccattgtcattttgctctgatattgcaagcactgcggacatgctttcttgatgaaggcttctttctgttgaattttccagagggacctttaaaagcagaatttgctagaacaaaataaaggagtgcgcagccttttcagctgtgcttacccagtgctgccaggatgggacctgtcggtcccaagagccagagtgctggctcctccgggggctgctgcttgggctatcctattgggcttccagacaatcctatttgtgtggggtttggcaggtcatgcattcctgatacgccatgcaatcctctcaacaacccgttctacagatgaggaaaccgaaggcctgagagaagaggaatgcatttgtcaagcttattttggttgctactctaactgacttagacttaaaaaggaattttttttccctataaaacttttgggagtttcaggtacaaatgcatcagggcatgaatgatgttcctgggactcagtctccctcacttatttgtgcaactccattcgcccacattgttctccttctcctgctggttctctacatggtcaccccaagggttcccagcttcgaccctgctcagagtttaaagtaggcctcttttttataataggtgcaataaatgtcctcagattgagttgtctcagcttggtatgagtcatacacccaactgtcatccatttattgtggccagcaactatcaacatacctattttccaggctacccttagaactggaagtggtagattaatcccaccaaaaacatgctgtctgtaagtgtagacagagtggtttggaaaagagaaaatcggggtgcaggtgctggaaggagaagggttcatgtcacgtgcaggaagtagctgtagatgcccacacctatggcatagaggatggctgtaaattcagagatggacaactgagtccaaatcctgcacctacagttttctagctgtgccaccaggacgggttccccagcctttctgtgcttcagtttctacatagagatgataacagtaacaccagctcagggttattgtgagacttcagtaagataattttaacatatttgcacatattaagcacttaatattaactccattttcaatgcattattatttttattacatgtatttttctggacattacacagagagtctattgcaactatgcttgactgagtgctgtggattgcagctgaaagcattctaattgatgaactcccatctctgtagcagcatctaccttctttgggaggagggatgccattgctttcattgaggtaagacaggtttttcaacaggggaagagttttacctaaactcactttcccggagatatctgcaatgtctggagacatttttggttgtcaaaattggcgagggaggtgctactggcatctagtaaacagagattagagatagtgctagatatcctacaatgtgcaagacagcctccccactaaccccacaaagaatattctaatcccaaatgccagtcaacgtgcagcgatggagaaaccctgagatgaataaatggttgattgccgtgtggctaggtagatgaccacagccataggttataaccaattgcttatcaggctgaaaagccaccgtgcttctctgtggatcacgaatgtgcccgggaacatgggctgctaagagctctctgctgggaacctggcagcctttcctgacaatgcaaggagctctgtctctttgaaatgctcctcccagatgttggctgcaggtcatgtgttgaccagccatggaaatcaaggccaattttcatgttcaccaaggagcaaggagctaacctagttagcctatactttgtaataagtatatcttaatatcccttctgttagaaaacaagaagaacagggctttgataacatcagagaggggtattcaaagatggggcttaccttggataacacactggcagaaagagtgtcacaccttcattatgatgcatttcattagttcctaatgactacatcccaaaacagggtgcccaggcatgggactggctcttaaaaatgtggggccactgctccgtatctcagatgggagagctaaagggtgcagcggacagacacaattatgccatcctgagatgcacattggggagaggaggaccaggcatggctgcacatcacggtggatgggggaaggcaccatttttacctcactgggctggtggctgcagggtgctgggggcagctcggcctccttctcagtaacccagcgagctacagagtctccagagagttcaagagactttgacccacaacattcctagtaagcctgcagtgggcatttaaccacccaccagcctaccttattttgatgtaattgatttttcaccccacttcgcttcgtatgacacagtggttcttgccaagcttccagccatagggcaagcaagttctattgatgtccctatggcattggataccatagcacaaatgacggatgggagggtgaaactgttgttctagaaaattaaatgcagaccaggcctgaataatccctgagcagacaaaaccagttaggcctcttacgtgaccttaaccttgcttgatttgcaaacataatgagaacttaactggaaccatttcttgtaaatgcatatattaaagaaaaaatagaacttaagctcaatcaatcagaagcagccaacaaacttataattatacaggcatatgttgtttggttgtgcttcagtttactgcatttcacagataatgtgttgtttaaaagctgaaggtttgtggtaaccctgcattgagcaagtctaccagcactatttttccaacagcacgtgctcacttcctgtctccgtgtcacattttgacaattcttggaatatttcaaacattattattattatatgtgttatggagatctgtgataggtgatctgtgatgttactattgtattgttttggggcaccatgaactgtgcccatataagatgacaaatttaataaatgttgtgtgtgttttgactgctccactgactggccactgttgcatccctctccctctccttaggcctccctattccctaagatgtaacaatattgaaattaggctaatgaataaccctacacgggcctctaagtgtttcagtgaaaggaagggtcccacatctttcactttcagtcaaaagctagaaatgatgaagcttcatgaggaaggcatgtggaaagtggggaggccaaaggctaggcctcttatgccagttacccaagttgcgaacgcaaaggaaagttctggaaggaaatgaaacgtgcgactccagtgaacacagaagtgatacgaaggcaaaacagccctctggctgatatggagaaagttttaggggtctggatggaaaatcaaaccatccacaacttttctttaagccaaagcctaatccagagcatggctctagttctgtgaaaaagaattctgtgaaggctgagggaggtgaggaagctgcagaagaaaagtttgaagcttacagaggttggttcttgaggctaatggaaagaaatcatctccataacataaaagtgcaaggtgaggcagcaagtgctgatgaagaagctgcagcaattgatccagaagatctagctaagatcgtcgatgaggtggctgcactaaacagcagatcttcagtgcaggtgaaatagcttcctcttggatctcttggatgacgatcccatctaggacttttttttttttttttttttttgagacagagtctcactctgtcacccaagctggagtgcagtggcacgatctcggctcactgcaacctctgcctctcgggttcaagcgattctcctacctctgcctgccgaggagttgggattacaggtgctggccaccacgccttgctaatttttctgtatttttattagagacggggtttcaccatgttggccaggctggttgtaaactcctgaccacaagtgattcacctgccttggccccccaaagtgcttcgaccatctagcactttagtagctagaagggagaagacaatgcctggctttaaagcttcaaagagcaggctaactctctccttaggagctaatgcagctggtgactttcagttgctcatttatcaacccctaaatcccaggacccttaagaattatgctcaatctgctctgtctgtgtcgataaatggaaccacaaagcctgtaacagcacatttgtttataggacggcttactaaatattttaggcccactgttgagacccagcgctcagaaaaactattcttctcaaaatatgactgctcactgacaatgcacttaatcacccaagagttctgatggatatgtgcagggggatgaatgctgtttacatacctgctaacgtaacatccattgctaacacaacatccattgctaacacaacatctgttccacagcccgtggatcaaggagtcattttgacttttgagtcttattatttaagaaagacactttgtatggctgtagctgccatagatagtaattcccctgaggaatctaagcaaagtaaatggaaaaccttctggaaaggattcaccattctagattccattaagaacatttgtgattcatgggaggaagtcaaatatcaatattaacagggttttagaagacgtttgtcccagcatcttggatggctttgaggggttcaagaattcactagaggaagtacctccagatgtggtagaaatagcaaaagaattagatatcagaagtggagcctgaagatgtgactgaattgctgcaatctcatgataaaatttggaaaatgaagaatgacttcttgcagatgagcaaagaaagtgttttctgagatagaatctactcctggtgaagatactggaacattgtcaaaatgacaataaaagatttgtaatagtacataaacttagttaaaacagcaggaggttttgagagggttaactccaattatgaaagaagttctgctatgagtaaaatgctatcaaacagcatcgcgtactacagagaagtgattcatgaaaggaagagtcaatggattcagcaagcctcattgttgtcttattttaagacactgctacagccaccccagccttcagcaaccaccaccctgatcagtcagcagccatcaatattgaggcaagaccctccaccagccaaaaaataaataaataaataaataaataaataaataaataaataaaattgtgacttgttaaaagctcagttgatcattagcatttttagcaataaaacatttttaaattatgtacattatttttagacaccatgctgttgcacacttaatagcctacagtaaggataaacatagcttttatatgcactgggaaacaaaaaaaaaatgtttgactcactttattgtgatattcactttatttcactggtctagaaccaaatttgcagtatcactgaggtgtgtgtatataattagggactttccagtggaacagaacaaaaagacgactgtgtaactaaacaatccaatattttctttgctttacttctgtgtctttcttgtgaaagctttccccttctgctccctccataagctctgaactgcttctggcttgatgctgcccaattcatgaattatttgcttaaataaactttaagaaaaaaattatcctgcctcagtttaccttttaacacccttgactttggaactgggcaaaaatttgggaaactgtcatcaggatttttcttattgcaaaaaattagataagttttcctaaactggaggtaaaatgaaaaagagtgtcagacgggacttgggaaaacttaagtgttgataggaccctcagaggatcctcaggctctgaggatctgagaaaccccctgggaaatttggaaaatcagaaaggaaggcaatggattttatttttctctgtctttggataaaacacagggagcaagcaagatctcagagtcctcctggctagcatggaaggacagtagtgggaatggcagtgagatgcctaggcaaaagggccatagcccccacacaatcccctatgtttcctgtgcagtacaaaagacagagatggaactaagagaaaattctggctttgttatcagaaaaagaaggcgtcagtgggctgccttgaaggagctccattgatttgggaatattcttttaggatgtatgttcctggatagcaacacgggcagcaagccgatgccagtgtgactccatccacaagagctggatgccaccactcgcctccagccttcaaagaatgtggctgctctcctagggtgggagatcatcagctagaatgaactaaaatgccttcagctgcagctaacaatgcttaaccaacagtagctcaaactagtggttctcaaagttgagtgagtaccagaaacacctgttgaaacaaacattgctggacctcactcttagagtttctgattcagtgtatgtggaaacccagataattttatttttattttttgagacggagtttctctcttgtcgcccaggctggagtgcattggtgcgacctcagctccctgcaacctctgcctcccgggttcaagagattctcctgcgtcagcctcccaagtagccaggattacaggtgcctgctaatttttgtatttttagtggagatggggtttcaccatgttgtccaggctggtcttgaactcctgacctcaagtgatccgcctgcctcggcctctcaaagtgctgggattacaggtgtgagccaccgcacctggcctggataatttatatttcttttttgtttgttttggaggggaagtctccctctgtcacccagcctcgtgtgcagtggcatgatctcggctcactgcaacctctgcctccggggttcaagcaattattctgcctcagcctcccaagtagctgggactacaggcacatgccactatgcccggctaatttttttttaaattttttatttttggtattttagtagagacggggtttcaccgtgttgcctaggctggtctcaaactcctgagctcaggcaatctgcctgcctcgacctcccaaagtgctgggattgcaggtgtgagccaccgcagccggcccatataatttatatttctaatgagttcctaggtattatgggttgaattgtgtctctcaaaattcatatattgaagtcctaacctccagcccctccgaatgtgacttcatttggtatagagtcattgcagatgtcattagttaagaagagatcaaaatgacttttagaagatgaaggcagagattggtaatgtcacaggttaacagcaaactaccagaagtcctaagaaggaaccaactttgccaataccttcatcttggacctctgccatccagaactgtcaaacaatacatgtccattgtttaaaccacccagtgagtggtactctgtgatggcagccctaagaaactagtgcaccaggtgctgctgctgttgccagtccggtgacccaacattaagaaccactggtgtttcaattaggaaaagaggaagtcaaattgtccctgttcacagatgacatgattggatatttagaaaatgccatcatctcagctcaaaatctccttaagctgataagcaactttggcaaagtctcaggatacaaaatcaatgtgcagaaatcacaagcattcttatacaccaataacagacaaacagccaaatcatgtgtgaacccccattcacaattgctacaaagagaataaaatacctaggaatccaacttacaagggatatgaaggacctcttcaaggagaactacaaaccactgctcaacgaaataaaacaggacacaaacaaatggaagaacattccatgctcatggataggaagaatcaatatcatgaaaatggccatactgctcaaggtaatttatagattcagtgccatccccatcaagctaccaattactttcttcacagaactggaaaaaaactactttaaagtttatatggaaccaaaaaagagcccacattgcgaagacaatcctaagcaaaaagaacaaagctggaggcatcaagctacctgacttcaaactatactacaaggctacagtaaccaaaacagcacggtactggtactcaaatcagagatatagaccaatggaacagaacagaggcctcagaaataacaccgcacatctaaaaccatctgatctttgacaaacctgacaaaaacaagaaatggggaaaggattccctatttaataaatggtgctgggaaaactggctagccatatgtagaaagctgaaactggatcccttccttacaccttatacaaaaattaattcaagatggattaaagacttaaatgttagacctaaaaccataaaaaccctagaagaaaacctaggcaataccattcaggacataggcatgggcaaggacttcatgactaaaacaccaagagcaatggcaacaaaagccaaaatagacaaatgggatctaattaaactaaagagcttctgcacagcaaaagaaactaccatcagcatgaacaggcaacctacagaatgggagaaaatttttgcaatctccccatctgacaaagggctaatatccagaatctacaaagaacttaaacaaatttacaagaaaaaatcaaccccatcaaaaagtgggcaaaggatatgaacagacacttctcaaaagaagacatttatgcagccaacagacacatgaaaaaatgctcatcatcactggtcatcagagaaatgcaaatcaaaaacacaatgagataccatctcacaccagttagaatggcagtcattaaaaagtcaggaaacaacaggtgctggagaggatgtggagaaataggaacgcttttacactgttggtgggagtgtaaactagttcaatcattgtggtagacagtgtggcgattcctcaaggatctagaactagaaataccatctgacccagccatcccattactgggtatatacccaaaggattataaatcatactactataaagacacatgcacacgtatgtttattgcggcactattcacaatagcaaagacttggaaccaaaccaaacgtccgtcaatgatagactggattaagaaaatgtggcacatatacaccatggaatactatgcagccataaaaaaggatgagttcatgtcctttgtagggacatggatgaagctggaaaccatcattctgagcaaactatcacaaggacagaaaaccagacaccacatgttctcaatcataggtgggaattgaacaatgagaacacttggacacagggcggggaacatcacacactggggcatgtcatgtggtggggggctgggggagggatagtattaggagaaatacctaatgtaaatgacaagttaataggtacagcaaaccaacatggcacatgtatacatatggaacaaacctgcacgttgtgcacatgtaccctagaacttaaagtttaataaaataaataaataaacaaaccactgacttataaatataaggacattaattgcttactgaacaaggaggctgggcatgagttcagcagctccatgctgtcatgaactcaggatcttcccatcatgctccactgccttcctctgtacttacccaggatgccccagggctcacaagatggccactaccaccaccaagataaactcaccaactgtgagtgttccatgcaggaaggaagggggcaaagatggaaaataaagggctgtgtgcttgtatgtctctgccttttcaaggaggaaaatcttgcctacaagcctggcagcagacttcctattacattacattggctagaacttgttctgtgagcatatttataccatctctagcagaagggaaagggaggttatgccatcgtaagttatgtcttttcttaattgtttgatcttatttatttgtttcccttagaaaatcttatttctgactagacttggagtagaaactctcagagaggacagcccccatctcttggcaatctgtttctgatatttttctttgaccctgttttattcttttggtcagaagcttagtgtactctgatctctttgtgcttttcttagtacattgtctcttcagagcaatacattgacattgtgttctaggaaaagtggagtaataaaatggtgaatcttgggagctttggtccttggtttattatcttctatgttcaggggctttctgaaaatgtactggtggaaataatcttctttggggtgactgaaagtttgcagattctgttagctcttttagtcctcaagtgacaaggcacagtaatatcagtcagtccaaaaaaaattccttcttaaaacccctactatggtttgagtgtttgtcttcttcaaacctcatgttgatatttgaaccccagtgttggagttggggcctaatggggggtgtttgggtcatgggggtagattcatcatgaatagattaatgttcagggtggggtgggaatgagtgcttgctctgttagttaccatgagagctggttgtttaaaagagcctggcacctcctccatacctcattctctcatgcttcctctcttgccatgtgatctctgcacacaccggctcctcttcaccttccacatgcgtggaagcagcctgaggtcctcaccagattcagatgcccaatcctgaactttccagtcatcagaattgtaagccaaataaactttatctttataaactacccagtctcaggtattgtgttacagcaacacaaaatgtactaagaacacccacttttaaaattcaggttaaattctcataacataaattaactattttaaagtgaaaaatatggtggtatttagtacattcacgattttgtgtgatcaccatttctacctagtcccaaagcatttttgtcattccaaaagaaaatctcataccctaagtagttactcatccctcctgtctccccaaagcctctggaagccaccaatctgctttctgcctctggatttcctattttgcatttctctccacttcatttttttcccagtattcaagttgagaacactcagatttggatctatgcacgccaatgtaagcctgagcagacttcctctttttttccccccagttctcctgggtctgctgtaataggagtgcccctcattcagtagcaggtgggcaaggtcaagataccctgctttatggggaagatatattggttgttatcatagactcagacactgggaccttttcacatttcacccagagtgtcaacaacaacttctgtggccatatgcttctcataagcgtatggtccaaagcagaggtacaaagttgtcattcatccacttcaatgagtttctgacagccaatggcaaggaaggagctgcccatctttaccttgaagcatctatttgcctccacaacaccatgaaaaaaaaaatgtaagttatttcttgtgcatcttttgaggctgggtacatgctgcccagacaacgctagggtccactcagccacaaagcagagtgctgtctcttgaatacaggatattgccacctccctgaggctcagttttatcagcttttgaaataatggccagaaagaaaaattagttcaattatggagatatgggggagcaaattctgagtttgtagaatgagatctgtgcatgttagacttattatccaggaaaaagaaattgcctagtgtttgacagtgttttcagtagagatactatctggagctatttcattcaatactttatatcttaggaacttccagaaaatttgtgaagaagaacctttctttttttcagcaggatgaagcaatgattcagctgccagctttcagcacaccctacacaaggccatctggagacccagaggccctctctcctaagcagtatttttatctttactctctgtagctgactgtagtggggagggggtcaaagggagggcacaattggatttgacagcatcccctacagtaagggaaaggcaggcagcaggcgtatgagccgcagatgatggagcagcagaatgagtgattctgatagtgctcccagcagtctgtgagcctccttcgagaatggtcatatgggattgtacccttgagggaccatttcacatccagcctcctcgagggcatgtctggctgcttcatagggtatgttgcaccatctattgcaaaacaacatgagagcttttgcttttctctttctgtttggaggtgtcatttgaagggaggaaatgtctacttatagctctctctgatatccttatgaataaccacaatttgaaagaatttgctcagtcaaaggatatttctcccattctcctgtctggggctatccgtgttggagtcaggtgctaactccaactcaaaggtcacaactagtggcttctggctatatcagtctagcaattgtgttttattttgtctctacaaggctttaaacataagatgaattaggtgctcttttagttgtagttctcaactgcaaacaacagaatccactctagctgggttagacagaaaatgaatgtagaaaaaaatggtaggtagctcacaaaatcttcatgagaaacagagccagggttaggacccaccatgcccagagtaatagccaaatccctctgtggggacatctccaggaaagggcctgctgccacggcccctgaatgagaccttgcagctgtcactaccaacactaaatactgggaccacatctctgctgccctccaaaatcatcccctcttgccaaggaatacatctttttattctcttctgaatcagtatatcacatggccagatctgattggttgagacctggtcacatgacttcttgctagcagcaaaggagtctgggaaagtgagtttctagcttctgtcttgtgaagatgacaatggggaccattctcctgatatgatggtggatatacaaaaagcaagaacagccaggcacgttggctcacacctgtaatcccagcactttgggaggctgaggtgggcagaaaacttgagatgaagagttcaagaccagcctggccaacatggtgaaaccccatctctaccaaaaatacaaaaattatccaggcgtcgtggtgtagtctcagctacttgggaggctgaggcaggacaatcgcttgaatctgggagacagaggttgcagtgagctcagatcgcgccactgcactccagcatgggcgacaagagcgaaactccatctcaaaacaaaaaacaaacaagcaaacagtaaaaacaaaaagcaagaacaatgtctaccctagttgctaacactgttctaaaaacccaagagatgtcacaaagaaagtcaggcattcagctcttcttgaaaactgaggtctggcaggtcagcagttctgcacggcgatgagtgcgaggagcagagccacggtcaacctcatcagacagggcacatgcatccagttcactggactactctcagtccacttcactcacatagtacccacctgactgacctctgtgggcctgtccagtgagcccagattctggctactgcctacctactggcatttcttcatttcccctcaagtcatacatggcttgctacaaggcgatggcttagtaaacagttggttccactgctaaaagcatagctgcttccaaatctgcagctttggctgaaatagcatccaaagatatacttccagcaaagggactttggctcctcacacatatgggagactcggtggcatgccgagatactttgtgtcccctgcagtcacctgcagacaggtgagtcattgccaggtagcttattctcaatgtctgtgaaacactagacatttggtgacagtggagggaatatttccaggaactggtgttggaggctcaacctgaacagcctatgttcctgctcttgccttccctgtgatttaaatggcattagccattttgggaggccgaggcgggcagatcatttgaggtcaggagttcgagaccagcttgccaacatggcgaaacacatgtctactaaaaatacaaaaaaaataaaaattagccaggtgtggtggtgggcgcctgtaatcccagctacttgggaggctgaggcaggagaatcacttgaaccggagaggcagaggttgcactgagccgggatcgcaccatggcactcagcctgggtgacagagcaagactccatctctaattaataaataaattaaaattaaaaaattaaacaatgatactatgcagggctcaccctggctcagctttgcaatcttaggcagttctgaggagtcatgcctcctgggcctcagtcttttcttctgtgaaaaaggaatctggcttcaagatcctgaaacctcagtcccctccctgtctgtttagcctcgtcatcacttgctccctcccctccagaagtaagaactgctgttggtttctgattgatttctccttcatatggcttctgttcttgccaaaaatgttaaactagagttgaatgagacagatccagtgtgtgggttattctccagggcatatgcacatgcagtttgcagatgctggtaaacctggggccatggccctcgccctgactattcattagaaccatctggagagagagagtgaaatcccagtaatatccaggtggaccctgagatactgatttaattggattagggtgaggttcaggcattggtatttttgttcacttttaggtataaaactgttaaaaaattaaaagaattttaatttggtctggcctggactttttgtaatgtcagtgttttaaaaaaaaaaaaaaggtgagggacagaaacaaaagaacggtgacaaatgcaattcacgatcctggatgcaaacattaggggaaaatcatgctacaaagggtattttttgaacactttgagattttaaaaattaaggtgaaattcacatgacataaaattcaccattttaaagtgaccgcttcagtggcacttactgtattcacgatgttgtgcaactactatctctactaatagtttcagaacattttcatcaccccaaaaagaaactccattcctattaaacaatgacttcccacctgtttctacccccagttcctggcaattggagaaatttgactataaactatatattaagtgatatttttgaatgaataaaaactgccttgcgtatgattaggtcattgccgtcataggagaagtttcttgttctcaggagatgcatgtggagtgtttaggagtgaaatgtcatggtgtctaaatgttactttcaaatggctcattaaaaaaatggatatatattgtatgtgtgtgtatacgtatacatatatatatattgagagagagagagagagagacagagaagcaaaagcaaaacatttactcatatgttctcacaagtgggagctaaactagaggatgcaaaggcataaaaatgataaaatggacattggggacttggagggggaaggctgggaggtaggtgagggacaaaagactacatattgggtacagtgtacactgctcaggtcacaggtgcaatgaaatctcagaaatcaccactaaagaacttaaccatgaaaccaaaaaccaccagtaccccaaaagctacagaaataaaaattaataaaaatgtttaaaagcatacatttaaacatttttaaagtttttaaatttagctggaggcatttatgatactattcttctaatttttctatagttttataatatgttttgaaaaattaagaacagcaatgcctgaaccttgccctaatccagtgaaatcagaatctctgggacccacctggatattatttgtattttaaagtctctctctggatggctctgatgaacggacaaggctaaaatccacagcctgagaccagcctccatctgcagcctcgtttttcatcccgcttccccacactgctagtcctaaaggctcgctgtctcctgctgcaacacacagagctcattcctacctgggggcctttgtattgctgttccagctgcccggaatgctccgtcctctgtcttcacaaagtgggcttcttcctgccattcaggattgcctcctgctggttctcatccctgttcccctttcttcaagccaggtatgaactcacctttttttgtaaagctggaatctcactgtttcacccaggctgcagtgctgtggtaccagtcatagctcactgtagcctcaaactcctggactcaagtgattctcctgcctcagccttgtaagtacctgaaactacaggcacacaccaccacgcgcagctaattaaattttttgtaggataggcctttgctgtgttgcccagactggtcttgaactcctgtgctcaagcgatcctcccgcctcagcctcccaaagtgctgggattgcaggagggagccaccgcgcccagcccgatctctccttcttcaagttctttgtagcgttctctttggaccaaccttttgtcatttgtcatctttgcaccgtggatttgtgagtgtggaaatacccctctgtgcttcatttccagccatagctgtgcctttttattccccacagcatctcaaggtgcttctccccaggtggaaggctccggatggagcaagggtctgcgtccagaggggtgctgtgaccacatggggaactttttgtaaagatgcccttgatgtttgcaggcagggagggagcagactggtagtgaattaagcgcattttcagattctcttctcattggcctgttgatgacagtcacacggggaaatacttgggaagggatgtgtgtagcaaatgtgggcagaaccttaaactctggttttcaagtcgggccacattcaggcaactgactcctagaagaaaacaaactccagtcttctttggctaaagatagtggcaataaatatcttccctgtttgttctgagcaaagactcagcaagtcttgcgtggccccacgtccttggcgcgggtggtatttgatgaggtttctctctctgttccctctctgattgcactcgaatgctgtttctgcaattaactctgtgaggaacgaccattaggaagtggtcttaagtcaagaccaaagaactcattaagaaattatatttttcaatctgacggagataggcgagactaaaaggaaggtgtttgaaccttgtacggaggtttaaaggcaaatatatcgggctttcccgccgttggggttaattgaagccactaagagcattactcaaaaaaataaaaaacaattaagagttaacctgtatctggaaaagcctcatacaaaattctgaaattaattcttgaactgtttccaaaaaagcagagaacaggcctgttgctatggaaattgtcgactttttttcttttgcatagaaaaagttaaaatgttacataaaaaaaaaaactacaacttttttccctccagattgctatcatttggccatctaatttaaacagttcagcggcgtgcacatttgaactgaattgaacaaagcaacattaaaagagagggtgctatttagaagattcgagtggcctcttttcctctcattgcctctcctgtggttgtgtactcttagcttgctgctgctcttgttgtctttttgcgaggcactttcaaagccctcagtaaacattaggcagagccagccccgtgtgtgatgggtcaggggttgtcactattggaggtgctatatcttggtcctggggtgtccgtgtgtccagccaagagcccaggagccctgggaagctgcctgtccacggtgggagacaagcttcttcctcttcagctccgcggaccatccccagtctctctgctgagcacccaggcggctgccgctggagacacttcccaggcttgttcatgaagggctcactctgagtgcctggtgtttacaaacctccagggagcatctctttcagtgccctggcacttgctgaaaagtctgcggggaataagagtaactgtccataatagagtaaatggtgatttaaaagccccccacccctcacccctggggacttcacgctgcttctagaatgctctatcttcagacaggcagccaagcccctgtttgtagaacatgaaagcagaggccacaaagcaccagagaaccacaataattgagtcataatgaacgtgagatacttaatctctgtcatctacaaagcctctgacaacttcatcatgcggcattttcctttatgtccttttccccactcatgctatgaaaaaagaaaagcaacgggggatggtgtgagacttgtcagtatttggacatgtatcttcagccgaaattatttgccttctcagattcagtaaggaggccccattttcaatcagcgtgaatgccggattctccccatgaccagggtgaaatcagcggcaatttcacagcagtcaaactcacagggcagtgacagtggggaagagctacctccttctgaggtcgtcattatatgctgagctcaagtctcagatctaagaagttctagatgctgggccatgagggatgcagacaggtgcaccagccttttggtggcatgagccacagacaactgctagggctcagacagaatgtaggatgtccctgagcccacaaatgccaagcgtcttccgtaagaaagtctaactcctgactctggaggccacacatttgcaaatgccaaactttcctgatcatgagttgtccattctccctttttctcaaaggcatttaaatttctccatctcagttctttaatcaactatttagcaaacacctattgactggagtcaatagtaaccttaaaagaaaacagcatgggtttgcactttaagtagattagctttgcagacctctaaattctgaggctgtctttgtccttgattgcttttgcatctcccattatatcaggcatgggaccccatgcttcagaagggctggggtaattcagccactccaacctgcattcagtcattactgaagcagcgatatattatgaaatgacctaataatgccatcatactttgcctctggggactgattgctctgctgttttctaagaagtggtttcattgctgcatagacagatacaaaatgcataaatgaatacagagcctgtgggatgcaaaagtccaaggaactaggcctagagtaaggtaggagaaatgtctccaaatccagttttgaggtctctcttgttgcaagcaacagcaattggtacacgtgtgctaaggaaaagggaacttttgggaagcatactgggcagtgcatggaaggagtggaatcagctctcagggccgtggaaacagctctcagggcagtgctggaaagctggggctcaaaaatggccacttgcttgtagctgttgtgaccagtgatcgcccctgtccctcctgcgcctgtgtccacttacttaatcatcatgctcccagggaagaagcatgattggctgagtttggccacacaccatcctttggctgtcctgtggcagggagagaaagaatacggctctttccacctccggtcccttaaaattactgtcttatcaagacgttatacaacaggcaagaggtaattccctgaaaataatttggtgccatcagggaaggaaatggatgctgaggttctaaaacaaatgtttatgaaagaaaaggctatacctgttgccttgattagtatataaggaaggcatacagaggttttctggtcaatatttaacaacctgctcttcagggaggggaaaatagaaacccttatgcatagcatttgcccatttctcaggtgtaaatactcccactatgattaatttcaaattgccaactggctcactgaatttctcatttaacgtttggccttcataagcgagtaagagtcagagtcaccacactcctagacgtatgatattatttcaagtgcttttttttttttttttttttttttttttttttgagacggagtctcgctctgtcgcccaggccggactgcggactgcagtggcgcaatctcggctcactgcaagctccgcctcccgggttcacgccattctcctgcctcagcctccagagtagctgggactacaggcgcccgccaccgcgcccggctaattttttgtatttttagtagagacggggtttcaccttgttagccaggatggtctcgatctcctgacctcatgatccacccgcctcggcctcccaaagtgctgggtcaagtgctttttagaaaagcatagtaatataattcctaaaacgatcccaccgcattctcccatttctgaaacaaataacctgctgaatgttagatgtggtaaaagtaagacaattttttttgttgttgttgtcactggtgaaaattggtgggaggcattgaaggttacatcactgtttcaaaatcacataactagtagttggtggagctgggatttgaaccctaatgatatagctactgaactgttatgcagctttttgcctaacaaaccactccgaaaaccacatgacttagagcaacaactatttctttaccttgcaattccgtgtctgtcatttgtgctgtgctccgctgggcaggtcttctgctcttggccgggctcactcatttgtctgaggtcaactgccagtcagctaggcagctctgcttataggggtcgactggctatcatctgggatgatgggggcctcagggccatctgtgtgtcctactctagcgggccagcctgggcttgtttgcatggaagtcccagggctccaagagaaagagtcgagccaatgcccgggattggaactggtataacactgcttttgccaccttctttcggccacaacaaatcacaagtccatcccatgtttatggaatggggaaacagatcccacttcttaataggaggagcttcagagtcaaactgctaagggacttttggatacagggaaggcaaaatacgccctcttttataatctaccataagggataacctgaacatgcaattatactcttcgtttcttatttattaaccaattcgtattaactttgcttagcacatgggttagagtctggtggcttgaaggagtgttttgttgggcctgtgtcatattttaaaaattaagaaattttataggccgaggcgggcggatcacgaggtcaggagatcgagaccatcctggctaacacggcgaaaccctgtctctactaaaaatacaaaaaattagccaggcgcggtggcgggcacctgtagtcccagctactcgggaggctgagacaggagaacggcgtgaacccgggaggcagagcttgcagtgagccgagatcacgccactgtactccagcctgggaggcagagcgagactctgtctcaaaaaaaaaaaaaaaaaaaaaaaagaaattttatttagaatctgttttcttattttaccttaaaaatcagagggtctgaaaactgagcccatttttctgctccaagagtttggagccagaaggctgctctggggggcatgtgctctcggctccatcgtagctccagtcactccctatagtgcctcccagacaagcctgctcatttactgaaattactttcctggtccccggaggcgtttttgtttacagtgtctactatagtatttcagtgcctaagtctttgacttcattaagttaattgtgttaacctactccactgctagaaacaagtagaccagataacttcttattagttcatgctttgggtctgtttacagtttattaggatgacttctccatttggactgaagccaagatgaaacctcatccttgtctgatgttatcataattccattatgaaggatgtcatgacagttttccaatgtgcaaggcgtgaagatgcaatcttactgggcttggctatgactctgttacagtgtcacccatcagagtacaaactaatcatgctgtaaagaatcccattgtctcaaaaatagcagtggttttttttgacaggtgtctccttagctatgcagtgattaaagtaaataaagctgctgcttcccaggaaggtgactagacgtttccatgtcgaaactctttgccagggaaggaagtgcatttgacacacagaagcagaaacaaggcaacttactaggaagtggaatcaagtttaacatgcaatagatgctagaattttctagggaaatgtccacaagacctatgaagatttgacgatcccagcctgcctagagagggatgtagggccctgagtttcacaagtgagttactaaaagtagctcagtggtgtgaaaggaaggcactgtgctttctggagcagagctagccagtcaaacattgtgtagtggtggtaatagtctatatcagtgctgcctggtataagcagtcacttgctgcaggtagttattgagcatttgacatggctcatttgacggaggaactaaacttttaattttatttaattttaattaatttaaatttaagagtcacttgtggctactggctatcatattggatagcagggaacattaagaagccctaccttgaactcctgacttctgggtgttcaaggtcaaaaataaatgatagaataagaccaactcattttatagttggagttgcaccaaagagagagcctttgagatcagggaccctatgtttctcactgttttatttccaattccctcagcagatgagggtcacccatcaatgacagttgaatgattaaagaccaataaaatgccctaggctatggtaaataattccaaaaacatggtaggcatgccactggtaagataccaaattttagttacacttcttttatttactaattatgatttgtattcatatgcataagaaaaaatataattcacttatcaaatttattgatggcacagaaggaagtgaggctgcatgttttaaaagtgagtttggttgaattcggtatacagaaaaatatataaataatgagatagttggttctcaaatatagcaaatactgcaaaatgaataaggcaattacggaaattcaaggaattctgctgtggatgctggcaccctttgtgctctgattatgacgagttatttttctccttatttttcttttttattaattggcgcatatgcctcaaaacataaaatcttgtccttcaaacctttgtgcagctgagtgaactactttttctttttttcttgtttcatttggcttctcttgtttttatttggaagtaagccgaaagcatgaatattcatgatgctgttaaacaagatttttattgaaaacaaaaacagattcaaagtttcttgtttgtggctctctagccagagagtaaaagccccattgaaagattggtatcagagatttgggttctttgctgtttacttttgctaaaaatgtagatgtttggctactaaggggttagtctgttttagaaaaaaaatacaaaaataaaccagtattacgtttctagactgcccttttctatccttgagcaccagaggaagacaagataaaataataaatgaaaaaaagggagaaatattgtttttcctgtttgtcctaagttcaagagaaagaaaagacacaagcatctacagctaaaaatgtgcctttgatttttcccaggcttcctttactttctgatttctagaaaattgatcctcttcatcctttttaatttgtgtgagtctccgcctgctacccccggcaggaaagagggctgcatattttgtgaggttcattaatcaacccattattcttcctcacacattccaatgtgcagggccactcatttttcatgagacctattgttacttggcagaaaataaatacaccatcaaaaatgtattgcgacactgactaaaatttgaaggggagtaagcattgcactttcggtctgtacaaacaatattgatttatgaaaaagaaattcccaggagagtctttaaaaatcaaacaagtttcctcctgatgggtggggtgagtttgaggctttgtgccacaagtcattaatttattcactcattcctttagtcaatacatatttattaagcagctactaagtgttagctctccaccttgggcagtcaagagtgagcagaacagacaaaaaaagggacccagtggagcttacactttatgggtaggtggacgaccaccagacaacaaaataaaatcacttaaaaatacagtgataagttgaaagaacaaaaattaaattttaagtattatttaccaagtcttatatccagaaacaatttgaaaaagagaaggaagtcgaaatgcaggccaagcaattttcttttattttttaaaaaataaaaaaatgcaattatgattatgattatttttgatacagggtctctctcactctgtcacccaggctggagtacagtggtgcgatcatggctcactgcatccttcacttcccaagactcaagcgatcctctcacctcaggctcccgagtaatagctcgaactacaggcatgcgccaccacacccagctaatttttgtgttttttttagagacagggttttgccgtgttgcccaggctgatctatagaaagcctggactcaagcgattctcccacctcggcctcccaaaatgctgggattacaggtgtgagccaccacgcctggtcgcaattttcacaagtgtgttaatacttaaggcaatgtgggctgggcatggtggctcacacctgtaatcccaacactctgggaggccggggtgggtggatcacttgatccactgtgtctactaaaaatacaaaaattagccaggcatggtgatgtgcctctcgtcgcagctgctgttggtgggggggttgtagggggccgggtgctgaggtaggagaatcgcttgaacccgggaggcagagatttcagtgagctgagatcacaccactgcactccagcctgggcgacagagtgagactccatctcaaaaaaaaaccaaaaacaaaacttaaggcaatgtttccagaatgtgatttgtgcatttctggctgtccaccgatccagatctttaaatgatattaattataagtataccatttaataattaaatggtcataattacatatgtatcgttagggtggactttcattttttatcaagtagcatgagtttttcatttatgaagataatatgaagttgtattttgtagtaaatgtgtaagttagaaaggcacactgtaaagaaaaacattatgtaaactacagaaatggtagtatatggatatagaaagatggggatacacacctggctcttccagggggcttctaatacctgccttctattccaaaaataataactgaagaaggaaatggcagacaagaccgtgttgattctttagtgactgcagtgtgacggagtgtccctgcgaaggtggtttgcctgactccgttttctagtgctgcatagcagccactccagagcacagtggattcaacaagcagctgcttcaccggctcttgattctctgggttggccaggcagggctcaactggcagtcttgtctctgctccatgtggcataggctggattttctcatgcagctgcaatctaaggtgaaggatttcagatgacctcaccctgtgtctggtctcccacgggagtggctggactgctgagcttctccctttgtggtctttcaacctctctagtttctcccttcctgtgtctcaccagctttgtacctgggcttcttgacatggccgcacggtgttccaggagaacaaatgtagacactgctgggctcaaagagtcacactgagccagcccagaatcaaggaaagggatatttgactctggatgggagcagtgacaaagtcatgttgcaagcagacaagaagggtgggaaagagggcggcagccatctttggtaaaaatctactatgatccaccttctggagctgggagcaaaccagcgcatgcaggttggaagcatatagaaaaaagtggatgactctggctggttgtgtgtgtgttgggaggtgaggcaccaccccgcaggggctggggcagtttcagaataagaagaaggaaggggagaaaaattggctctttggccatctatagaaagccaagaaagatgataggttttgtacgacaagcctcaacatctcaacaattatgttcgatttttaaaaaaatcccagtatggggagagacagctgtgacacgtgaaggagatgtgtggagaccacaggtcagaaggtacagaaggaggcaaaagacctaacatgaaaaagatctagcgaagggggcccttttgatttgaaaggaagatttatgcttctttccttctgcatatatttgcccatctaggtccacaaggatatagacaagataaccaaagtgtactcgtgagctccttgggaaggtatataagaaactcttaagcacattcacacatcgaataataataatagaaataactatcatttatcaagtccttattatatgcctgcagtgtgttaatgctttgcacatattaatccacaggaggttaatgctctgaatttttcaaagttacggaaaatactactggtggcctacccagcatccacttccttcatcttagcagaatcctaatgaagttcaggtccatggatttgctctttctcacctatccctatacttcaggaaacgtgaatctcacccccagctccagaagttgatgtgattggtcttctgattcctattgttgtttacaaattactcagaaatatagaaggttaaaatgaccatttggttttgcctctaactttgtggggcaaggcttggctgggcaattctcacttggggtctcccatgagggaggatgcagaggtgttcgccggggctgaagtttcctgagagaccccctggataggacctccaggatggagcgcttatatggcttggagttgacactgacccttggctggatgctgagctggactttccaccatgtgtgatccaaccccaaaacaggagaatcaaagcaaagatagcagacagattcaagaagaggtttgtgtgcaaaccgatattcacaggtaccctggcttccaacacatgcttgagttctgatgtctcacctgccctggtcctgaggacgggttgtcacagagacaggagcctgcagtctctctgaagaaggcagttgatcctgtcccctgttaaaattggccgagaggcatagagcaggtggggttgacttgcctgtgggcagtggcagggttcagatactgtatgctgattttcttcctcctcatgtccacaaaatcagccaaattaagtgtgaaaggtagaaagttgaggccatataactaagtccttcatgatttctcccttgcccttcccttttctgctgtgactacagagtgtcaagaaaaatctgaatttttggtactccaagcaagctcaagagaagatgagtctaaggtgtgattacagcttgaagcaaagagctgctgggtaaataaatcatggtggtcaaatccaattaagtgggtctgcagtgactgggtctgccaactgaattcagtttcactcgagaccaggctctacccacacggaggaggtggttaatttctgaaacagaagtgggaaggttggaggcaagtgcatgctttgcagcccggccgtctgtgctcaggttcaggaggggaatatgtgacctactgaagcagtattgtggtcctgaaagatgacaagggaaccagtaagcaggatggggctgagcagccttattcatcgtgagagaaacaccctttctcccactgagatatgtatgtgaccgtaaacgtgttcaggagagagtgctccttactcccattgctggggaaagcagattttccactacaagtcattttgatcatgaatagaaacatattataatagaaacgtatgatcttgttctgtgggtgataagtaaacatgacatccattgtattggtgtttatagatgacaggttgtgcactcccagccctaggagagaacagccaaggaaacgaagacaaaacaggtgtgggccagggcacagtaatccaggccgacttacgggctgtgggggagcccgggggtagattggctcctgtgagctcagactgtggccccagcagcaaggagaggaagttcactgcagcatggattcagaaaacatctgtgtcacatcttgtgctgagtgtttataaaacaaagataaatgagatttcagtcttgtactctggaagctcacgtttctactaccagatggcaaatacgtcagctttgctctatttggagtaaatgcttgggatgatgtgttgaggaggattctgaggccatgcctgagtgaaggagagaggaggacgttgattgttgacatctgccctgcaccagagggagaatggcagcctacacaccacgtgggctctttcaggaaccaactctcttagtttcaggcaacagaatcttgacagcagacacacaaagactaaatctgagacccgatgcagtcttcagagatgtttgcgtgatttgcgtggacttttcttgtttcatatttttccttatttttattaacataatttactacattaaattgcacagaccttaattctatggtctgattagcctttttttttttttttttttttttttttttttttttttttttttttttttttttttttttagcaaaggtcttgctctgttacctaggctggagttcagtggctcgatattggctcactgcagcctcaatgtcccaggctcaagtgattctcccagctcagcctcccaagtagctgggaccacaggtgcctgctaccgtgcccggctaattttttgtatttttggtagagatgggatttcacaatgttacccaggccagttgcaaactcttgtgctcaagtgattcgcccacattggcctttcaaagtgcagggattacaggcgtgagccaccactcctagcctctgattacttttgacaaaagcatacacccatgtaacccatacctctaagaagacatagaacaatttcattattccagtaaatccctccatgttccctgccagataaccccatctgctccatgccgaagcaaccactgtcctgatttctatcaccatggttgagttttgcctcttctttaacttcatataagtggattcttacataatacactattttcgctggcttccttagctccgcgtgttttggggattcatccatgttgttgcatgtgtgagtatatcattcctctattgcagagctcacttccttatatgaatacactatgatttgcttgtcattcatctggtggcctccagtttgggctattatgcataaagctgctatgaatatttatatgcatgtttttgtgtggatacatgttttcatatattgtggagtgaaattgctgctcatagggtaagcaagcatatttttcactttttttaggaactgccagtttttcaaagtggttttacaccacttggcactaccaccaacattatttgagagttttgattgcagcattctgtcatcaaaatttgagattctccatctgtaaaaaaaaaaaaaaaaacagcgctttgggaggccgaggcaggcagctcatgaggtcaggagatcaagaccatcctggctaacacggtgaaaccccttctctactaaaaaaaatacaaaaaattagccaggtgtggtggcgggcacctgtagtcccagctactcgggaggctgaggcaggagaatggcatgaacctgggagacggagcttgcagtgagccgagatcgcgccactgcactccagcctgggtgacagagcgagactccatctcaaaaaaaaaaaaaaaaattaggcagtctagtgatgcctaatggtatatattttatttagctctcaaagccaacctatgaagtaggcactagtgctatgcagagtttactgaggttaatgctgggcactgagaggttacaggtcaaggtcatacagccaaacttcaaaggtccaagagaaatgggccaagtttaagaaaatgaggaatagtgggatggagataagcattttctgcctacctctaattttcatattcaactgatgagagaatccagccattgagagccctggatcatgcagttagtaaggatctaagttcaacgaatgtggaccagagtccctgttttgcactgccggccacatgacagtgggagttgtcaaatctttcagtttctcctaagaagccagaaatccatatatttaaaatacagtatgtcaattttagttcaacaatttgtttttatctgctgaataagccagacaaagcctagcagtgaaccccatttttaaaaatatctgtcgtacacaatagggagatattacagttagtagattgattatatatcataattcattttctgtatcattatatataattagaatatctcatatttatattttagtattataattatataattataatatatcatggagtgagtattataatataatatttagtattataattatataattataatatttagtattgtaattatataattatactaaaattatatattacatatttattatagtatatattataaacactgctataacagaaacccaaaataataatgatttggacaaaatacaatttagtttcttaattttatttccttctttcttgctcacataccatccagctgtgagcagtttagggttgtgtaatcacttcgtggtgctggggacgcaggattcctctcattcttgttccattgtccccggaacatggtcccctttgcccggtgactaccaccaggcacctttcccatcatggggaaggaggagaaatgggacaggaagggctcatcccttcacataaaagccgtggtgcaccagtaagcatttaacaaccagatctctgctggggggcagggagattgattggttgcttttgccagtttccatggtgtacatattcccaccatcgccagtttcaagctaccaacatgaggtaaactgaatgtggagtctggaagggatactcacagtacaggctgggctttgctgctctggcacgtcactgttttaagagctccatctacacattgcctctttcacttccaccaacatctccagaattagacacctgtctgcaagggaggctggggaatgtagtttttcgttgacattaagtccagtggccaggtggcccagctacaaactgaaggttcttttcttatagaagaaattgagggtaaatcattgagaccactggaagtctgcagtacaagaggttttagacaggggagtatcaggttattacaactggatttagaaggtcccactgcagccttggaggaggcatggaaggggaagactggaccagcagcccctttggagagaatggggaatagtggaggcggaggtaagcattctctgcatacctctaatttccatatttgactgatgagagaatgtagccattgagagccctggatcacacagttagtaaggatctaagttccatgaatgtgaaccagagtctttgttctgcactgctggccatatgaaagcctccctcaggagcctggtacccatgctgagagatcaggagggcctgaatgagctcactgtggctggggtagagaagaggacctgggtttgagagaccaaggaagtgggctctttaggatttggttgttggttgatagaagttggtggtaggatgtcagggttaaaaggagttagaagatagagcatgactcggaagtctctctcctggatgatagtggtgtcattggtgaaaataagaaaaacagacagaagaccaagttttgaggggaaggtaatgaatgctctcttgggccaggcgcggtggctcacacctgtaatcccagcactttaggagaccaaggcgggtggatcacgaggaattcaagaccagcctggccgagatggtgaaaccctgtctctactaaaaatacaaaaattagccaggtgtggtggtgagtgcctgtaatcccagctattcgggaggctgaggcaggggaatcacttgaaccagggagtgggaggttgcagtgagccgagattgtgccactgcactccagcccgggcaacagagcaagactctgtctcaaaaaaaaaaaaaaaaaaaaaagaatgctctcttaaatttatttgaatttgagattctcttggcacctccgagtggtatccagcaagtgttgaaataaggcctgaaggtccagggagggcagagtctggagtctcagattgaaaagtaataaaggttcatattagtagttaacaaatttggagattactagtcagaatttcccagtgaattctgcagaagagaactcgttgggagatagaataactagctagagtgatttcacttataagtgacagaaacccaaatcaagctggcttaggggagaagaagggggaaatagtgggtcatctaaataaaaactgtggtagaacaaacttcaggcatggctggatcaaggccaatgacagtgtcaccaggactgcctttagacccatctctcacccctgctttcttctgtgatggcttcattctcaggcagcctctcctcacagggtagccaggtggccaccagcaaatccagacctatgtcttttcaacttagtaagtccacttgttcaagccaaagtcttggagctgcttcctagtggcttctattagtccatgcagctattcctgaaccaattcctgtgaatgactttacctggctttagtatcgttctcaccccgagagctacagtatgggtcagtcccagtgccccaggcggtgccactcattgccaccccactgagtagcaatggctacccaaaagaaaataaaagttgtcaccagaaaaagggagaatgggcgttggacaagccaaagctacagatgttggtcaatgaatgcaagtttgcagggaggggcagctgctttccatgtggccatatttgatcagggagattcatgcaccctcctgtcctaacccgcaggactccactcttggcatactcaatcatcagtaggtttgggattttgccattggagcttttcccagctcagcagctgggtggggggaatgcttgatagagaccttaccaagaaaaaaaggcagcaaaccagaggcagcccccagctacccagggctcaggcctgccacggtgacttaacttgaaaatgagtagctagggagaggatgcgtgttcatcaaaagcctgggacttctttgtgttgttttttaaaagaaagttaatgaaggcatgtttgcaaaaaaagaaaaaaataacaataacagaattctattgctgaccttgtcagtgacccaaatttaaaagccatttatcttctctgtgtgtaacttgcacctcaaagtttgctcctggcagctattaattcaaagaggggaagaagaggcagttggcattttaaaatctacatgttctgattctcttgcatcaggtgccgcaggagtccagacaagggacatagaactgtgcactgcagggagcgtcatgaacaaggagcattgtgggtgggggaggcctatggacaattgataagtgcacacagaccccatccgaagacattttcaaatactttgagttattttgaaactctgtgtagatcaccaccccaccccatcccacccacaaaaacaaacaaacaaaacaaacaaaaagaaaacagtctgagaaagggacttggcctgaagactgtcagtgggagacccttaaaaggggaagcaaagtttttattgttcctcatttccgggagctccttcctcatggcccaggactgctgtgcacagttgtacaggttgttcactgctccagcaggctccattgagggaatgatgggtactgatgtccagcccacctcattgttcaccaggtcaggatctcataggcctgtgcccacccagggaaattttttgagtaattcattcaaagttgatgtgtgtgatagtggtgatagtggtgtgtcactctctatcaaagcccccagcaaaggcctctacctttattttgcttcaattcccaagccccaccttccagaactccattctccaggggtgatggagttcctaacctaggacctgctcataaaaaggcttctcaggcagagatttcagtgctatttggatgacacctcattctaaccgcaaaagcttgtgttgcaaacacaatcggattggagcgggtgcctcattttctgtgtgttcagcagaaggtgggtgccttcttcactgtgaaatccagcctccttggagctctgggaatgaatacagcttctgctttgcatctgttattttatttgtttgttttgttttgttttgtttttttgagacagagtctcgctctgtcacccaggctggagtgcagtggtgcaatctcagctcactgcaacctccacctcctgggttcaagcaattttccctgcgtcagcctcctagtagctaggattgcaagtgccagccaccacaccctactcatttttgtattttttagtagagacgggatttctccacgttggtcaagctggtctcaaactcccaacctcaggggatccgctggcctcggcctcccaaagtaaaggtggaattccaacagggagacagtggaggtatcagcggacctgaggatgtagtcagactttttatttccctgtttgagcattcctggtttcccttgcgttcttgtgtatttatttctggttttcccaaaattgtttgtaatgtgaagtcgaaaacctgaatatttttatagaaacaaaacttcaccacggtgaagacatgaaaggatctggcattcttcggagctcttcctcctgaaggaaagccacactctaactctttgatctcttcttgttttattgttgtattttacttcatttagaaaagtataaagtccctaaatcagtagtagggggagcaaaaatgtccacaggcccatatatgcgtaagccacaaaaaggaatgcttgtaaccttgatgaaggtctgtaatacctattttggaggaagagaaagaagatgagagccccagtgtgggtgcaacagttaggaatgcttttggctgcaagtaccagaactccccaataacagcagtttaaacaaatagtgggttgtttttctcatagatcaatacacctggaggtatgtagccccagctgaacagcccagccacatccaggctttgattcttgtatctgccatgcacttggtgtctggctcgtggctgcagacggctgctacagactccaagctgacattcaagcaggaggagaggagacatcctggccaaagctatgacttttattcttatcagaaaagcaaaagctagcctggaggtcttccggctacctccaattatatatcaccaactgcaattatatcacatggcctcatctttatatataacctaccgcaattatatcagatggcctcatctgcttgctgtagaagctggggaagttggtactttcttctttcagcatctatgatggcagggatggtggtttaccaaaaactcatgcttctcttttctttttcttttcgagacggagtttctctcttgttgcccgggctggagtgcaatgacgcgatctcagctcactgctacctccgcctcctgggttcaagtgattctcctgcctcagcctcccgagtagctgggattacaggcatgcaccacctcgcctggctaatttttgtatttttagtagagatggggtttcgtcatgttggccaggctggtctggaactcctgacctcaggtgatccacccacctcggcctcccaaagtgctgagattacaggtgtgacccacctcgcccagcccatgcttccgttttcttattgaagcatgtccctggaagggcctgcctggctagagcctgtgttccccgttcctctcccatctcggtgtgccatgagatacacaccagctcttgtccatctaatgtgagcagagctggcctgtgttgcttctgtgccccatttgtgtgccttccctactccctccctccttatctgtggctagatacagaggacaccgaggtcctagggagtgggcaaactccaagatgtgagttgaatggccatgtgcaggagaccaagcctccagccacgggcccaccttggattcatgtgtgagtcataaataaacctgtatcatgttaaaccaccaacactctggcatttactttttccagcagctggccctcccctaaataacacaggtatttcaacagacaagggaggagaccagaaaccctgtttagtgattggccaacagtgtccccaagctaagttctgtctagacacctaatctcctgatgtcacgtcaggcaacagttctccacttccattgtgagtcattagtttctttgatctttcctccaccatcagccttggagaataccgttcatgagcaaagggagcccatgcattaaatggtgcttccaagggtaacactcttcaggactgatacaccagcacggcaaggactgccttggacctccctttctcccctgcatgcactacagttggccctccccacatcctagttgggggtggatgatattcagcatgagccaggtccccagaccttagctgatggaccaggagcaggtgatctcacccagactgagctgaccctgtctccttttagggcatttgaaaatagaatgtagcatggtggctcacacctgtaatcccaggactttgggaggctgaagcaggaggatcacttgaggccaggaggatggtttgagaccagcctgggaaaaatactgagacccccatctctataaaaaatgaataaataagtaaataattagctagacatggtagcacatgtctgtggtctgagctactcaggaggctgagatgggaggacctctcaagtccaggagtttgggacttcagtgagttatgattatgctactgcactctagcctgggcagcagagaaagaccctgtcagaaagaaagaaagaaagaaagagagaaagagagggagggagggaggaaggaagaaaataaatagaatacaaaatataacacagatgagaagagcagacctgcaaggctgtgtgagcattagggcctcaggtaccacttagggacaacggtgaggggtgtacatgccagtgagtgaatggagatgagcgagagtaggacagaagcagacacagagaggggagagaaggaggagagtaaatccgggaggaatttcccgttttcccaagacttgggtgtgctttctgcaatcacgtcccttgagacgtcctcctatgcttgttggtctataagcagtgtcagagttctgtgtcttctgtccaaatgtctccttctttaaacccctggtgaggagacacccacatagataagctgttcatcatcctgatcattcttcatttctttttttttttttttgagacagtgtcttgctctgtcatctaggttggagtgccatggtgccatctcagctcactacaagctccgcctcccagattcaagccattctcctgactcagcctcccgagtagctgggattaaagacgcctgccaccacgcccagctaattttttgtatttttagtagagacggggtttttgccatgttggccaggttggtttcaaactcctcacctcaggtgatccacctgcctcgacctcccaaagtgctatggttacaggcatgagccaccacacccggcctcttcatttcttcattcacatgagagatactcatgagtacactcgacatgcctagcactgtccacagccaggcgtccacccaggtgacaccaggacaatccattctcctaggcacgtggtgagggcctgcctgggatttcctgtctcatcctaccctgaacccaggcctgccctcacgagcactggagtgagaccctgcttgggtgtggtgtgagggccccaagggccaaaagaacaccctcaagggtggcagtaagcatgccacgcgttaaggtgcagaacctgactacatgcatgctaggctctcagctgtggttctgcggcaccgggtgctcagttagccggttgctgattgccttgcagcagggctgtgatgagggtgtgtctgtgggaaggaggatgtgcacaggtgaggagaggcccggggataagggaaggcgagtgaagcactgggagtgaggttgaaggggcctccaaaagactccagagtaaagataacattgcatgaaaataaggtatttttgaaaaatcaaaattaatgccaaaaaaacccatatagaaccatatatctaagttttaaataaagacagaacagggtggggaggtggaagtcaaagtgggagaagggcccagaaatgagacagcgatgccgctgctgcgatggagaactagccagcatgtgtgaaggggagagcacaggaaagaaggagccagcacaacctccctctgggagctgcagacccagggatccaagttgtccttgaagagaaccgctggagagtcagcaaaatcctagaacagagggaagaaatactgtagccattggctcagtttgacctgcaagcatgctttgtttggcttatataaaatttacattttaccaatttaatggccaagatttaaacttttcatttgaaaattcaactttctgactacctatggcaactgagaataatggattgcttagagccaaatggagcccaatcgttccaccaggtcatgacttttttgcacctggagggctacacttttttcttctttggagacagggtctcactgtgtcttctgcagctcaggctggagtgtagtggtgcaatcccagctcactgcagcctcaaccttcagggcttaagccatactccatcctctgcctcctgagtacgtgccaccatgcctggctaatttttgttttttgtttgtagagatagggtttcaccatgttgcccaggctggtcttgaactcttggggtcaggtgatccacccgcctcggcctcccaaagtgctgggattacaggcatgagccaccgcacctggccaggtacacttctttatatgacctgtcctagtccccttggacattcaggtttggagccctgacacttggctacataggggaagagataaagctgcaaatgtgctgaggggaggtatttcttcatcctggtacctgataaagactttgccgagcttttgagccagcacttgtggaaggagtaggatttcaacatgataaggaagaggggctttcaggtgaaggtcagaagatgtgaggcagctggaaggtcaggcagggacagtggaattgttgaaacctcccatggaattgggaactcatggcgttcatagtgcaagcatcagacatgttgctaatttgatagaaaatcctccttctgaactatttatatgtgccatcatctcagactccgggtatgttggggtggtttcttcactgctttgtttaggaaattaatagagatgctattggcacccaggaacaatgggagaatggcagctgccagagatcttcttctccatcccagcatgaaattcatattcttaatacaaatgccaaattgtcatgtcttgtagagggtgagcattatggagtttttgatgataatggctgggctgtcttgggctgttgcttaaatggctgaattaaattggtttatattttaatgagatgactaatcataagcaattgttatggatgattgtgagccaactgagctgtttcgttgtgttttcttttcattccatttgttgttgttagtccatgaattggaacaattctgctccaagttggcctctccatctcgcagtagcaggggtcaggtccagattttggatcttaacacagcagtgataaaggaagcagggaaaggtttctgcaagaatggagcatgggggagggagcaggatgaagagcccagactggagctctaatactcagcttccgatcagctgcatctggagcaagctgccctctgttcttctcagcattctcgttccccatctgcaaaacaggcacaagcatctgtccatccatctattcattcattcattcaacagacatttgatgtgtgcccatcatgtgttacaccaggatgctcctcgccctcatgaggtttatagtccggtggaggagaggggcatcaatcagacggtcatacaggtatgtgaacctatgataaacatgtgctctgtgatgcagtgtgcaaggacatcacttggaggggatggggaatccggcaccatagggagtagagggcagagaggtatctggtgatgacgcaatgtctgactcagtgctgaagctcagcaggtgttggcctcagtgaatgcatgttgagcagagggaaggcgttaactgtgcagggctagcggtccagagggaacaccaaccccggggtgacaaggatgatgggagttagaagcgtagcctgaagtcctagtgaggggtgtgcagggagggcagggggcttagactttctcctgaaagcacaagtaagctatggggaagggaccaaatttactttttttttttctttttgagacagagttttgctcttgtcacccaggctggagtgcaatggcacgatctcggctcaccacaacctctgccttccgggttcaagcgattcttctgcctcagcctcccaagtagctgggattataggcatgcaccaccacgccaggctaattttgtatttttttagtagagaccgggtttctccatgttggtcaggttggtctggaactcccgacctcaggtgatccgcccgcctcggcctcccaaagtgctgggattacaggcatgagccactgcgcctgaccaaatttactctaaacaaacaaacaaacaaacaaaaaatctctgactgccaaggtggagaataacatgagaggctttggcaaagtcagaatttcccaaaatgtctcatgtgtaccactaatgttagaaggtacattaacttttttatttttataataatgtatttagttgaatatgtattagaaaaaaagaaaacactatcacatcaaatgagtcatggtacagatattactacttaagacaacttttaaaaaaattagtttaaaatattaaataacagtatatgcgtcatggttctaacaaaaatcatgaatcagactcaatgtgggaaacattggactttctttcttctccatttccttctagttctctaactctcttgtttcttaggtgttagaaacacaaagaattcaacacatccctcatagcaaccataccgcttggttgaagttacatcagacttgtaggggaagcaaaagggatcatttacgatgttttcgtgacatgaggaaatggaaacatttctctctgatttcctaattctgtcttggcagcctaagccatttccagaagagatctggtgtttcagataataaagatagcatttaaagcagggtttctcattttttgatcatgcacagagacacattttactttatgactcagatcatatatataagcgtgagtgcacacaagtaatatcataaagcatgcttttttttttttttttgacaggatctcactctgttgcccaggctggagtgcagtggctcactgcagcctcgacctcctgggttcaggtgatcctcccacctcagcctcccaagtagctgggactacaggcatgcaccaccacacccagctaactttctgtatgtttggtagagacagggttttgctatgttgcccaggctgatctcaaactcctgaactcgagagatacacccagctttacagccatgagccaccatgcctggccacaacatgcatttttgtatgcttgtatgctttgtgtgtgtgtgtttgtgtgtgtgtgtgtgtgtgtgtatatatatatatgtgcatttatgtgtgtgtatgtatatatatgcatttatgtgtgtgtgtatatatatatgcatttatgtgtgtgtatatatatacacacatgcatttatgtgtatataaatgtgtatatgcatttatgtgtgtatatatatacacacgtgcatttatatacataaatgtacctgtgtgtatatacacacacccacatataaatgcatatgtatatacacacacataaatgcacacatattatataaatacatacacatatgtgtgtacatttatatctgaaatgcagtttctgaaaacaatatttgcttttgctttatgttacaaactgatgcttctctgttctccttcatgacttacaaaagacttcatgacacccactaatctgcttccaaataccttatgacctctatttgaacaccactgatttgaagtttcctgttccaagtggaccagcttctgaaaagccggagtggagcgtggatggcaggacctggtggccctcatttcatttttgcggggtgataagaactggaagggtcaactgctgaggcagagaaagtggcttgtcgacttaccatcctgtcttgcttatgatggacgatttccaaccagtgaactctgacagcaaagaggcatttgtcgcgtgtcctctgaatttcctgttattcctagaccagttttcagtgtggctgagttgacttccctttggttctgtcgctcaggcagtggcagaagaatcttttcatccttgctaatcacctgcttttctgtggtctcctctgctacctctcggtcttggtaggagccaattttccaaccattgctaatttgggagaaaaatatgcaggacaggccagtggaggagaggatgtaaggaaataatccagttcataaaaccagcatgggtcaatcacatacacactaaagagccagtcaaatcccattgatacatgaactacacgcagctgcatgtatggggaataactggattccgttcagtcaaatttactatgcaagaggaatgtgttcaagttttggtgggctgttacatcaggtatctgtacactttttcttagtataaaaagcaaaatagtaaatatttccatctttgcaagccaggtggcctttcttgcagctactcaactctgtcttagacaatacattcaaagtgaatgtgctgtgtgccaataaaactttatttacacacataatcggcaggctgcttttggcccatgcattataatctgcctacccctgccctgaaccatgcatgttttctgtactttcactcttctttcatagatcatgttgcaagaaatctttgaatcagggtttctcaaccttggcactactggtattttgaatcaaatgactctttgtggtgaggtgctctcctgtgtattgtaggatgtttaccagcatctctggtctctgtccactaaatgccagaagcatccccgctttgatctgtgacaaccagatgtctccagatactccagaagtatccctgcttcgatctgtgacaaccagatgtctccaggcagtgccatattcccctccaggtggagttgggggaaaatcgccctcagtggacaacttatattttaaattctcgccattgttttccttcctgatgtatttgtgtgtttggtctctttgacagagatcttaaggcattaatttagggaggtggaagcacagatggcccctagttgctgctcaaagaatcaattatggcccacgacctccatgacctgaatcttgatcttccctcttctgaaccaaatggaaggaggttgtcaagctctgcccctggccctaggcatagctctgaaaaaagacaggaatatataagataggagtttaagaagttatctttgctaaaggggattaaaatgggaggcagcctgtaaccgagaagcagcattgcatagcatcatgcttgggtgcacagatcctggggtgagactgcttgggtgtaatacagactttaatacttcctggctgtgtgaccttgggcaaatcacttgacttctctgtgcttcagtcttctcatctagaaaatgtgaataatgttaattcctacccgctagggctatgtggaagattgaatgaattgctatcccaagtatgtagatggtggctgccctgaagtcagcactctataagtgcttgttgaataacataaataaaataaaagctaaccaaaaaaggatattctgaagtcaaatttccagcaatgttcaagtaggaaatttggaaatatttagttaggtatgaagagcagtcttctcggttccctaaaaatcaaaccgcactggctggctgtagtctgggggtagtttagggttacgcagatgaaataaccactcctcatactcatggtgcttccccaagagacctgcaggtaagtcctgcaggaggcacctgcacgtacccagtgcctcttgacacagatggttcaggagtgggttgggggcctctgtgctcctgcaaacttctgggctacataataactcgggtttctatattgatgtttgacaccatgagataatacaagattaaagacactctctgcagccccatgcgtcttttcacctgtctggccaattataaacaagcagtataatctccccacctctctgtgttccagagaaccttcctgtcttgtgagatgctagcagttctgggtcagagaccctcttccatgcaagattgggaaatattaggttagtcaacgggaaatagagttatttatggcagaactccagggagccttagtaggccattatgcactgggagcctgagggggctccaggtccaatctgttccctaccttccagggaacatgtgtgcacggagtggttgggaaagaccaccatggtgacagaagcttggatgatatcaaggcagacctttctatatcatgtttgctgtgctaatgattgctgtgaattccaaggggagataatatccctggtgggatcaggaagctctatgggctgacacctgggttggggactctgtggcaaaggacctcaaacatctgggggtcagcttcggcctggatttatttgagagcaggtgtgcaggctcctttgcctgggaacagtgtttttcatcccatttgctgttagttataaaatggtccctgatgatgtagccattcttgaggttcacatgaccaggagcccacatatatatgaagtctggcagtgcattaatttcctggagctactgtaacaaattatccaaaatgtagtggcttaaaacaatagaaatgttgatttggggcttctagcctccaggactgtgagacactacagggttggttccttctggaggatctagggaaggatctgctgccttttctggcattttctggctttaggtatcccttggcttgtggcagcatcactccagactctgtcttcatcttcactccagcctccatcttcatcttcactccagccactatcttcatcttcactccagcctccatcttcatcttcactccagccactatcttcatcttcactccagcctccatctttgtccttactccagcgtctatcttcatcctcactccaacccctatcttcatcttctctccagcctccgtcttcatcttcactccagcctctatcttcatcttcagtccagcctccttcttcatcttcactccagcctctatcttcatcttcactcgagcctccatcttcattttcactccagcctccatcttcatctttgctccagcctctatctttatcctcacgccagcctctgtcttcatctgcactccagcttctatcttcatccttactccagcctccatcttcatcttcactccaccatccatcttcactccagcatccatcttcatccttactccagcctctattttcatcttcactccagcctctatcttcatcttcactccagcctctgtcttcatcttcactccagcctccattttaattctcactccagcttctatcttcatcctcactccagcctccatcttcatcttcactccagcctccgttttcgtcttcacttcagcctctgtcttcatcttcacgtgtcttctgctcccagcctcttctttgtgtctccaataaggacagttgttactggattaaggacccacctagaaagtctgtgatgatctcatcacaggatgcctaacttacttacatctgcaaaaatcatttctccaaagaaggtcacattgacagtttccaggatgttgaagtatcttttggggatcaccagtcacccactgcaggccatgttatcttgaaaatgcctgatgctcttgataacaaactaccttattgtcatctcgggtccctgttacactaattccttgcatggatgaatcatcctgttgtaaaattttagaaccatggttcttaaactcgaggaaacatccacatcttctgaagggcttaatctgcccagggctgaaacacagattgctgagtcccaccccagagcatctggtttggcaagtctagggtgagacctgggaatctgcatttttaagaaatccctggtgatgcagatgctgctggtccagagagcactttgagaacctctggtctggcaggttttcttcaggaggggagtcacaagcatgctgggcccaccatttgcaggaagtctatgttcctggataggcagtaccccagctccctcaattgttgctcaaagacctcactgcctttagcacacactgtgaaactccagaaaaacatcacacctaggggtgtcattggtccatagaaaccatttgccaaatgccagatggggcagcttcactagagacacagtttatcttgcagcaaagcagcagaacaacatgttttacatccagacacatttccataagtaagattgcagcaacaacagaggtaatgttttgatatttgtcatagtaattagaatgcccgatgagaacgttcattgaagtggagaaaattctgacatcccgggagaagaaattacaatatagcccgtttgtgccactccatgcagtcccttatttttgttatgaattctggaattatgaatatgtctctcctttgagcagtggtctgttgaaaacctcacagtggcaagctgcacaaattggtaccacatagtatgtctcagaaacaacctgcccctttcttaaaaacagcagcttggagtaaagcctcaggaatcatctgtgtctcggtttttctgtatgtgaccagttatcagacattcccgacagtgccccctttggaatacttctttgcccgggacaatgacttacctaacgacttctccccgcagagcacagaatccagtgccgaggctacatgtggaagggaacgaggcagggacgtgaggatgtggcaacaattctgcagaagggctgtgggtgggggcacagcagggcttcaactccagggaccccatttccagaattccatgcaagcaccactagcaggtggggaggtcaggttacagccagaaggtaagaccccgcccccaactcgaaatgtcatttcttaggcatttaggacctgcgatttcttttttctcctataaaatgactcaggcttacacataaaaggtcacatattgtacttatttctattccatttatacataatttcatttatataaaatgtcccgaataatcaagtcttcagaaccagagaacagattagcagttgcaggttttggtaggggaagaaatggggagggaccgctaactggcatgcggttgcacttggggtgataaaaaatgttctggaattaaataatagagatggttgcacaaatttgtgaatatatgaattcacactaatatgctttcagatggtgaattacatggtatgtgaattatatctcaataaaaaaaaatttaggtttaagtttatactgaagaccactttattcaggaaaggacaacaagtagaggaaaaagggaaatcaggcagccaagtcccatctcttttgtccttgaatttcttttcagttctttcaaatatgtatcgcaatatttgctggtcccttcatctgtgcagagtgaacatagcggcaacactggcgtcagggttctgtgtgtaacttcacagaagcctcccagcagtcctgtacgaggtagaccctgggccaccccttttacagatgaggaagctgacgccctgcctgcccaggaccccacagctagcaagtgaccgggttgggattgaccaagggaggtaggtggttcactgtcccccatccgcttccaccagtggctcaggaacctacagaaatgtctgccctaccagtgacttttgctctgactttgtccagacattaaatcaagccatcttctgggccctaggacgtgagcttgcaactgagttcctgctttcctccaggtaggcagcaaagggcaaacttcccttcagagtcagtctctgatcatccctgcattctcctctgagttacctgtgactggcagggcaccaccaaaaaaggctgtccattggattaattcgcttggaatgaaaacagcaatgtctgatgcctgtgtccacaagatagggatgcagcaagctcctgggagtcggaatccttcctggcaacctgaggagacggttgcagcgtgcacatggcagtacagagagaaaggctggggagacatcgtcacatttcaaaacctgtgcaatgcagaataaagcaaggccacagaacgaagcttaatgactccgggaggttgtaatgggagagaaagggtgaagaaaagaacatttctcacgtggcttgcagctgcctccagcctggaagtggagcatttcctgtctacatcataaagtcatctagaaaaaagcctcctgtctgatctgatattgatggggactgggaaatgcatttagtgttagaagaaaaagaaaacacagaatttgctaaaatctctactgcattttaactatttagatcttagatcatggagcctagtgtttcccagcctcagctgcacagtacaagcagtcatttagggagttttgcagaaaatacttgggcctcaccccctggccagtaaatgtttgatctgtggcagttgggcccaagtgacggaacttcagataaatgtattgcacagctagatttgagcagcatttgattttatatttgcctactatattccctaagcaaggaattttattatacttcccacgttctgtaggaaagtctcaattatccacataaatactcataaaccaaatctgtacataaaataaaacctcactttcacttggacttaaaatatatcacaattattttttccagaaaaattagctttctgcttgtggtttgcttaagtttaaagtgacttgacatattagttagctactgctgtgtaacagaccacccccaaaactcagtggcctaaaacaacattcatttatgatttctctctattgtgaaggctgcctgggggagggaactggttggccgatttggagtgggctggtctgggaattctgctaaatcttgctgcgaatcttggctggactcactcacacgtcagttgggtagatgcactttgcactgtaaatatctcaacttcatcctgggccaccaagctagcctgggaatgtcttccttatagcaatagcagagaagaaaagaacaagcagaggccttccccgcatgaggccaaagcttggaagcagaaggatcatttccattgtgttctattagctaaagataagtccatggctcagcccagagatgggaaattggacaccacctccaccagaagggcaccgcaaaccccctttcagggctcagaatgggataaagaactgagacaactaatacagtatattctgataggcaggcaccattttgtttgtttgtttgttttgttgttgttgttgttgtttgagacagagtctcactctgttgcccaagctggagtgcagtggtgcaatctcggctcactgcaaactccgcctctcaggttcaagcaattctcctacctcagcctcctgagtagctgggattataggcacccgccgtcacacccggctaatttttgcatttttttagtagagacagggtttcaccatattggccaggttggtctcgaactcctgaccttaagtgatctgcccacctcggcctcccagagtgctggggttataggcgtgagccaccatggccagctgggcaggcacctttttattataagtccctgtagaatgaaacttggtcttggtctctccatgatgaaaattgggcaagaacatatgtttatccagagaagaacatgatggcataacaagacaaaggcattttctcactaggacttcaagccattccatagtcctacaagctcaagtccctgagtctatgagtagttatttttaaagttgcaacagtttgcaaactctgccaaaacccaaataggtgaagcatctctattggaaaaaagtaggtcaatgcatcatttcctttaaagcccataccacatgcagatagacgcgtaatgaatgctcattcgagatgattatgactgcatttccatcttcaatttagccatcagctgtttattgaaaaacactgattgttgtttttttatttttttattttttcaatctctaagcacttatagttcttaaacaaaataatcattgtggcaaactagcaaaggctcacttccacctcttaacatcaggaggccgtcaaggctgagcaaaggagtggaagtcagggtggcctcctttcagggaggaattccttccctgtgagttggcccaaagaacactagaaatttcattggctggactcttatcccggactttctctttatcccaatgagtagagtggagagtatttaaaccctacccagcctctgcttctaattgaactggtaaagtacttaagcattttgttcttttaagatgacacctgtcccatcttatagctcactgaaaggtgaaaagacaagtcctctggcttcaagcactctcagtgccacattaccggaggtacagcaaaggcacgtaagcctcctgaactatttgcacaccagatagatgctacaaggactcagacgcatctgctcatttaatcctgtctatccagcactcaacgacttatgccaagagatctcacgacagcgcctgcctgtcatggttgggggccagtatgttaaggatgtatggtactgttctcgccacctttctgtgcatttgcgacttttcataataaaaagttaagaagagagagacctcataaggctggcctatgacaatgctggacaagtcaaaccaaatcatccaggatctacatacatgtaggtggcctaagagtaggggctggcaagaacaacatcatgtcctttgcaaggacatggatggagctggagcccatcatccttagcaaactagtgcaggaacagaaaaccaaatactgcatgttctcacttataagtgggagctaaatgatgagaacatacctagaggggaacagcagatgctggggcctttcagagggtggagggtgcgaggagggagaggatcaggaaaaacaactaatggatactaggctcgatacctgggtgatgaaatattctgtacaacaaaccctcatgacacaagtttacctatgtaacaaacctgcacttgcacccctaaacttaaaagttaaggaaaaaaaagagtaggggttggcaaactacagcctacaggcctggtctggcaagtcagctgctttcgcacagccagggagatgggctgtaggttttatattttaaaaccactgggggaaaaaaagtattttgtgacaagtgcaaatcatacaaattcacattgcagggtccattgataaagttttatcagagcccagtccagtcatgttcgtttgtttatattttggccgcggctgccttcacactccagtggcagagttgagcagttgcaagagactgcatggcccaagaaatcaaaaccatttactatctggcgctttagaggagttgtctgctgacccccagccaaggtggacccgggccccagctctgctgcttatttgcaatgtgaccttaagcaaacgtcttaacttccctgagctcagtttcctcttccagataatgggaatggtggtgatgataatagtatccatctcatgtgagtattgtgagaacagtaagaattaatatagattgagtgcttaaaacagtgcctcacacataaaaatgattccttcagtaatgaggaaaattctgccagtaaatcatggggggaaaagtctcctttttgcccaggcatggtggctcatgcctgtaatctcagcacttggggaggctgatgtgggaagattgcttgagcccaggagtttgagaccagcctgggcgatgtagtgggaccacatctctacaaaaatttttaaaaattagctggacttgggtagtgtgtgtctgtggtcccagctactctggaagctgaggtgcaaagattgtttgaggccaggagttcaaggctgcagtgagatacgattgtgccactgcactccagcttgggcaacaaagaaagaaaaaatctcctctttgacctttctccttgaattcatggacagtcgggcccaggcaatttgatacatttggcttctgtgattattctgcatggaccttcttcgtggaatctaaaacctctgtatttcttaagctaaagtagacagcaataagccagtaagcttgcgcccaaagtctgagatagttccagatctacatcagaggtctccgccagctactggagggttgcaagttagtgacagcatccagtccccggcgaagccagcccatgcgggagctgaggcatctggctgcacccccttttctgaggctgcagtccccgttgctgcagcaccccggggccttcttgtggctgaagggaaagaacagctgtcctctgtgaggaccgcgtcagagctgaattttgggaattcccgagcttcccacttactagcatttagggtacagatttatcaccccaatcaggagtgtgactgtgagacctgaacagcctccccctgggccaggctggtgtgagggggacacagagcactggaggggaagccttgctgcactgcttacaaattatctgagcaggaagaggacaaagtcatacatcatcttccagcccatcattcaccaaaaaggattcggctgcttggaaagggcttgtgaatacattttccctgtcagctcagagagggtggggacggagcctatgttgtctcccagctcctcacagggtccagctccttgcactgttcccagcatctcgcacgcttcctggctcatagtaggtgattaatgaatgtgaactgaagacgcgaatgaacaggtgcatgtgagttgctcatggagtccaggcctgtgtgtggtcagttctgcttttattgtgatgaaacatccagatgcctgaatgtatcattgccagagtcgggcctgtatttccaccagcctagtaagggcagcggcaggtgacaccttgtaagggtacacgggtgctagctgtgacccagacactcagtgtgcattaggtcatttaatcctttcaacaaccttaacgatttttacgcaatgtagaaaacaaggcactggaggatcgtgaagtgtgtccaaggttgctcatatgccaggaatggggacaggacgtccaccaggccggacggctttggggccacggctcttcacctctctgctgtccagagtgcaggaaaccttccagggtgcttgcctgtcccaggcccccagacaagtgcttttccaccatcatcccctagaatctgcctcatcgccataagcacgcttgttaccccctgccgtgcggatgagagagctgaggcctagcagtgtgcagttcatggctccaagccgcacagggagtgagtgtcaaagcgcaggtcccaccctagccgtcggattctggagcagattctgaatcctgccttcccaaaaagggaagctcagagccttaacttgacatccatggtttggtgccagatgcggcactgtgctgaactgccttggcctccttcagaggaaggggaagggggcttggttgtccctggcttcccagctgcggcactggaggcactctgcttgacctggtggagcccctatttcctcatgaggaaatgaatgtaagaccacactagcccttgcaaagctgctgagaagcctttgcagaaccctggagcatgtggaaggtacacacatgagggccatttgtctcattcttctgcttcttcagtattgggtttcaaagggaatgcttctgcccattcagtgtgatattggctgttggtctgtcataagtagctcatattattttgagatacgttccattaatgcctagtttattgagagtttttagcatgaaggggtgttgaattttatcgaaggccttttctgcatcttttgagataatcatgtggtttttgtcgttggttctgtctgtgtgatggattacgtttattgatttgcatatgttgaaccagccttgcatcccagggatgaagccgacttgatcgtggtggataagcttttcgatgtgctcacctgagtgaggacgaaagcactggggaattctaagtaggggagtagtgatacaggagttattcagaaataactgaataactggattcggtttgccagtattttattgatgatttttgtatcgatgttcatcagggatattgacctgaatttttgttgttgtcgttgtgtctctgtcaggtttgggtatcaggatgatgctggcctcataaaatgagttagggaaaagtccctctttttctattgtttggaataatttcagaagaaatggtaccggctcttctttgtacctctggtagaattcgactgtgaattcatctggttctgggctttttttggttggtaggctattaattactgcctcaatttcagaacgtattagtctattcagggattcgacttcttcctggtttagtctcgggagggtgtatgtgtccaggaatttatccatttcttcttcagtatcaagcaccctcttcccaaagccccagcttcacaccttgagccagccactgagtcccctctctcctcccacccatgaatctcccacaatgcttatctcccagcaccaagccctgcacagagcaagagtccagcacatccctgggtgagtgggcagatgggtgtgtatgtgaacagggcctgggtgcagagccaaaaataaaataaagaatgcttgcttggccaggcatggtgactcatgcttgtaattccagtgctttgggaggctgaggcaggaggatcgcttgagcccagcagtactgggcaggagttggagaccagtctgggcaatatagcaagaccccatctctgctaaaaataaagatgaaattaaaaaattagctgggcatggtagcacacacctgtagtcccagctgcttgggaggctgaggtggggcgattgcttgagtccaggagtttggggttgcagtgagctgtgattatgccactgcactccagcctgggcaacagagcaagaccctgtctcaaaacaagaaagagagagagaaagaaagagagagggggaggtgaggggagaggaggggagggtggaggaagaagcttgctcaagaggcacaagacaagcagccgaaggggccatggagcccctgggtaatcatttgtgagtcactgaggggctccagggctccagaagattctccacactgcatggttactgccagcacaccacctggttttctgggttcgtcttcttgctccaccattcgatacctctgtggtggttgtttcctccctctctgtgcctcagtatccctgcttgtaaaatgcagttgctataaggattgggataaagtgtttacagcagagcctggccaatagcaaactttgtacaggtgtttgttgaatacatttctgtgaaccaaagcaatggtgtatggacatctgtagaactggctcttcagagccccgtgggaaattgtccaggaatggagtgagggggttgtgaaacatagccatcgttagagattgtattatatacaagtacaacgtatttcattgtcactgcacttctatataatacaaattatataaacaaaattaatatatttaatcataaatagatttaaacgacattaaaaacaaagataataaaccctcaaagctcatcgcttcccagtgattacactctacattgctgtgatctatgctcttgagttcattcatgtttattgtatctaaacggtaaaaatactacagatatgttcctccagtctcttccaactgcagttcagaatccccctgcagtagcttagactgaagagcatttgcaccatggaaactagcaaacaacataaagccgggctttggttttcccacccatcagagagctgttgttatatgtttgccagtgcacgaggatgaagctatcactggtctcaagtaattccctttaaaatggaaagacactaaggggacgacattctaagttgctttcatcttgaaaagcagtgacaggttttatcagatcacagaaatggccaaggttttgaacttggaatggagcagaatgaaacatgggggaggaagggccccctgcagctccagggaagctctccagtgagaggaaggagggtagcaggtgtccagcaggcactgtggattttctaggagcacgttgatatcataggcaggtacaatctctgggaccttccatgttccatatatgatgatatgtacatttctgtgttctggccgaatctccctccaagacttctgcctcctataaacatcttacttttcattgttatgtctcttctagtgggagatagaatggccgtcctcatatattaaaagggccattatgcaggaaggcaaacagctgtggggaaacattcctaggaagaagagttcagttgaactaaagaaagactttttggcagcgtggcgactcatgcctgtaatctcagcactttgggaggccaaggcgggaagattgcttgagcccaggagttcatgaccagcctgggcaacatactgagactccacctctatataaaattttaaaaactagctaaacatggtagtgcatgcctgtagtcccagctacttgggaggctgaggcaggaggatcacttgagcccaggagttcgaggctgcagtgagctgtgatcatgcctgtgaactccagcctgggtgacagagtgagaccctgcctcaaaaaagaggcagggagggaaggagggaaggaaggaaggagcgaaggaaggaaggttggttggttggttttcttagcagctagaggtgagcgccccaagaaacaggctttcacaaaaataaaaatgtcttcaaaaagtgtgagcagagcctgctgcccatctgaaatgatgctgggaaagggactcaggcttcaagagcaatattgaactaaggctccctttttttgttattattttgaaacaaattcctgctctgttgcccaggctggagtgcagtagtgtgatctctgctcactgcaacctccgcctcgcaggttcaagcaattctcctgcctcagcctcccgagtagctgggattgcaggcaactgccaccacacccagctaatttttgtatttttattacagacagggtttcaccatgttggccaggctggtctcgaactcctgacctcaggtgattcgcccacctcggcctcccaaagtgctgggattacaggcgtgagccaccacagccggcctcccatttaactcttaagtggttcttaatttggaggggatatttcccctaacccttgcccaagggaatgtggcagtgtctggagacatttttggttgccactactggggagtggggtgctactgtcatctagtaggtggaggccaggatactgcaaaacaccccaaaaaacacaggacagccccccacagcaaagattcatccatccccaatgtcagtagtgccgaggctgagaaaccctgctctgggatgcaatgaacctccagtctcaggccgtactaagatgatgcgttaagcggattgctcttcccccttccagccatcccactggatgcaaatattgagctgacggagggcgcggaggtttctgagggacagcaaagcacctttcccttcttcctcctcctcctctaatttgcatccacttttccttttgcggcagatgtatgtcatgtttacagcacgtaacgcttcaaagttagactttgaggtgtagagtccataaaaaatggcttctccctggatagtcggagatttccattcatatttaggagacggggactgacacgttgtgtgttcattttattttagaaatgtgacaatgcaataattcacagagacagagccaaagctttgtagtctactcggcgacaccttctggacctagaacacagtctgcttggctgggtggggacacgttcgtaggcacattgggttgttgcattttcagtcttacatcgaagtattactgttttgaagatcgttaccatctttattcagagcccttggtgactttaactttgagaagtgacagcattctccagacattcctatctccaagacggacatgtggtgagtgaggcaagagctgggggaatctaccctttctcaataataggaaaagtaattaagggaacacacaaaactgggcacaggaatgaaaatggattgggaggaaattagcccgaggagagtctacaagctaagaggcaaaggaccatcccacccagcagaccctccttctcagttagcctcagggactttttcaaagccctgccctgtggaaagtgtgggtcgctaagactttgaaaatacttactgcttctggagaaatgctgtttccttgacaacatgccttttctctttatttttcacttgcctttttatattctcaccatcgttgaagaaacaatgacaagcaaattaccctgtgggaggagagattttgacaggcatagcctctcagcgcttgggcagtccggggaagttctggtgaccattatatctcattgccaatgtcacctgaaccgaatcttggcagagaatttgcaacagctgcggaaataaatgcatctctttaagaatgtgtttttagatgcttgtaaacatgtgtgcatgcaaacacacacacacacacacacacacacacacacacacacacacacagctcagcacttttagtgctagtactagtgtgaaatccaagaaagaaacaatgtcaggaaatcgtaatgattctaaggctgtaaattgctactctgttctagaaacttactagctcagcccatttgagagccaaagtggagaaaggggtgccagggtattccggaaacccagccaccgaccaagggactttctggagtgattggctgtgcacagatcttgcgtggtattgctcattcaatagctccctgctatgctatggcagagtgccccgccggtgtctggttccagggagctcagtgaagtttgcttcctgctcttcctcacccatcctccttgttctaatcagccccttcaagcaactgtttagctggcatttgctcaccctcttccccgaccaacttcactatgttgttctagccctgaaatgaagaacttggccataatctaacacactaaccattcttagcaattttacaccaactgccccaaaatgagctactttggtctctctctggccttcagtatagtcttttatacatataaattgtgtgcgtgtgtgtgtgtgtgtgtgtatgcctgcatgtatatgtgcatatatacacaagcacacacgtgaaaggcgtagatcttaagtgccccatgtaatcagtttcaatggtgtgtatgagtgtgtgtgtgtgggtatatatatatatatatatatatatatgcatgcatatgtgcatgtatacacaggcacacacgtgaaagacgtagatcttaagtgccccatgtaatcagtttcatcgaccgctcatcaagacacagagtgttccagtcacccttggaatctccctggggccccttcatagtcaaggaacaccctccacatctccataggtcagttttgccagtcctggaattttgtacccacaggatcatacagtctgccactggcctcattctctagatctgcactgtcaatgaagtactcactagccatgtgtggctgcttccattaaaattaattaaaaccaaacttcaaaacacagttcttccattgcagtagccacatttcaggtggccactgaccacacacacagtggtgtcctgatcagtatttagccactggctctctaatgggaaagagcagagttctaatttgtagcacttgccagttcccacggtgtaactactcacaccatagctaatttcaaagatggctgcatttaccaactggctggaaaaatttatcagatttaaactactggctccagcctaccactgcatggcatgtggctagttgttaatgtgaacagtgtggatcatagaacatttctctcaactcagccagttctattggagagcagtgctctgaatgtgtaccctgtttgattgactgattttaccatttattattacctggcaaattaacattatgcatataatatttagtattttaaaatattgatattattggctaggtgtggtggctcacacctgtaatcccagcactttgggaggccaaggcgggtggatcacctgaggtcgggagttcaagaccagcctggtcaacatggtgaaaccctgtctctactaaaaatacagaaattagccggacatggtggtgcatgtctgtaatcccagctactggggaggctgaggcaggagaattgcttgaacctgggaggcagaggttgcagtgagcagagatcatgccactgtactctagcatgggtgatagatcatgactccatctcaaaaaaaatatagaaagatattataaatattataatactaaatattgtatattaatgttatatatacttgttttctgttcctacaactagaaaatgactttcttcaaacgtcaaaaactttctttgcaataactaggatgcaaagggctcttaataattacttaccgaatgaaaacaagttgaatgttttcaaacaaaacaaaaaatccattaacagaaaagcttttataaataaaattttctcttttcagttcatacctcagtgctgttcgtcccacccaggttgataaaggttgcgattcttcatgccaagaaaaaagtttttatccacaaatacatatggaggatcctttcaaggctgttcctcctggggtgctttagagagtcccagatcacataattaaagaccaagggtgcagactagcaggactggtccccgggcagtgggcggcaggtgcctctgtctccgttccttctcctccacgtgttctccagctgtttcctctcccctgtccaccccagtcagtactgatgggggcgttttcctgctagacgagggtggaagggcaggtattcacaccaggatgccaactactaagcggtgttacagatgatgagacgtgtggtttttctaactcaccttgactttcttcttgcccaccatgctcatgttagaggaagaggatgggggagaaaggaggcgagaataaaagctggaaaaaaaaaaaaccatagcctcttagctgctgtagcacagagcgtttaagggcttgctactgtgttaccgtgatgtctgtgagatggaggttgaactgagagagcgtgagaaggagtgcaggacagactacttgtgagatttaaaggcaagctgatgtccctccattatatatttttatatgctcatatatatatatatatatattctgtccacaacacagaagtgaaagtgattgtttaaatctttaggtctgatcatgctactcccctgctcagaatttcccagtgctttcccaccccactcagactcatatatatatacatgtgggaatatagatataaaaaatttcacatgcctcagtcagaaattttctcgcctcactcagactcatgtctatatatgtatgagggcatgtgaaatatttgtttcatgagcgtccttctattaaagagccaccaactgaacaggacagtagctggcatttttttacaacatcctgaaatatacttttcaagccaacaaacaaaagaacctggatgttccctttcgtccacgtgtatgccaccaaaatcgttgtgtttgcagacatgtcatggaccccaaaataagcctgagaagccacaggcttagagtctaggctggacattcacatttcagccgttccttcaagatataatcccaactgaattccaattgaagggactaagtatggatgaataagcatgagtgggaggctagcaagggaggtgattgggggaaggaggcccttatgtcgccctatcttggtgagcactcagttcccttcaccgagtgtgaaagagactgggttttgagccaagagttttgctctgatccaagaaccagctttggtcatggatgtggttcatctaggcaatgcttgtacctggcttttgtcgtaggagctttcctggcccttcagtggtcagaagcaccagtgggttttctttccctcgccttgccctggaagagatcacctggccaccacgatggctcccagacaatgtgaagcaaattccccccttccacaccctcattgcccctggcagtgtatttagaggaatgactttgtgggtggggcctggcacctcactgaattcagtgaggggcaggagactgctggagacctaagccagtgaataatgatgcattctgcaactgccacattgaatgatatattttatcatagcataagctccttatagagagcctttgtggttgtgttagtgttggcatacccactgatcaatgctcaataacaagccaatcacaaagccaaatcctgaagagtggagtgggaataatattgatggtcaatcaggggaatagggtttaagaactagctctggctctgtatcaagaggcaattctagaaaagtccccaagttctaaatgccaaatctgcattggtttcgtaaagagaatagtgactgtcctttctatcccatgggatgattcattagtagcactctccagcctttctttagtgattaccctctatcaggcactgtactaagccctcattgccttatctcatttaattcatggccgcaggagcacttgcagttataataccaatttttcagatgagggaaccaaggcttacttttgagtaagactcattcaaggtgtagagtgagtaaggagtggagttgagatttcagcccagcattgtctggctccaaagaccaaatccttgaccatagtgtagccctgttgtggccaaacagaaggtgacaggcaaggtgctctgtagacaaacagaacaaactgcaccactgcagggacatttgttatcattgataaggagcaggaactctagctagagacaaaaaggggtcagatgaatttcaccaacttgctgcctggagcctccatttttcttgaaatacaatagcgttgaggttgatggatttggctgcaattgagcaatttgggcatctaaatcccattgattctgtccatgaattttgcttccggcggccctgccttggtcagcacggagcagcacatacatctcagcaatgtcagtgggctgcttgtgcccaatggagcgagagccagtcggagattagtccctgcactattcctgtgacgtctctttggctggcataaaaattgccaacagcccaatggattccctgagagctgcaagcacacgagaaactttttaaaaccactcagggctttttcagcgtgtcctcaactggatcctgctcctactctgtccctgatgtgctgacactgacctccatgcctctgccaggggcttgcggacctggtgctgacccacggcattcctctttggctaccgctccttggttctttctcaaggacgaggttgtaccggctctcaactgcaccagttcccaacttcaggttgcctccaggagtctgcttaccccactgtcctcttatggaccacttgccagtgacctttttggctgtatcagttcttttttttttttttatactttaagttttagggtacatgtgcacaacatgcaggtttgttacatatgtatacatgtgccatgttggtatgctgcacccattaactcgtcgtttacattaggtatatctcctaatgctttccctccccactccctgcaccccacgacaggccccggtgtgtgatgttccccttcctgtgtccaagcattctcatggttcaattcccacctatgagtgagaacatgcggtgtttggttttttgttcttgcaatagtttgctgagaatgatggtttccagcttcatccatgtccctacaaaggacatgaactcatccttttttatggctgcatagtattccatggtgtaaatgtgccacattttcttaattcagtctatcattgatggacatttgggttggttccaagtctttgctattgtgaatagtgccacaataaacatacatgtgcatgtgcctttatagcagcatgatttataatcctttgggtatatacccagtaatgggatcgctgggtcaaatggtatttctagttctagatccctgaggaatcgccacactgtcttccacgatggttgacctaatttacactcccaccaaccgtgtaaaagtgttccgatttctccacatcctctccagcacctgttgtttcctgactttttagtaatcaccattctaactggtgtgagatggtatctcattgtggttttcatttgcatttctctgatggccagtgatgatgagcattttttcatgtgtctgttggctgcataagtgtcttcttttgagaagtgtctgttcatatcctttgtccactttgtgatggggttgtttgtttttttcttgtaaatttgtttgagttcttcgtagattctggatattagccctttgtcagaggggtagattgcaaaaactttctcccattctgtaggttgcctgttcactctgatggtagtttcttttgctgtgcagaagctctttagtttaattggtcccatttgtcaattttggcttttgttgccattgcttttggtgtttagtcatgaagtccttgcctatgcctatgtcctgaatggtattgcctaggttttcttctagggtttttatggttttaggtctaatatttaagtctttaatccatcttgaattaatttttgtataaggtgtaaggaagggatccagtttcagctttctacatatggctagccagttttcccagcaccatttattaaatagggaatcctttccccatttcttgtttttgtcaggtttgtcaaagatcagatggttttagatgtgtagtattatttctgagggctctgttctgttccattggtctatatctctgttttggtaccagtaccatgctgttttggttactgtagccttgtaatatagtttgaagtcaggtagcatgatgcctccagctttgttcctttggcttaggattgtcttcgcaatgtggaatgttttttggttccatatgaactttaaagtacttttttccaattctgtgaagaaagtaattggtagcttgatggggatggcattgaatctataaattaccttgggcagtatggccattttcacagtattgattcttcctatccatgagcatggaatgttcttccatttgtttgtatcctcttttatttcattgagcagtggtttgtagttctccttgaagaggtccttcacatcccttatacgttggattcctaggtattttattctctttgaagcaattgcaaattggagttcactcatgttttggctctctgtttgtctgttattggtgtataagaatgcttgtgatttttgcacattgattttgtacctgagactttgctgaagttgcttatcagcttaaggagattttgggctgagacgatggggttttctaggtatacaatcatgtcatctgcaaacagggacaatttgacttcctcttttcctaattgaataccctttatttctttctcctgcctgattgccctggccagaacttccaacactatgttgaataggagtggtgagagagggcatccctgtcttgtgccagttttcaaaggaaatgcttccagtttttgcccattcagtatgatattggctgtgggtttgtcataaatagctcttattattttgagatacgtcgcatcaatacctaatttattgagagtttttagcatgaagggctgttgaattttgtcaaaggccttttctgcatctattgagataatcatgtggtttttgtctttggttctgtttatatgctggattatgtttattgatttgcatatgttgaaccagccatgcatcccagggatgaagcccacttgatcatggtggataagctttttgatgtgctgctggattcggtttgccagtattttattgagaatttttgcatcaatgttcatcagggatattggtctaaaattctctttttgttgtgtctctgccaggctttgctatcaggatgatgctggcctcaaaaatgagttagggaggattccctctttttctattgattagaatagtttcagaaggaatggtaccagttcctccttgtacctctggtagaattctgctgtgaatctgtctggtcctggacttcttttggttggtaggctattaattattgcctcaatttcagagcctgttattggtctattcagggattcaacttcttcttggtttagtcttggaagggtgtatgtgtccaggaatttatccatttcttctagattttttagtttatttgtgtggagctattgataatattctctgatggtagtttgtatttctgtgggatcggtggtgatatcccctttatcattttttattgcatctatttgattcttctctcttttcttcattagtcttgctagcggtctatcaattttgttgatcttttcaaaaaaccacctcctggattcatggattttttgaagggttttttgtgtctctatctccttcagttcttctctgatcttagttatttcttgccttctgctagcttttgaatgtgtttgctcttgcttctctagttcttttaattgtgatgtttgggtgtcaattttagatctttcctcctttctcttgtgggcatttagtgctataaatttccctctacacactgctttgaatgtgttccagagattctggtatgttgtctttgttctcgttggtttcaaagaacatctttatttctgccttcatttcgttatgtacccagtagtcattcaggagcaggttgttcagtttccatgtagttgagtggttttgagtgagtttcttaatcctgagttgtagtttgagtggtctgagagacagtttgttataatttctgttcttttacatttgctgaggagtgctttacttccaactatgtggtcacttttggaataagtgtgatgtggtgctgagaagaacgtatattctgttgatttggggtggagagttctgtaggtgtctattaggtccgcttggtgcagagctgagttcaattcctggatatccttgttaactttctgtctcattgatctgtctaatgttgacagtggggtgttgaagtctctcattattattgtgtgggagtctaagtctctttgtaggtctctaaggacttgctttatgaatctgggtgctcgtgtattgggtgcatacatatttaagatagttagctcttcttgttgaatccctttaccattatgtaatggccttctttgtctcttttgatctttgttggtttaaagtctgttttatcagagactaggattgcaacccctgcctttttttgttttccatttgcttggtagatcttcctccctccctttattttgagcctatgtgtgtctctgcacgtgagatgggtttcctgaatacagcacactgatgggtcttgactctttatccaatttgccagtctgtgtcttttaattggagcatttagcccatttacatttaaggttaatattgttatgtgtgaatttgatcctgtcattatgatgttagctggttattttgctcgttagttgatgcattttcttcctagcctcgatggtctttacaacttggcatgtttttgcagtggctagtaccggttgtttctttccatgtttagtgcttccttcaggagctcttttaggacaggcctggtggtgacaaaatctctcagcatttgcttgtctgtaaagtattttatttctccttcacttatgaagcttagtttggctggatatgaaattctgggttgaaaattcttttctttaagaatgttgaatattggcccccaatctcttctggcttgtagagtttctgctgagagatccactgttagtctgatgagcttccttttgtgggtaacccgacctttctctttggctgcacttaacattttttccttcatttcaactttggtgaatctgacaattatgtgtcttggagttgctcttctccaggagtatctttgtggcgttctctgtatttcctgaatttgaatgttggcctgccttactagattggggaagttctcctggataatatcctgcagagtgttttccaacttggttccattctccccatcactttcaggtacaccaatcagatgtagatttggtcttttcacatagtcccatatttcttggaggctttattcatttctttttattcttttttctataaacttctcttctcacttcatttcattcatttgatcttcaatcactgataccctttcttccagttgatcaaatcggctactgaagcttgtgcattcgtcacatagttctcgtgccatggttttcagctccatcaggtcatttaaggacttcactacactggttattctagttagccattcatctaatcttttttcaaggatttagcttctttgctttgggttcgaacttcttcctttagctcggagaagtttgattatctgaagccttcttctctcaactcgtcaaagtcattctccatccagctttgttccattgctggcgaggagctgcattcttttggaaggggagaggtgctctgatttttagaattttcagcttttctgctctgttttttcccgatctttgtggttttatctacctttggtctctgatgatggtgacatacagatggggttttggcgtggatgtcctttctgtttgttagttttccttctaacagtcaggacccttagctgcaggtctgttggagtttgctggaggtccactccagaccctgtttgcctgggtatcagcagtggtggctgcagaacagcgaatattgctgaacagcaaatgttgctgcctgatcgttcctctggaagcttcgtctcagaggggtacccagccctgtgagatgtcagtctgcccctactgggcggtgcctcccagttaggctactcggggtcagggacccacttgaggaggtagtctgtccattctcagatctcaaactccatgttgggagaaccactactctcttcaaagctgtcagacagggacatttaagtctgcagaggtttctgctgccttttgtttggctatgccctgcccccagaggtggagtctacagatgcaggcaggcctccttgagctatggtgggctccaccaagttcgagcttcccgtcagctttgtttacctagttaagcctcagcaatggcaggcgcccctcccccagcctcgctgctgccttgcagttagatctcagactgctgtgctagcaacgagcgaggctccgtgggcatgggaccctctgagccaggtgcgggatataatctcctggtgtgccgtttgctaagaccattggaaaagcgcagtattagggtgagagtgacccgattttccaggtgccgtctgtcacctcttcccttggctgggaaagggaattccctgaccccttgcgcttccctggtgaggcgatgtcttaccctgctttggctcacactcggctgcacccactgtcctgcccccaatgtctgacaagccccagtgagatgaacccggtacctcagttggaaatgcagaaatcacccgtcttctgcatcgctcatgctgggagctgtagactgaagctgttcctattcggccatcttggaaccacccccagtctgtaccagttctttatgagagaaacttcaaatggattcttcagaccactggctcacaatcttcctccatccccctagcatgtttgggtgggctcattaggatctaaagttctttgaggatctaaatatttttggttttattttgatggaatgatccccttatttaattatgttctccataaaggagactcttcaaatgcattgcccactactctccacaagatgaaatttagatgattggaaatgggacacatacggccactgttacagcttctattcaacattgtacccaaggttccagccaaaacatcaggcaggaaaaagaaataaaaggcttccagactggaaaggaagaagtaaaactgtctctatgtgccaatgacgtgatgttctatataaaaaaaaaccttaagaaggctgggtacagtggctcacacctgtaatcccagcactttgagaggctgaggcaggtgggttacttgaggtcaggagttctagaccatcctggctaacatggtgaaaccctatctctattaaaaatacaaaattagctgggtttggtggtgcatgcctgtaatcccagctactcaggaggctgaggcaagagaattgcttgaacctgggagacagatgttgcagcaagctgggatcatgccactgcactccagcctgagcaacagagactccatctcaaaaagaaaaaaaaagaatctgcaaagaaacaagcattgcatttctatacagagtaatgctcatctgaaaatgaaattaaaaaattttcatttatgatagcatcaaaaagaataagatttattccttagaataaatgtaacaaaagaaacggaagacttgtaccctgaaaactaaaaaaaaactgttgaaagaaataaaagaagatctgaataaatgtaaaaacatcccaggttttgcaattggcaaacttagacttaatattatcaagatggtaatattactctccaaagtgatcaccaattcaatgcaattactatcaaaatcccagctgccatttttactgaaattgtcaaactgatctgaaaatttatagggaaatacaaaggacccagaatagccaaaatcatcttcaaaaagagcaaatttgaagagctcacactttctgatttcaaatcttactacaatgctacagtcatcaaaactgtatggtactggcatataaatagacacatggataaatggaatagaattgaaagtccagaaataaacaccaagtaatggtcaattgattttcttttttaaatttttgtaagtttttaattattctggatacgcaatagtgtacatatttatgaggtacatgtgatgttttgatgcaggcatacagtgtgtaatgatcaaattagggtaattggggtatccatcacctcaagcatttagcatttctttatgttaagaatattccaattctaccattttagttattttaaaatatataataaactgttgttaactggagtcaccctactgtgctactgcatactagaacttattcattctatcagcctgtattttgtacccattaaccctctcccgactacccttcttagcctctgacaaccatcgttctactctctgtctctgtaagttcatttttaagctcccacgtatgaatgagaacatgcaatatttgtctttctgtgcctggcttatttcactgaacataatgtcctccagtttcatccatcttggtgcaagcaacaggattccattctatttatggctgaataatactccgttgtgtatctttaccacattttaaaaatttgttcatccattgatgggcacttaagctgattccctattttgcttattgtgaatactgctgcaataaacatgggggtgcagatttctcttccatatgctgattttttcttttggatatatacccagtagtgggattgctggatcatataattgttctatttttagtttttgaggagcctccatactgttctctatagcagctgcactaatttacattcccaccaacagtgtatgaaggttccctttctcggcatgctcactagcattcatattgcctgtcttttggataaaagccataagagtgagtgtcaagacaattcagtggggtaaacaatagacttttcaacaggtggtcctgagacaactggttatcctcaggcaaaacaacccagttgcaactctacttcatgccatccacaaaaattaatgcaaaatctacttggaagagctaaaacttgaactcctagaagaaaacagatgggtgtgtaaatttttattaccttggattagacaatggtttcttacaactctaaaagcccaagcaacaaaagataaaatagatcaaccagatttcattaaaatttttttaattgttcttccaagaaccctatcaagaaagtgaagagacaacctgcagaatggtaacaatatttaccaatcattatctgataagcatctagtatctagaacatataaagaattattacatctcaatgacaaaaagtcaaataattccactttaaaatgagcaacagatatgagtagacatttctccaaagaaggtacacaaatgtccaatatgtatacaaaatggtgcccaacatcattagtcattagggaaatacagagcaaaaccacaaggagataccacttcacacccattaggatggcaataatcaaaagaccacagacgttgggaagaaactgaaacattcatacattgatgatgagaatgtaacatggtacaagatgctatggaaagcaatttgtcaatttctcagaaagttaaacatagaattatcacatgatttagtagttctactcccagatatatatatatatgcaagaggattgaaactatatatctgtaccaaaacttgtacatgaatattcaaggtagtgtttttttataacagccaaaatgtggaaacaacccaaatgtctattaacagaagaattgataagccaaatttggaatagccatactatggacagttattcagccataaaaataataaagcattgattcctgctacaacatggacaaatatcaaaaacatgctacgtgcaataagccagacacagaagacgaaatattgtatgacttctcaccttccctttgcataccttcacttccatagctctcccccatatctgtggtacgcctataactaagactctattccatggtaccataggtggctcagctcccctgatggaaccaagactgatgcagccattcttgtcttcagcatccttaggccactcgagatagtcaatctagaatgaaggctggtggtcaattttgaaatcttgatgcacatgaggagactgtcatttaaacctcatcatcactttaatgttatctttctttctcttctgccatccacctgcatccctatgtgactcagaatgtcagccaataatccaaattcatcatagctcctaactaagtgagtggtgcagggttatcatccttataatggttacagcttgagaccatggaaaccattgtgtgctgagaagaagcatctaaacgtacattctccactcatggaccaataggaatgtgtgaacatgggctgtgacgtgctctaccagaagtttctggaaggccagagcttcaattatgccctggcttcaatacttggagttgggtggtgtgtcttggagagaaatcagatgattcaaccgccaaccacaatgattatctgaatctacaagataaaaatataagaatgagtctttgaacctgagagcagcagcagcagcatctatgtatccagatgaactttttgtaaggcccaagtcggttacatgtgggtggaaagaaacctgttaaaccttagaccatgattctcaaccattgcctcccaagcctttgtgtctgtaacactttgacatcctgagagccatccttggaaagcctgagtcagtagttctggggaggggcctgagtaccaatcctctaaatttctgcctgaaatcatttgctgttttctgtgtgcaaggtgatgatggctacattttagaagaaagtcattctattttatagctacatgccaaatatttatagatgaaataaacaaaaggaaatctccctgagtggttgcaatgtgcagccagggttggcactgcctggatgacacattgcatccaacaaccatgggtccacccaagtcatgctttggatgcagaagtgacagaggctgccctgctcccgagaaacttgcagccccaagggagagacaaacacatgaacaaacagtggtctgtgtgatgggtgtccttgaagtggtacaagccaggcacagggagaagaccgagatgtgtgtgtgcagttctccatggagacgtcaggaagaggcttgggagaacaaggtgattcctgggcttctacaggggccatttggataataatggtagctctttcagggcttatagctctaatttctttaacttggttacgatttcatttcctggctatattggaagaacacattggcagagatcatcacctttttcaccctaaagggcagatcctatgtaggtaagtggtatggtgcagccagccccctgggccatctacaccagagtggatccaaagctagtgtccccgaccagctgcgatgtgcctcaggatggagaggaagattcacataagtgaagacatcggcaattggcagcctcttggtttgtcttgacctagccaaggcaacaggttcaaggtgtgtcaggaataaccttgcccttttcaggacactccctcaccagagactctaatggccccaatggaatgtgcctaccctaagaccctacaaattgtggtggaggccttggcggcacccagtttgggccgggatgctccctttctttgaatagaaaacacatgtagatagaatgctccatctgctctgatctctcaagtacttctcattcagtcccatttaaccagtcacaaagcattttagaaggctgtgtcaatcggaggctgggataatagctgtgccattaccttgagcattgttgaaacttgaaggctaaaatgtgtctcattattcaggttctcagagcgatggcatctagccaaaatggtcccattaactctcaaggccttactttcgatgctctccacctttaaataataatttcttttaaaggaagtgaagaaaagttgtagactatcattgacctcaatacagcagagtctgtcacatctggagatacattatctatgcatggggctttcggagttcatctgacgaaagcttgatgtacagttttcagagtcaagaaaattctcccaccttggattcaaaacaatgaggaattttaagtgtaggcgaggagccgaggtttctggtcttgttggaaatgccctggtgacagctttctgtgctgaactcttcctcctcagtctgcagcgctgtttttcttccagtggacccctaatgtaagtctttgggtctcagtatatctatctaaagtgggggattgggctggacttctaacattcttctggttctgaacttcagtgtttctgactttttcctattggcataatcttcttagattggttcacaaaaacaacacaaatactgaaatagcaatagctaatgcttatgggatagttaccatgtgctgtctgtatcctttcctttaatcccatcatcaatgtcatgaggaaggttctatcgttctctctgttacacagatgaggaaatggaagtgcagaccggctaagtatcttgctcaagatcacacagctggcaagtgtcagagctggcttcaaacccaggcctgactgtcaaccctcagtgtggtcagcctctctggtgttattcagcaaatcacccccaaaacctggtgtctcataacaaccatcattttattgtctctcatggtttatggggatcaagaacttgggaagggctttgccacgtggttctggcccatgaacccttttgcagttgtgaacagacagacagtgctggagtgagaacgagagaagcagggagttgtctgggctttcttctttcctctctccccctctccctccctctcacgtcatctcagggcccatccaggtggtggctccatgagagccagttgggcttcctcacagcatggtggtctcaggacagccccaagctgttcatgtgacagctcagggtctccaagagcaagtgaatccacaggccagttcagaacctgaataaccattgatgacccagcctgctagccccagaagtcacacaacacacttgaagttgtgccaatatgctcttttggccaaaagagtcccagaatcccacccagtttcaaagggatggaacacacattccagctatcaatgggaagaatgtcaaagtcacattttaaggggaatgtatatagtgaaagtcaatgttggacaatctttggaaaatacagtttgctgcaatatctgtattcatcagctcaggctgccataagatgataccatagtctgggcagcttaaccatcaggaatttattcatttctggaggctggaagtccgagactaaggagccggcagggttcttttctcctgaggcctctctccttgacttgcagatggccactttctctctgtgtcttcacatggccttttctccatgtgagagtgaaaagagagaggtccctggcatctctccctcttctaataagtacgccagtcctattggatgaaggccccattgcacagcctcagataatcttcattacctccttataggccctgtctctagtgcagtcacattgagggttagggcttaaattacatgaatttaggtgggggtgggggtgggggtgggggtgggagcagaaacacaattcagtccgtaataatttttaactgcaaagtcttaaatgctttactgcacttgcagaaaaaatagctagtatgatagaaaaaaaagaaaagaaaacaatacacaattttggggactttacttactactttacgtagtaagtaagattacttactacgtaaatatgaacaaatcactgaatatctcatagccctggcacccttgtcagtgttagagagccctagtgagcaagtttcaattagagtcctttggttgcaagcaacagaaatcaacactggctacattaagcaaagtcagggctcattgggaaggagatggttggctcccagaaccaaaggacctgatggaaatgcagtcagggaaaggaatgagaacagacagatcaaggtgccggtggccaatcaaccaacagtcttgagagggcaccagagacaagatagattgtttccagcatgcttctcttccctccatgctcctacatccctctgctcaacttccaaaatcctaggaggcatctctagtgtcagtgtgagttacttgctcaactagctctggctagtaccacaccttgaaagacagttctgccaagattgcaatcaaaggagtctgtggggggctagttattccaagttcttccgggatgaaattggggccctggtacccacccccatggaggagaaacatagcaaccaaaaaattgacaagtgttcctcatattatagggctgttgtaaaaatagcgtgatatgtaaaacatgccaaacctgatgtctgacacctaggaggccctcaatagccattgcccattattaaaaagtataatcaatgtgcttgactactcctctgctcagtgtgtgtctgggcgttgccctgcaaatgtgagggctactcaatgtcaattgagtgatgaactggatgaatgagtgacattcaaattctccatatagaggacacaaagactcatctcagggcttggcctccctcctggaagacagctctgaggagggaggtcagagagctgaggagtggtcagacccgtgggatttgggatggcacttgcattccacagagcctcccagtccccatgttttagagcctctttcatcagaatgggctgtgttctgctgcatgtaactgaaaaccagaccatggcggcataaatatggagcattttgggttttgttggccctggttttgttcttctgtatcaagcctggatataagcagttcatgatgcagccagcagccccactcgttctgcaggacccaacctcgccgtcattaatatgtggcttttatacccatggtcggcagctagcagacacgtctctagacatcatgccagctctccagatgcaggagaaagcagtggggaatggctgggggcagccagcctcagcatcatctgcattacatgggtctcctgcagatctgctttccagtgagcatctcaaagaacaaaaccctatgaaccagaaaaacacaagtttccttccaaaaagaggcaggtgctcaagtcaacatgtgggagatgtttgggttttccttgcagagttctagaccaaagatgtggaggagtagatttgccatgactgcacggctgcctcaagatcttccaggtttcctcttctccaagacttggacataggagggggctctggtgggagctatttgaggaggatgcagaagtgtatgtgggtcatccagcttaaatttaaattggggtaacattaccctaggccattgtgggtaggtttcatggagatctgttgccttaacctgcctggcttccgtctcccttcctctgaaaatgctgctctctgcttctgttggtaatgcccggcctccccatgcaccatcccagtggctcccatgctcctgtcctcaccaccagattccaaggttgggcacatgaagtagacttggcgaatcagaatgttcatctccattggccacagtgtttgcctccagaatgggctgatgcccttagcaggaacagacagggtcacagtgagtgctggacggtgtgaccacgacctcagactcaattctgaaactttgctgtagctgatgggaaaaggcaccctctttcttcagcattgtgaactagtggtggccacttttcctaccaccccaggagagcataccctgaaaaggaagcccacagagagaaaagcagatcccagggaaaaagaagtcctggtttacctggctttggggctcctagattaatttaaagtgtttggttttctgttttccaccatttttttcttgcttaaatcagtctgagttgggtttctgctgcttacaaccaaaaaatccctgaccaacccaggctgtcccacaccccgggtgaccgctgttcctgtttattttttattccattactgcatacttcacctggagacctaactgtacttgggaaatgctggaccgtgcagagagggatgtgataatgagattttaggatcgagagagagaagaaactgaaacccttgtaatcgtgtgcgaaggtttgtccaggtgtttttttctttttttttttttctttctttttttttttttttttttaaataagaccaagccatccccgcagcttagtctttcagatgaaaatccaaaggacaggatttctcccgaggcactgtctgtgtgcttcatttccttgcattgccttgtaggaaaagctccagaaacatcagtgagagatgtttgaaaaatctccgtgagtcccaacatgacggggagctgcttcaggttttttctgggctgttttcagggctgccaactcagccagcaatcctgagtcatcaaatcgtttaaacgttttatatgtttcgaaaggtgtgaaaccactcttcactgacaaatttttgatgaagtgagcaaactctcccagaagcatgttttgaaggagaaagggactcactcctccaaggctccgcagacttctctgtgagtaatcatatcattttggtgataggaaactggctgaggcatgggaacctgaggaccattttgtaaagtgggattaagatgctgtgtgaggagatggtgaaaaatccactcagatggagctctaaccggttttttcacccaggtactaacatattgtctgatctgtggattcttgctgaatattaaccatgatgtggctgtactaactctgatagtctggagtcaccttgacacccttggtttgtctgtgggtgtgttagtccgttttcatgcggctgatgaagacatacctgagactgggaagaaaaagaggtttaatggactcacagttccacatggctggggaggcctcacgatcatggcagaaggcgatgagggaatgaggcagaggcgaaagcggaaaaccccttataaaaccatcagatttcataagactttttcactaccatgagaacggtatgggggaaaccgcctccgtgattcagttatcgcccactgggtctctcccacaacacctgcgaattatgggaaaacaactcaagatgagatttgggtggggacacagagccaaaccatatcagtgggtgacccatccaaagggcatccacctgctctacggccctcgagatgaggagttaacaaccgtttctcctggtaatgatagatgcagggaggcggagtggggacatgggtcctgctgcctgggctcagtggggtttgcctcctgtccccagctgtgtgcagagccacttcctgcggcctccaagcaagtgctgcatgcattgtcagcctctgtgtggagcaaggccgtggctccggatgccaccagtgcctccttctgtggagctcctttgtaactgtcctgttctccctcttgggctctcccttgttccagtgtcccctccttaaggagagctgcccttcattttcctgtttgcagcctggtaccatctgtagctgttgacacccgtgctccctccagctgctcagcttccagggctggagctgtgaaagtggcatgagggtcatcatatcataccatatcatatcatgtcatgtcatgtcgtgtcatgtcatgtcagtctctccccagcgtggctgacttgcacagttattcgtctcctaacaaagactgagctttaggagaggaaggcccatgactgtttggttcacatctgcaaatccaggccccagtgtcctgcctggcccagggcagggcctcagaagatgttattggggtgaacgagtgggaatcagaaggatgttgggcaaggagaggacagtgggctggcctaggctgtgtgcaagtcctcgaagcaaaccaaaccaaagcaacaaatgactgagtcaagcctccattgattttgaggtttattttaccaaggctgaggatgtacctgggaaaaggaaacacaagttacagtaggatctgcacctgtgcttttcccaaagcgggctttgagtacctcagtgtttaaaggggaaagagcgggcgggaggggaaggaggaaaggaaagaaaaagggaaaagagtatgcaatgaggcaggggtcacattctttggaggctttggttagtgctcaccaaatctacattttacatgtgaaagcaggggtagaggaacagtcaactatgcattcttagtgtgctcagtaaatctgcgttttacacaagataaagcaaacaggtgaaatcacagctgttgagtaacaagaaggaggcagtttttgcatgactcagtttcccaaacttaactttgcttttgggatagtgagtttggggtcctgagattctatttgccttccacagggagccctctgagaactcagtcattttatgaccagcagcctgagagtgtggggtagggacggctggagaactagaatatcacagtcatcagcactggggaaaattccagaaggtctgagacctctgcagagggaacaagtccaggtcggctcttggtggacaggggaggatttggtaatactcatttttaaaaataaggccagtgagcctttctgtaccatgtcacaggccagagaacatcttgtggctaaaaggggaaaagaacgtattattctgttatcagagagtcaaactaaatgctaatcctacagactgtctcctttttcctggtattgtgactttatcatcataccttggtccttactgagtaggggatgctggaggaaacagaggctgagtttatgatgcagaaaggttagaaattgttcttagggtgttaaccaacactcctgaggctggtgacctgcctggagtcaaggacatacaaagtcaatcccaacaggtccaggggattaaggtgaggagaaggatcggggacctgggtttgctttcttctttcttttgatatttatctactttgaggaggccaacttcttttatattgtgacttattcttcctttgaattatgtgatctctttctgttggtggatcccgaaagcaaccaccctataaaacatttacaggccaacaacaccatgactgagaaaggacactttgcacatcgatcaccatcataaatggccctgaaggctggcaggccagggacaggatttgccaagagggcagattttctcttgcttttttaaaaaaataaacaacaaggtttgcttgtctctctgccctgcatctctttccgggctaaggcctctcaagcccgcacctagaacggcgggtctgatttgacttcaccccctgcattttgtaaattctggtagcctgccgtctagaagactctcctcacattttctgcatcgctggagctggttggcagcaaaagcaaagctctctggcttccgtcccacttccatcagatggacatgaacctggtaaaccgcagttcccactgagttaccagagaggaaataagccaaaattgtctcactttccctggagggcttccccaggcaggatcaaaggcccttggcaggctctgggatgctgggaggggaagcacctcagatgggcgtggatcacagggcagcctcgcctggcgagtggcagatggaaccttctcttagtgccctatgcctgctgctcattgcttcccagactggagatggcctgcaatgcgatgctgtgtgccgctcacccaccgatgtccacgttgctttccagtaactccatgttacatttctcctggctgatagctgttcccttccaggtcctgctggaggacctcctccttgatgagctggcaggcatggagtggttgggtgcaccatggaaagagcaggcatgcagggctggccctggcatttgggtgggcccagggatttctgcaattgatttgtggatgagtcgagaaagtacctggattcagccacgctgcagtcccaagtaggagctctgtctggagtacacctctgcactgtctgcagcccccacccatgaatgcagctgctgtcattcggccagcaggtattttcaggcaccttccataaaccagacacttattaagccctgggtagctgacattctggggaaggagtgagaagttagggagcaatcaacaaaaccactctcacttctgacaccatttcaagtttagggagttcccaaaccatcgttaggtttgacagttctccatagagggattcacagaactcaccaaaaactgtcgtatccctggttccagttccttactaagagggacatagattgaagccatctaagggaagaagcatgtggggcagagtccaagacgacaccaaatgcagggcttctgggtgtcttgccctgtggagccacagacagtgtcactttcctggccttgtatcacaacacacctggagcattacaacgagatgctcacctgaaccttggggtcctgtctctcctggggccccaccacctaagtgtggtggatattctacacagctgacctctgtccccagccccaggaggtggagtggatagtgtatggcccgcaccccaccccaaggtgcaatgttggtgaggagcagaggccccactctgcatcctactgctacagtctggctggcccagggcctcctagtgaacaaagatactcctgcaggctcagagctgcctttcaggagcctagaggctggtgcacctgtcctttgggtcactgtccccatatggttgtatctgccaagaccacctcaggcccagtccctctctggcctgacactcccaagggctgctgtgtcggtccaagcacaacccaaggcccctcgagctccgcccctgtcggccacaggcactttcctaccgcactgccagttttttttttctttttctttttaaggtatgtcattattccttagaaagcaaaataaagctcaaaaatcataacaattaaaaagatagacaaagagacgccttgcttcccttcctgggcctctccatctcagcgcccacccccacatccccgtgcacctgctcctggaagagccacttgcatttgtttcttgtatctccttctaatctttctttatacaaatataagcaagtatgataatattttcttgtttttacctcttttcttgtgcaaaagtaaccactctgtatgtcctgttttgctccattttccccctaacaatatgtcctggagttttttccatatcagtatatccattctctcagctttttcattgccacatagtattccaccgagtagagcttccagaatctatttcaccaggcaagagaacctgggtgtttcccaaatgtctgttattaaaaagaatgcttccaaaacatgtttgaagtaatgcttcaacagatagccttgtggatatgctgttgggtatgggtagagttagctgtggggtaaattctgtaaagctctgcaagtaggcagaggagagctgctggatcacagggaaaaattgtctgtcatttggaaggactttgttgaatttgccgctgtgaagtggcactgttccgcacccaccaacatgagagagagcctgttccccacactgcagcgagaaggtgtgtttggtgcaacttttggatttcccacacctcgctttttgaaaacttgaagccacacacacaaaacaagaaaatttaaagccaagaatgtgtgactttccacgctctcaatctgagttcatgcgacagacgtatatatggaacatagatctcagccagggggtacagcaacaccgctgtccgtgtaaagctgaccttccggtgggggaagcacgtgacactgtttggatggatgatatgccgggagggagaggtgctgtgaggagaagcagctcagaagaggggaagacagaagaaagcagaggggagcagggttagatgcagttgccagaatggaccctctggggaggggacatgatacagagatctgcttgaaggaagggagggagccacctgctcacaggggaaggactgcttcgggcacatcaagcagaaacatcctgaagtgggaaggtccatggctgcggggtgtcagtatggaataacctcctctgcctccccctcctccagcccccaagtataggggaagagtcaggagacaagctgtgccaggaatgaaaatcaccttggttaatatgccgagatataatctcattacgtactctaacacagaaaccagtcttaattcctttgccctgccctcgtcagggagaaaggaataatccacagtggacgctttctgcagggacacttcttgccttctggcagagtcttagccatggggccctcccatcttggacgatcttttacttagttaacaagcagtgagatgtgcgtgagagggaaagcatcctggctctttcaggcttaactgtgacatctgcaattaaaatggagattttgctccttgagaagagggggaaagctgattaggaaagatgtcaggtataaaaatgagatgtaggcactagagagatttctttttactgaagaattgtctaggggctatgaggacttttcctttaattgaacaaatactttcagacaaagtgtctggcaaagtcctcacatgcacgatcagcagggtatggtccaggatacagaattatccaggcctccttgcagctgaccaaaaagtgatcaagacggagcctgttccaaggacaggcagccccagcctccaagaatagctgaacctgcaacaagacagaccgtagggagggtggcatcgcctcttggctggtctgagttagctttgccattccttgtgttttgaggctccaatgcttgccaggcggaattactgcacagcagggtagtcagaaatcccagcagcctgtccagctccccgaggaatcaaatccctttcttgtgaacaaaagtgctgtacttacaatgctaaagaaagcatcacaatccaagttggcggcacccctgaagcccaaacaccagaaacatttatgaaagaattttgtaagtggatagttcaaaagaactcaaagcagtaagcttggagggaaacatgtttctctttctacttagcaagcactcagagagctcacactctgtgctaagcaccttcccgatacggtctccttcagtcttcctaacacagctaaacacaggtgctattattctctccactttaaaataaagaaattgaatcatagagagtgagtaatttgcccaaggccagatactggactttcttacatttatttcattatctctttttattctgatgttcatatgtctggaatgtggtgggaggtggtggtggcaggcggggtgcgggggcgacgcaatttgttcagtgtttgggacttccaaagttctgatttgaccccagatgcaaagtcttcaccctaaagaagagttgatatgttgtttatcagctgtgacggagacctctgtgaacagcaagaagtgaccataatggaacccaagagtgagaattctctctacacccttgcaaagacgaggcattcaccttgaccttgaccacagatggcacagatttgccactcatttgacacgtatttactgagctgtcttaggcactggaaactggaggtgtagtagtgaacacagcagacaacattcccagctctacattctagtgaggaaactcagacaactaacaaataaatgaaacctgtaaatacagtgagcagactattggctgttgatcctgagtccccgaacaataaaacacagtaaataacttccttgaggcaaaactacttatggtgtctacaatgctaagagtctggacacggataaagcaaagttgtataaggcttaccatggagataactcgatccctagcatattggacaagttcctggttaaaatcgaataatctttcatagtggacttcatcggtcagctaaccagcagccatcatgaatcacgttctcccctacatgctggaggtagccgtgtaacctgtttctagccattcaaatacactggggacttctgatagatgcataaagagagaggtacacacagatagctctcctgcattgacaggtctgcacccgtgtgacctgcatttacccgtaataatgggaggatgtgatagcaggagctgcggcagcctttctgtgagcatgagtactctagccgaggtgcaaaagccagtgaggatggccaaatacaagaactggacgcacctctgtccttgaaatgctaagcagctgaactaacggtgggatcacctacttttgggcttctgtttaacaaaaagtgaatgctctagccaccattgattctgttttcttttatttgcagttgaaagtatctttggctcggcacagtggctcacgcctgtaatcccagcactttgggaggccgaggcgggtggatcacgaggtcaggatatcgagaccgtcctggctaacacagtaaaaccccgtctctactaaaaatacaaaaaaaattagctgggcatggtggcgggtgcctgtagtcccagctacttgggaggctgaggcaggagaatggcgtgaacccgggaggcggagtttgcagtgagccgagatggtgccactgcactccagcgtggacgacagagcgagactccgtctcaaaaaaaaaaaaaagtatctttgataacattttaaagaagaaatacagcccaacgtgtgtgttattagaggataatgcaagggtatattataggatccacaggatacaggattataggatgatacacaggcacgtcgggcccatgtccgtgccagcatcacccgccctgtggttcgctggtttgaggtccttgtacttagaaactgagtggtgtttccattcagaaggaaggaggaacctggacgacagaacgaggcctgatgccacaacaagtagggtccgcactgagacccttcctcctcttttcactggatttaaaaaataataaaataaacactaagtacccacaaaaaaacttcaggaaaatactcataacacctttatccataggagccaaacacgagacacagtgagagtgcccatccacgggaggctggataaacctgtggaacattcttccgatgggacaattggtgtgagcacgacatggcagctctcacgtgcgttaggctgggtcaagcaggcatgcaccaaggactaagcactgtgtgattccacgtccgaggcgttccatagcgggcaacttaattcatggtggaagaacatcaggacacaggatggctctaggattggggctgggagggactgggaagcaaggaagagggagctttctgggctgatggttatgttcggtgccgtgataggagtttagggtgctgtcacaacttttacattttattgtatgcaaattttacctccaaaggagggaaaaaaaaaaccttaaaaaaaagattgagtcagacatggtggctcacacctataatccctacactttgtgaagccaaggtgggaggatcgcttgaggccagaagttcaagaccaggctggacaacatagcaagactccacctctacaaaaaaaatttttaaattagccaggtgtggtggtacattcctgtagttccagctatttgggaggctgaggcagggggatggcttgaactccggggttcaaggttacaatgagctatgatcatgccactgtattccaccctgggcaacagagtgagaccctgtttctaaaacaattttgtaaagattgaacttgccgggcatggtggctcacgcctgtaataccaacaattttggaggctgaggcaggcggatcacttgacgtcaggaatttgaaaccagcctggccaacacagtgacacctgtctctgctaaaaatacaaaaaaaaaaaaaaattagccaggtgtggtggcgtgtgcctgtaatcgcagctactcatgagtctggggcaggagaatcgcttgaacccaggaggcaaaggttgcagtgaggcgagatcacaccacggcactccagcctgagtgacaaagcaagactccgtctcaacaaataaataaataaataaataaataaataaataaacaaacaaatatacaaaaaattagccaggcagggtgacacgcctgtaatcccagctactcgggaggctgaggtggaggaatcacttggacccaggaggcgaagtttgcagtgagccgagatcacaccactgcacttcagcctgggcaacagagtgagacaccatctcaacaacaacaacaacaaactcaagttaataatttgcatgctaaagtctttaggggtgatttatactttaacactttgaaatgcatccaaaaataagattgatccatggatggacagatggatggagaagtgaataggtatatgatacagcaagtataacaaaatgctaattatagactctaggtggtaggtctatgggtgttcactgtacagttttaacttctctgtgtattggaacttttcataataaatttgggggtatcattaatgtaaacattgcagacgttgttattggtaaaattctccaagctttacccagcagccatgtcctgtctttggtgaaggtagttttatggaaatgagatttggagctaggagggtagatgagccaggatggagctgctcttcatgggattgagctctttctgcaaatcttcgtgtaatgccggggaggaaggcctcagacagatccaaaaggggacatgtcagctgctaaatgagcttagcctcaaagaccagaatagacctgtagagccaggaacctcaggattatgttgcattgaaagtttcagcaaagagcattgaaattcaggtatagcagaagtcttcacccttaggggaaagcatggttaagctccagccttttctcttttattagaatcgacatcttatgtggcacaaacaaatatatgctgaaggctctagggctcggccctgcgctttctgggccctggtggataaagcttgcattttctgggccactgatttatttgtgcagaaaatgaaataatgtgtggacaattaatgagatggaaatagaaagcacctagatatatattctaggagtcttttatttttgtctggagttgttttgcaattaacccacgagttttatcaacaatagcttcggaagggaggaaaagatggaaagttcaggcggcgtccttggaacacaggtatccatgccatcatcacttgccctgtggcttgctggtttggcatcctcgttcttagagactgagggttgttgtagttcagaaggaagaaggtacccggacaacagaacgggacctgatgccacacgtagggtccatgatgagacctttcctcctcttttcactggatctaaaaagtaattactgtattttaattatgcaaacatttcatgaagataccttttgtaaatttttaaaagcattccatataaaagtaatacttcttttgatcttcagcttcaatctaaaccgcctaccctatccccttgaattatctattggtgtgtgaatgtgtgtgtgtgtgcatgtgtgtgcgtgtgtgtgtgtggtgtgtgtgtgtgtgtgtatgcacagggacacacccttatttcagaagcaaaaggcaaaagactgcatggtttgaattccagcttagacacttactagccgtgcaggaacttgggcaatttacataatcctttgtgtctatttctcattctgtcacgtgggaataatagtaccaccccctgcctttgtgttaaatgtgtattaaatgtgtcaatatatttacagaacttagaagggtatttggtgtggagagagtggactctaaggattttatattattatgtataatttacatgttatacttaaagtgataaatgtttagtatttgtgtgggggtgttaaacatagaagatacagtatttcacatcactttgcattacttaattttcccctcatcagtacatcctggagaactttccacattagtacagatacctcttctgcctcattcttctttactgctgcagagaattccagacaaactatggataaggtagccattccctgttgagaaggtgaccacattttattatccaaactgggaatttttcagagtgaaagaatgtgttagtaataattattccaagacagcaagtgtaaactaggactgtcctgaatgaaccacgataagttgcatccagttttcatccttacagtgaaggctgctgtgctagacattgtccctatatttgtcccttcaaagtcttaagatggcttctacagctgcattcatcaaatctttacaaggcatgtgtccaggctaaaggaaaaaatggcccttccttatgtcctttaaggtcaaggaaattatttccagaatcttacagccccacggactaagccttccttattactggccaaaactgaaatccatgtttatttctaaatccatcactggtaagggaaatggaattacaagtctgttgtattctcattaatactttttcccctagggctggggaaagaggccaacctcgctagaagtccttggccagtcaaaatctgggactattgacaaggaagaatgaggggttggcagttagtgagacccctcgagagtctgccctgccaagcctctactgtaaggtccagaaacctcctccgatgttgcctgtgcggccctgacttctgctaggtctctgcccctctttgttttcaatgtcttgcccctggttactttcagtaaccacctaaaacacatgttatttcaagctcattggttttcttcctcagactctgtttatgattaaatctctaggacttaagcccctctcatatcatttaatttgatcatgatctgtttaaactctcagaggaatgaccgtcaccctctgccctcgccaactttaaagtgacttgcaaaggcacatgctgggttcccccagacaccctttcccctcttcagtgctctcagaagcacagatgtcatctcagaaggcacctcctgaccagctcagagccctcgctcagcagtccacgtatcacccctgcatgctcttggtcagtgtgtcagagactatagatgtctaccaacgttttcttctttcttttttgacaatgcagagattttggattttagctgggcccaggactacccaggacaaagattgtgtttccctttgaatggatgtgagcaaaagagatgtgtttcttttatcagattatgtcctgaaaaggtataaatatgaacccttggttcacccttccactggctgggagacagatgtaatggcagtcactgcagcagccaccttagacccagagatggaagatatgtataccacagaatttcttagcctcaacactgctgacattttagaacaagatcattctttgttggaggggactgtcctgtgcatcataaggtatccagcagcatctgtggactctacccactaaaatgcaagtagcacattccccagttgtgattgtaagaattaaagcaagaggagagaaacacaaagggtggcttgacagttaacaggtttattttaaacctgggagagacttctgacctagttaggtcttttacagactaagagtttttaaggatttagggtgggagagtttattagaggcttggactgcttctgtgtctctttgttgtgcttctctgggagggagagttgtgtgtttgctcccatgttgtgtgtttgttcccgtgtgttttctttgcagctgcaggaacatcccctgagtctgcctctagcttccctatcttagtgcacctgaaaggaaaggaatgtgcttattaaggtgcactcccaggtttaaaataaacctgctaactgtcaagccacccttcgcgtttctctcctctttctttaattcttacactgatcatcaaaaatatctccagacattgccagatattcactgcaagataaaaatcccccctgttgagaaccactggcatgaaagttggagagcagctccaccatcctcaaagtgattatctctgttctaagagacagaagggaacacacatattgttatatatgctggtcaggaagtggcttctgagatgacatctgtgcttctgtatatatgtgtatatatatatatgtgtgtgtgtgtgtgtgtgtgtgtgtatacactttaagttctaggtatacatgtgtcacgttggtttgctgcacccatcaactcatcatttacattaggtattcctcctaatgctatccctcccccagcccccagccccccaccccccaacaggccccggtgggaacacacatattattaaagcaagtgtttttgaatgtctttgttacagtagattactataccctaactaatatgcacatatattcttaataattttaacagattatacaggactaactagatgctaaatgttagagacaaatccatccttgatttggttagaaaactagcaatatctactctaccagattactgacctgaacttggctagatttcccttgtttgtggaaattctgtagcctgtcctgagaaggcagaagttacaaatcatagctcaagagcggaatctggtactcagatatattttgttttgtttttccacaatttttaaaaaatatttaaagtccttacaaacattttaaataagaatattgtatgtaaaaatccctatcaacggcttcttgttcaaaattatgtgcttcactcctgtactgcttggccagggaggtaaagattactgtagaaataattcactcagtctcattattgtcctcacatgtagctaaatacatgaggtctttgttcagtgattccctggtcggagctgagctgtgtgttgctgctaccgtaaggactgtattttccagacctaaacttgggacaccacgccttgacacacggccagaaaacagaggagaaattccgaaccccatgctatctcaagaacgctggggtgtatgttccctgtagctattttggacgtacccttgtaacatcttgtcataacaattagccgcgcacacatcaagcaggaagctgctgctgcactcaggtgctaccctcagaggcctgtgggtatttgaggagccacacgattccattttcatacatgcagttggtgtctagagttactcatggcagaatcagactcaggcacagcctcctccatcaaaggctttccagattgctagcccggcactctgccttctctgcagttgtccctagactgtacattttctatcagtctcttcttggcattgcttggttgtgttattttattttcattttccattggagctcagattcagaaggtggttatgttcaatccctagccaaccttcatcattggttagtgaatgctttgttttcccacatttacgtggcgatatcttgtttttaattaatttggcagacagagcaatcaaaagagtttctgaagttttagaagtgcccctccatttaagaaatattgaatgaggtttgatttgtttcatgtctatccaaaatgattactgagatgtggccacaagcaagctgggccaagtctttgtttgagaatattctattattattattagcattgatgccgaaggtgtccttggtattaaataggctactcttggttgcaggcagcagaaccctaacccagactgttaaagaaaaaacaaaaggaaattgaatgatccatcagtttcacttctgggtatatacacagaagaattgaaagcagaactcaaagagatagttacacaaccatgtttatagcagcagtgtttacaacagtcagacggtaaaagcaagccaagtgcctataaacagatgaatggataagcggaatggggtatagatatacaatggaatattattcagccataaaaaggaaggaaattctgactcacattacaacatggatgaaccctgcgaacaccgtgctaagtgaaataagacagtcagtcacacaagaacaaatactgtagggttccgcttacatgagatgtctccagtagtcgaattcatagagacagaaagcagaatggtggttgtcaaggaatgggaggagtggagaatggactggtagtgtttaatgggtgcagagtttcattttgagaagaagaaaagattctggagatggatggtgatgatggtcttgcaatactgtgccgatgcttaatgccactcaactgtatgcttaaaaatgcttaagatgctacattttatgttatgtgtattttaccactttgttttttaaaaagaaaactaattttctctttgagctgaaaaaatctggagacagaactagattcaagcagagctggacccaggagtttgaatggtgttgccaagggtctatctttctctccatttctcacgaacattccacaaggtagaccagatgtcaccagcagcatagactcacaacctccttgtttaatgacccttgaaaagggatgttctttccctattaccatgtcagaaaaatctgtaaaaaaataaacaaaacaaaacctctgattgagcctggcatgatggctcacatctgtaatcccagcactttgagaggccgagggaggaggattgcttgagcccaggaattacagacaagcccaggaaaaaaaaaaaaaaaaagagaccctgtctctacaaataataataaaaaaaaattagtcaggtgtggtggcacacacctgtagtcccagccactcaggaggctgaggtgggaggattgcttcagccctgcaggtcaaggctgcagtgagccaggattgtgccactgcactccagcctgggcaacagagcaagacgccatctcaaaaaaaaaaaaaaaaaaaaaaaaagcttgagtcgtggtgcatttctgaaccaatttccgtggccagggtgatgtgattcttttgagtcattcccatttctctgtactacaacaacatagactgggttccttggcttaaggtgggattctgttattagaaaggaagagagctattgtagagtccagggcaactgaatccttgatctatggggtaccctttggaaaaaattggggaatgtgtagcatacaatcctagtcagcatgtaacacgatggcattgggagtgtgcattcaaaacactaacggtggcataaaccatctcaccaggacccaagtgctgccgtttgatgtgaataagccccaggagctgtcccttgccatcacatggcttttctgcagagagcccttcccctgctggctttagccctacatagctcatggacaggctgtcatttatggccctgggtattacttctttctcctgttgttcaccttttttttcaactaagaatataattctaaacctggaaggcaaactccagggtagaattcatcaaacaggaagctacaaacagtaatttgtgaattgggagaaaacaagcctactcattaaaattccaccgtgagaagcttgcggtgagattccaggttgaaatgtgcttctgaagcaggctttgggatcgatgggtttctctgctctcatttccttctttacttacagaaagggcacaggtggaaacgccatgtctccctgtaggtaacctgtcagttctctgtaaagatgtggacggacttagggtataaatgccagccgtccactcagctgagaactatgatcttccctgatgcctgcctgatgctttcttatccctgctttgcccagggtgctctgtgaatacggaaatgccctcctctgaggagtgggatagaagactctccttccctagtcactgcccactgtagcagttgttgaagcttgatctggaaggatcccgccaggataacggatgaggcagacccttgagaggactggctcaatgcccagtagcctcccaccttctatacctctaagagaagcctgatgctgttagattgcaggtggaggtgccctggtctcaggaaggtgggccttcctggagtctcagaggatgaatcatgattggtctaattccaatctgttgtgataggcaaggcctttccaagcactctattctagcttgggtggttttctggcccatgagccataaagggaagttttctgatgtgtttcaggaacaaagccctttgaagagaaatcctttgcacttctctctctctctctctctctctctttctctctctctctctctccctcctttgaatggtggtaaaagaatataatgttaatagctatagcaactcccctgacacaatgagagatcaacctcacacctgccaacctccatacatcctgttctttggaataattaaatgtcttgctttttaaagtatctcttgagctgacttttgaagcccaaggtgttaatagtaacaccatgtgctctgtgtcagtggcacacagggctgatctgagttttgcacacgcccttctgagaggtgtatgatctattgcaatgcaagaattaagagtgaagcttctagaacccatcggccttacccctgtcaagctggaagtgactcagcctctccgtgccccaggttcctgagagggtgctcacatatgagctgagctgttagccctggggatgtgttagccttctggagaaatacctgcaactcctggcctgccttgggtgcagcagtgcaattggctgctgatgtcacatgaagtgcccctggcatcaaagaggcctgaatttgtcttcatacctggagaaccacatacatatgacccttgccttatagagctcacaatcccagatggcagacaatggcacgacctccacgggctaccacattgggagcagaaaagagacatgaatgccacagaatgtgctctctgcaggaatgtctctgggccttatctccatatttcagaaaccaagttcagggtcagtcacagggaagtcacctggtaagtaaatagttattgaaattaaccaacaaatattttgagtgtgtgccatgtgccaggagctcttctagatgccagaaatattgcaatggacaaagaaggcaaagtcctttgtcttagtcccttagggctgctgtaagaaaacaccataggctgggtggcttatagacaacagaatttaatttctcagagttctggagactggaaagttcaagatcaagccacctgcagctttagagtccagtgaaggtaccttcctggtttgtaggggctgccttctctgtgtcttcacgaggtggagtggatgaggctcccttagtctctattataagggcacccttcccattcatgagggttccaccctggggacctaatcacctcccaaaaggccccacctcctaaagccaacaccttgggagttaggatttcaacacatgagttggggatgatgcaaacattccgactatagcatccttccgcagatgaagtttagattttagttggggagacacatcaacaaaaagtattaactgtatatgtcagagagtgataaaggctatggagaaaaataaagtcaaataaaagatagagaagataaggcaaatcccacttgatatgagcctccctaaggtgggatttgagtggagaaggagaagagtgaagacaccagccgtgcagatacctgggggaaaggcattctggaggagggaacagtgagaacaaggctcagaggcaggagcagcagtacagagcctggactggattatcgtgaatgaggactgcaaaatgaggccagagaggcaggtgggagcaacagcatggggaacagatcatgcagggccttaaggaataaacaagaatagaaaacacctagacagtggcagtgagctgtgagcccaggcaggtgggcctcaaagtatacacttgtaatccatgcacctcactgcctgactccctggcaagctaggaagatccgtttcagcccgtgcatcctcatgaagtctctcttggttaccttccagaggacattctgctgctgttaagaaagaaattcagggaactttgtgcaagaattggaaagcaaccatggatggtcgctgtgtccagaattgcaccccaacatgacaagaacaaaagaaagatgaattcctggggcactgggagtggggtcaagaaagtggccaggatgtgatgccacccccagccaggagtccggtgctattatctcatgcgtagctgtttttttacgaaggagtttttacatacttgctggggaaagcaacactagtgagagaccagggctccttgaggggtgagttagtaggtcagcctcatcaagtattgatagggcagctgcgctgaagtcatcttccccctgccaaagctcctccgtgcctggccactgagtctctcaaggaagccgcagttacctgtaagaagttagaagttacttaaggagccattaaggattgatggatgggctcttttgcccttttggggttttattattaatacactcttttgcagcagtaactcttgaccaaagagaagtctggttcccatcaagttagcagtggggtgtttgtgtatgtgaacgtgcatgtacgtgaatgtgcatgtatgtgtgtgtgtgtgtgtgtgtgtgtgttacatccataccatttcccctaccatagtggaaaaaagcatggcatcagggcaatattttcaagccaacacttgcctaggtttcttctaactctgtagtcagagtgcagggatcaaccactcactctttcctaactgtttactcctatgtgatcttgagcaagtttcttaaccattctgtgcttgtggtttcttttttctcatctgtttaaaaaagaagcatagcaaaagaatccactcaatgaagctgctaggagattttttaaaaagtaattcaaggaaaacacttagaagagagcctggctgatactggcaatattaatgagaaatgtcagctgttgctatcgttgttacgattggacatactcacaaacatagcagagcgctgacttcagggctacatccccacttccacaagaacctggtaagttagggcagcaaaaaagacttggttttgtcttccgttggccagcctccagactcagatcactaggggagtctcatctgcggaattttgtgccctcacgcattgtgggctttgctttgaaactctcctggaccacagcacgatctctcctcctgatggtttattctcccataattaaattagcatcgtgccagtctacattctgaaataggtaaggcaagctcataaaaattcttcactgtgtgttcatgtaggctcacagcgtcataatctcagagcagcagatgcgtggacagtgtttttggggagcgcggctgggctattctgctgatcacacagcggtgtctcctgctcgccccactcactctgctgagctctgcttaccctgccttggaacagagtttctcaacctcagtactgtccgtatctggggccagataattcttagttagtgtggtggtgaggggaactgtcctgtgtattgtaggttgtttagcaacatcacctcccagcctccacccgctgaataccggtatcacccacgctcttactcatgataaccaaaaatgcctccagacattgctcagtgtcccctggagcacagaacacccctgagaacactgcttagaccatggctcaccgtggggctttgggtggataattcatagcaggatgggattgggacctctccatgaacatacccctgaagagctgtgtattcagagctggacagacagatttccctgctcaggaaaagttactgtcaactgcgggactcagcggggattttagttccaaggctaaaaattcactttgccttttggccctttccagaatggtgcatctcacagtcattccaaattggtgcccaatcagtattcctaacaggcagatatcgtctcgccttgccctgtataacactcacttataattataacactgttcatctcagaaatgttttaatataaaaatattttatattaatattttattattaattaattagtataattaaaaggcagaaattttaataattttacatacaggtggactccatcaggactcagtgtatgatgcagtaacaaacacagagtaccccccatcagcattcttgcctagccattaaatctagatcttctcatttgtctggatctaacagctagtttaaaggaaatgcaaaggatacaagaaaaaattaaatgacagttcaaggacacaatcagataaatccagaatatgggtattctataagacaagtgacttagtatttcaaaaaataccaatttcatgaaaacgtgggagacacttctttttctattaatagaataaaagagatataagggccagacgtggtggcttacgcttgtaatcccagcactttgagaggccaaggcgggtggatcacctgaggtcaggagtttgagaccagcctgatcaaaatggtgaaaccccatctctactaaaaatacaaaaaaattagccgggcatgatgatgcacccctgtaatcccagcttctcaggaggctgaggcaggagaattgcttgaacctgggaggtggaggttgaagtgagccgagatcgtgccactgcactccagcctgggtgacagagcaagacaaacaacaacaaaaaagtaaaaataaaagagatagaagaatataaccaaatgctatatgtgaaccctgtggattctgagggttcaaaccagttacagaaaaacagtatctttgagatgattagggaaatgtttatattagaaaattacaaattttgttaggcacgataatggcaaaatgatgatattttaataattctcccctcctacccttcaatctggtatttggctaaacgtcatgggagccagaagggaagggatccctgagtggttttatttttagaggtcagcctcctaggacatggagtaggagtgaaaaaggcagaaagtgggcgggggtgggaagagtggtgagatgtgcagatggagtctccgcaggcgtagacgatgcacccaggctaacgatgatttgatgggaacgaagcggtaattgccatgcaagatgccggggacagttttctatgtagatcagccctcatggcacagcagccagcccttcaccagggctgtgctggtcagtgtttaacatcttgctccctagaggaaaaagaccttgatttatatggactgccagattctgtggtatgaaatactctcaccatagccaatttcaggctacctgacatcactgaatacggagttgagagcacacatccaatagcacttctttttcttttttttttttttaaacggagtctcactctgttgcccaggctggagtgcagtggcacaatctcggctcactgcagcctctgcctaccttgttcaagcgcttctcctgcctcagcctcccgagtagctgggattacaagcatgtgccaccacgcccatctaatttttgtatttttttgaagagatgaggtttcaccatgctggtcaggctggtctcgaactaatgacctcgtgatccacccgccttggcctcccaaagtgctgggattataggcatgagccaccatgcccggcctccaataacacttctttatatagtattttcctcattccatgtaaatgtaaatgcataaactcaagaggacagataatatcaaattgtcatgaaataattaggaagtgctaagttttgagcatttattacctttgtttctaacatagattaatgtgtacatttatgacttatatttgaataatggctgtgtttgacagctagcttgccaaattcctgaaaatgtaacagccagaacaccactggttggttcatgctgatcagcctgaagtttcaatgaaagaagagaaggagaggaatggaaaggtggaattgggagttcttgggagcaaacttacagaagcaaaacattggtaattgttttatgaagaaacattccttttgctaaagtttttgctgtaggagtagccccttgctggggaccagaacaggggaaaaagaaataatagagttagaagtagcaacaatgcttaggaaatcctactgctctctgagatccagcatttgatgagtcactgatagggaagttttcatttgatagggaagatcaaagtaaatggtaaaaggcagcaaaaggtaatggccaaaaggggtcagtgtttgataagctaaacagaagatgaaaaagagcgctcaattggaaacacgtttgactgcagctgttttcacagccaacctgaaagagatgaggagaatttgttccagatggactggcagtggctgtccatcttggtcaatgagagagcagggagttctacaggcagggaagagagctgggtttccgtggcttcacacatacacacatgcatacacacacataaccacaggtgaaggcacatgcgtgtgcacacacacaggcacatacctgctcacatgcatgcacatacacatgacttctcttaggaagttgcagtagtgaccactggagtcttttttatggccttggaaccagtctgtgcttcctcatttcctagggcctctactccttttgacaggggcagaaagtctgccctgacaggtagtttaggaaaaatcaaagggggatggcacaaggggtcaggagtctgggtcttagcctggaaaaggacagtgcccccctcaccccactggcaggtcacctgtacccagcccataaagctgctgctggagtaagatgaccctgctcacaaggctcctggtggcagacggggagatggaaaccagctcgcattattaaaaacaaaacacaagaacggtaattttcaatgtttttcaatagtttctatgcagagccctgctaattactcttccctcctatgtgttgaaagatttcagatacaaagctgcatctatgaaaggaaaagtgtattttaaattgtgcattttcagtgcttgccagtgttgcacgcatgctagcagcaggagatgttcttttatgagattcatgaacacgcagtttttatttgtattttgatatgcttctttcaatgtgtatttaggggaaaagtttgtaaattttgttttctatagctcctttatgaggagctatgtatgactatgtatgcataataaaatgactatatatgcaataataaaaactttagacaacaataacttttctaaagaaaaaaaaaaggaggccgggcgcagtggctcacacctgtaatcccagcattttgggaggccaaagcgggtggatcacctgaggtcaggagttcaagaccagcctggccaacatgatgaaaccccatctctactaaaaatacaaaaattagccgggcgtggtggcaggcacctgtaatcccagctacttgggaggctgaggcaggagaatgtcttgaaccctggaggcagaggtttgcagtgagctgagatcgcgccatttgcactccagcctgggtgacagagtgagactccatctcaaaaaaaaaaaaaaaaaaaaaaaaaaagagcagtagccaaattagagaaacatattaaagaaatgatattatagagagtgtatggatgtgccaaccatgtgagggtgaagctcgagtgcctgatcctagggaaatccacatggataatgtagagctgtctaccctccggtgagcatgtcatcaacccatgaggcctgggtggccatgctccctggatgagacgatgaaagcagcagcaatacccatgccacgtttgttgatatacacaccctgatcctaagacactgttagtttcctctgaaggcctttggaatactgaaaacccacagcccccttcctttagaagaagcagctttgtagggctgctgtcaggtcagtgggtgggtttggatataagtgtgggagtcttattctagtggaagagcaaggatgcgtgtgtgccatgcctttgtatgcaggatgtaccacttgcaaagggccagccctcctcttctcagtgcagaagctgttatgtacatgtgaccagaggctttcctgcgcaatgcccagggtagagaacactgggctaacaggcttagtgcaatgggaccctacagctgctggttggttagctcagtgcaatgggaccttacatcagctggttccttcagggttgtaatgacagcttcacagcagctcctcctcctgagggccaggccaggggtgggctgctttcttattgcttgcttctttattttcatgttagcaactgtatccattttctagggctgctgtaacaaagtaccacagactgaggggcttgaaggatacgaatctctcacagttctggaagctggaagttaaagatcagggtgttggcagggttgattccttctgaggtctgagggactgtctgtcccaggcctctctccttggcttggagatggccatcttcatgttcccatggactttctcttctggtgtctatctccaaatttccccttttcataagaacactagtcactgaattggagcccagactaatgacctccattttaatgtgattacctctgtaaagatctatctccatatacggtcacattctaaaatgctgggagttaggatttcaacatatggattggaaaggtgaggagttcaacccataacaacaataattatcatttttcagtttgaacgtactctgaagatcagattcagctcctgagcagacagccttacagggcccagaggccaagtggtacttacccgccctcccatccgtgcacacacatgcatacacacacacatgctcctcacacatgcgcacatacacacacacacacacacacacacacacacactcctcatcatacccaggcactcacacaccccagcaggcctgagaagcctctaaggagagaatttcataagaagattgtagctgaccatgagatagatggtttgcagggtggaaattaggcttcctgtgttcaaaatttgtactgaacattgattttccttaaggaacacttaatcatccctgtgttatacccaagccaagcacattttaaaaagagggaaaatattttttgtttcgtttgggttttaaccactaaaaacctgagtaggagcatcagtgatcaacgtgccttgtagatggcgtgagccccgttcaggtaacccagatgggaccagagatgccaccaagtccagcccttgcctgagtcccacgtggatgcattgcagtgtctagcacagtactgggaacagttggtgctccatgctacatgggaaatcatctcccaagctaccagcaatagcagacccacaaactggaaaccactgaactagggccaccctggatgcagcagatgaagaaagaaaagcacacctgcctgaccctccagaagcagggctggaagctcctcccctccatgcagcctggctgagcggggttggcctcacactgccactggccagcttccctgggcttgcaccttgaagccaggcatcctcagtgtttaccgcccacttccactgttttttaaaatgctgactctggttgcaaaacttctggtcctggacacaaaccctgcaacaactagttccttgaagtagacaggaatatccactgctcttatcgaagaaaatgcccgattaacacaatcagcctgttaaacctatgcatttctcccatttctgtggttccttctcccaccccatccagaggtgacaccagccactgcaccagttggtgagaatcctcctatgaacatgcactattaagcggaaagaacaatttgtagcttcagtgaaatctgaaatattgagaaaaatccaaatgcagaaaaagccaatttcaagccaagtcacattgcaagaggcatttatttccagcagtagaagtagaaggtgtccatgctatgaacacaactggggcattcatttcctgctaggggcaatggggactttcccatgctaatgtgtctttgatcttcgtccctcaagcacgtcctggcctcctggtgttcagagtagcacgtgtatttagtgaatcatttaatgtaagactcagaagaagtttcttaagagaaagtggctgtgcaaaatagacaaatgggatctaattaaactaaagagctactgcacggcaaaagaaactaccatcagagtgaacaggcaacctacagaatgggagaaaatgtttgcaatctatccatctgacaaagggctaatatccagaatctacaaagaactcaaacaaatttacaagaaaaaaacaaacaaccccatgaaaaagtgggcgaaggatatgaacagacacttcgcaaaagaagacatctatgcagcaaacagacacatgaaaaaatgctcatcatcacttgcatcaaagaaatgcaaatcaaaaccacaatgagataccatctcatgccagttagaatggcaatcattaaaaagtcagaaaacaggccggtgcagtggctcacgcctgtaatcccagccctttgggaagccgaagcaggcagaccacgaagtcaggagatcgagaccatcttagctaacacagtgaaaccccgtctctactaaacgtacaaaaaattaatcaggcatggtggcaggcacctgtagtcccagctacttgggaggctgaggcaggagaatggcatgaacccgggaggcagagcttgcagtgaaccgagatcacgccactgcactccagcctgggtgacagagcaagactccatcaaaaaaaaaaaaaagtcaggaaacaacagatactggaaaggatgtggagaaataggaacgcttttacactgttggtgggagtgtaaattagttcaaccattgtggaagacagtgtggcgattcctcaaggatctagagctagaattaccatttgacccagcaatcccactactgggtgtatacccaaaggattataaatcatgctactataaagacacatgcatacatatgtttattgcagcactattcacaatagcaaagacttggaaccaacccaaatgtccaccaatgatagactggattaagacaatatgacacatatataccatggaatactatgcagccattagaaaggatgagttcatgtcctttgcagggacatagatgatgctggaaaccatcattctgagcaaactatcgcaaggacagaaaaccaaacaccgcatgttctcactcataggtgggaattgaacaatgagaacacttggtcacagggcagagaacatcacacaccagggcctgtcatggggtggggggctgggggagggatagcattaggagataaacctaatgtaaatgatgagttgatgggtgcagcaaaccaacatggcacatgtatcaaacctgcacttgtgcacgtgtaccctagaacttaaagtataatgaaaaaaaaagagaaggtggctgtgtggctggcatgctattgctgctatgagggttggactcctaagtttggcaggtgaagatgtgttttatcaccaccttccacccgcagtgttcccgcatggggaccccctggtaatcacattcatcagctatgtctagccttttaactattcacaagaatgtatctccttcagtctgggaggttaatagggggtgcttgtgtgtgtgtgtgtgtgtctgtgtgtgtaagtgtgtaatttcctttcataagacatgaccttgcatatgtcaactgaagaatgatgaggttcatacatttggaaagaagagctttatttctcataaaggattgcagcctgccaggtggccattctgacaggctgggaagtgtagcctccagccagaagcaagaaacaagccattcagagatgggaagaacaagacagggatttatgctgagtaagaaggataaatatgcatattcaataagccataggaggagtcatgaatatttatgggaggagaagcatgtgtatgcacagctgagtttcatgccctttcatgggtcccatgtgcaaaagatgacagggatagcatgatcccaaggtggggttttcagccctctgacatcaaaagatgaagcagaggacatgaaacccctcactgtgcatcctcagtagatggccagaaccactgcaaggttagtggtctcttattaggaaggaacccttttgtcaaaaccataaaagggcaaggcagtatcaggcagtctttggtatctggagcaagtctttccaaatggctggtttccgtttagccctcagggagaaagcctaatggtgcttagggaaggaggggggataaggaggtgtatccagcctcccatcccatcatagccaggaactcagttttcaaggtttcactggcatctccttggccaagagagggtccgttccatctgttgggtagcttagaattgtatttttatttcttgcatgtaatttagaaggtcaaatagttctgcagagtttattggcagaaacctgtatacaacattctcaaagtgtgagaactgtagtgctagagaacagaccagttacaggattcgaggaaggtgtgactatgaagggggcacatgaaggagctcctctgtgttgaaggaacaatgccacatctttattattgtgatggctactcaaatctatacataggatataatttcatagaactatacaccaaaaaagttcatgtgaaaacgtgtaaaatctaaataaggtatgtacctggttaatagtaatatgcctatatcaatttcctggctttgacaatggaccacaattatggtcaatattatcattgggggaagctggatgatgggtacatgggaactcagtattttgttgttttgcaacttttttaaatttactttttaagacagggtcttactctgttgcccaggctggagtgtagcagtgctatcatagctcctcctggcctcaagtgatcctgctgcctcagcttcccccatagctgggactacaggcacactctgtcatatggggcttaatagtaatagtactagtggtggtagtagtagtagtattttgagatggagtctcgttcttgttgcccaggctggagtgcagtggcacaatctcagctcactgcaacctctgcctcctgggttcaagtgattcccctgcctcagtctcccaagtagctgggattacaggtccctcccaccatgcctggttaattttttttgtattttcagtagagacggggtttcaccatgttggccaggctggtctggaactcctgacctcaggtgatctgcccgtgttggcctcccagagtgctgggattacaggcatgggtcaccgtgtggggctaattattttatctttttgtagagacagcatgttattttgttgtccaggttagtctcaaactcttggcctccagggatcctcccacctcccaaagttctgggattacaagtgtgagccaccaaacccagccacaacttcctcttaatatcaaactattgaactatttaaaaatacaaagttattttaaaataatactgcagtgccctgctcccttttactgcttctctccacgcacagaggcaaaattctttcctcacctggtatttataggcatatcaccgagtaacgcactgatgttgacacttttttttaggcaatatctataaatttcccactatggagaattaggatatatctcttttctcccccacataagtgcctcccattttatctctccatccctcaagtataataatcatattttgtctagattaatattcagtgtttaaaatataagtacatgtgctaatcacagtaaaatcaagtattaaattatgattacttttccttctctgcataatgagttcttatcttcaggattaaaaactgattgggttttattctttttcttgattttctgtatatttagctcatatttatcctgaaactctcctctagttgtttaaatgtcctcaaggaacacttattgaacatcatgtttattaagaaaattttcgtttcccggggaagtctttgccggaatcttctccatgcctcatgctctgctgttattcaaggacctctcttcaccatcaacctgggattctttccacgtcacttgtatttgggatctgtttcccttgtctcatgtcttccttccagcttcactttgtggtttgatggaacacatgctcaagtaggttcccaagcatgagtgtaaggagtaaatgaccttagcacacacatgtgtgggctgggcgtggtgtctcacacctgtaatcccagcactttgagaggccgaggtgggcggatcacaaggtcaagaaatcgagaccatcctgactaacacggtgaaaccctgcctctactaaaaatacaaaaaaaattagctgggcgtggcggtggtcgcctgtagtcccagctacccgggaggctgaggcaggggaatcacttaaacccgagaggcagaggttgcagtgagccgagatggcgccattgcactccagcctgggtgacagagcaagactctgtctcaaaaaacaaatgaacatgtgtgtgtggaaacactgagctcatagggtggatacagaattctaggttggaaataatctcccctttcaatattcaagacattttttattgtcttctaggttacggagtggctgttatgaattctgaattctttctgatggtttttttctctctagaggattgtagaattcacttctacatacgccatcttccaaaatgtattgatcacgtggcctggtgtgtgtctattctcattcattgtgctgatcacatagtgggctcttccaatctgaaaacacatcctttcatttggagacattttcttaaattatttcattaatgattcatcctctttcttttctctgtttcttttttctgttattgacatattgaacctcaaagccatcctcttaatttttttctcctatcttccacttcgtcttttctctgcttcttaggaaatttcctcaacttcatccatcaaccattccaccgactttccattttgctatatttttaatttccaagggctcattttgtccctgctgcgtgttctttttttaagatatagcagtcatttttgtttcatgattgcaatatcttctcttatctcttagtgaatgcgaatgattctctgtttttggttttgttttgttttgagacagagtttcgctctgtcaccaggctgcactgcagtggcacgatcttggctcactgcaacctctggctcctgggttcaagtgattctcctgcctcagcctcccgagtagctgggactacaggcatgcaccaccatgcccagctaatttttgtatttttagtagagatgggtttttgccatgttggccaggataatctctatctgctgacctcatgatctgcctacctcggcctcccaaagtgctgggattacaggcatgagccaccacgcccagccaattctctgttttcttaaacacggatattctttactgcataggctgtatttctggtaggttgctgccctcccctccctgcgtttgcctgtttcagtctttctgcgtggacaaatacaaactacttcctctgctctcaccccacaacaaccaatacagaggactcctgtggccaagcatggggcagagggggtggtttctcccatcggcaagtgagtgagcagttctgcagcagatgtcagctaggtgtcctctagttcagttcccaccatctctacctggagaaatcgtcagggcccgcgggtcgagggctcactccccaggactgctccccactgctgataccaactgcaagccctggcttactctgtctgtctgtttctctctgtctctgtctgtctacttctctctctctttctgtctctatctctctgtctgtatgtctctgtctgtctgtctatctttctctctttctctgtctctctctctctctctctgtgtgtctgactgcctggctttaaagtggggttcccatgacctcatcctcaggtttgattaatttcctagagcggctcacagagttcagggaaacatttacttatgttgactggtttattaaaaaggatgttatgaaggatacagatgaggaaacatgtaggacagggtataggggaaggagtatgaagcttccttgccttcctgggataccaccttccagggacaccaccttccaggaacctccatggattcagctatcaggaagctccccaaatcctgtcctttggggcttttaggagtctttataactaggtatgattgattaaatatttggtcagtggtgatgagcccctctgttcccactggagattgaggggatgggctgaaagtccaaaccctctattcttgccttggtctttctggtgaccaaccctatcctgaagctacctgtaatcccagccaccagtcacctccttagtgcacaagaagacatcactattcccaggattttaggagctgtatgccaggaaacagggatgagtaccagatctttatttcagcatatcacggtctttatatcacgtagagacttttcttagtgtctaacaattcctgtttgctggttcatataaaggagggggactaaaaggctgtgagaggctcagagcccctcaactgcacttgctgacttcaggcttcactgcagggcatctggctggctgtttggagaggccatagtgtcaatgcctgttgcattttggtcttaggatggtatcaccctctggaatccagtgtttctcctggagggtgaagatgcagtctagggggacccgcctgcgaatctcagcattcagcacacatggggttgtggggtccctctgtattcggtgtggcacccccaggcacccccagttccccactcgccctgatacccatacccaatgtgaagtcctggcatcacctgggcataaaaaggggagtttaattggctgcttcctaaacagacttgtagccaaccctctttatttcagtcctcattcactccgattttgtaactgttatcacaaactcctgagtctggggggctctttggtagaaactgtgttggttgttgactctgctcactgacagcttgaagctccattttgaagttctgctgacttgttttatccactgaactcccagtttccagtttcccaaatctgttgctgcggctgcatttcctcttccggtcatgggattatgccttttattttattattattataattatcttgagttggagccttgctctgttgcccaggctggagtgcagtggcacgatctcagctcgctgcaacctccgcctcccaggttcaagtgaccctcctgcctaaacctcccgagtagctgggactaaaggcatgcaccaccatgccgggttaagttttgtatttttcgtagagacaaggtttcaccacgttggccaagctaatctccaactcctgagctcaagtgatctgcccagctcagcctcctaaactgctgggattggccggacgcagtggctgacacctgtaatcccagcactttaggaggccaaggcgggtggatcacaaggtcaggatattgagaccatcctggccagcatggtgaaacccaatctctactaaaatacaaaaaaagtagccgggcgtggtggcaggtgcctgtagtcccagctactcggcaggctgaggcaggggaattgcttgaacccaggaggcggaggttgcaatgagccaagattgcaccactgtactccagcctagcgacagaacaatacttcgatgcaaaaaaaaaaaaaaaaaaaaaaatgtgctgggattataggcgtgagccactgtgccatgagccactgtgcccaactgtcttatgccttttaaaacagtccctttgctctcctgtgagtgggatgaaggaaaacggtatgagtagatgtgtgtgctcaagctgctacttgtctcgtccgtttattgataaggaaagtgaaattgaggctggctaagtggtgtgatcaaaacaacagcagctttaggaggagctctttgcctttttgttgctttgttttttggtccctgacttaatgtatctttgttaagtgtgtgccaggcaagtcacgttaagcaggttggggacttccctggagtgatgtgacaatcgctaacatttattaagtgtgtattgtatgcctggcgctgctcttgttctaatctctttacatctatttaatcattacagcagctttataatgggagctactatgatcctgctctttcttacagaggagggaggtgaggcatgaagttatgccttgtccaaatttgcaccgctaggaagtggtgaaactggggtatgaacccaggaccggctttcctagtagtattgacactgtgggcccagtggctctgtgtggtggggctttcaagtgggttgcaggctgtttagctacgttcctcctttctcctcacttccctactggataacaacaccccccacacacacagccatgacaactacaagtatctccagacattgccaaatgtctctggcagggcgcagagccccctgagtgaggagacggacccaggcaggctgagtgcatgccttgacagctctgccctgccacctcctggtctggtgaattccaggggtcctttttcctccccctcagaaccggacagcaaggtctgtgactgccttatccacaggcagatcccgctcgccctgccctggcatcaccaccactgggcagctttgcctctcactagatatgaaaaaagtggaaaagcaaaacagaaactaaaggtgacaactctgcagagctgggcacgttggaaaggccaagccttaaccctgtctctctctctctcccatcttcatccccacagagccaaggtgaagaagggggtgaacatcctgagtgctcagacccgtgagccccggcagtggggcgtcaagcaggaggtgggcagcggcggaaagcacgtgacggccaccgtggcctgccagcgcctggggcccagcccacgcaacaggtaagcggtgccctccctgcaagcgtgtgtggttcctggtcccgggcccaggccggctggtgcgtaagagccttgacttggactcgcgtgagcggctgctcagaggagctattgaacccaccacgtggaaatctggaggcattgatatccatgcaggaccctctgcctctgcagcagggcggggtggggcgctcgctctgcagcgctgcggggtcagctttggagccgggtgagctcatctctgctctgatagggcttgtgcatcctccacacctgaactgactttctgggggccttgccctgcctacattatcagaagatgctcggttacaaagtactcattttttcatgaaggggaagattgagttttcagtgagaaggaatttaaggaaaggtggtgacagtcagtggcaataatggagaagcacctgctatgtgagattcactgtagacatcctggatgattttttaaaataattgttttctggttataaaagcaattcagactcattttagaatatgaggaaagcacaattatagcggggggaatcatgtgccaatatccttcctactcaagggtaacccactgatagcatgttggttcatttccttccagggtgttatacctgtgtaaggctaatgtatgctaaatatatttagtttacaaatttgggatcatcaaatacgtacagattttaaggacactacaattttcacttgtattggaaacattttctcttgacattaaatattcctcaaaaacattcttaatagctttataatattcatcagacggatttaacgtaacagaaacaaccaaccatgcctgtattttaccatttaggttgattccaagttgtttctaaatttcaacttttattttagattcagggggtacatgtgcaggtttgttacgtttatatgttgcctgaggctgaggtttggggcatgaatgatcccatcacccaagtggtgaacagagcaccgaataggtcgtttttcagccctttattccctccctctccccggctctaggggtccccagtgtctgttgttcccatctttataaccacatgtacccactgcttagctcccacttataagtgagaacatggagtatttggttttctgttcctccattaatttgcttaggataatggcctccagctgcatctgtgttgctgcaaagggtatgattttgttcttttttatggctgtgtagtagtctatggtggatgtataccagattttcttgatccagttcactgtggatgtgttgattctgtgtctttgctattgtgaacagtgctgcaatgaacacatgagtgcgtgtgtctttttggtagaacagtctatttcctttgggtatatacccagtaatgggattgctgggttggatggtagttctgagttctttgagaaatctccaaactactttccactgtgatcgaactaatttactttcctacacacagtgtgtaagtgttcccttttctctgcaatgtctccagcgtctgttattttttgacttttcaataatcatcgttctgactggtgtgagatggcatctcattgtggttttgatttacatttctctgatgattagtaatatggaacatttttttcataagtttgtggccacttgtatgtccaagatttattcttatagataatgcagcaataaaccaccttccacataaatctttgtccacatccctttttccttaaggtggcttcttggattcaaaacgtaagattatttttcaaggctcttgtattctgccagtgtatttttctgaagggattggtattaaagaaagaaatagtctattactggacacattttcttaagtgacagctgcaagtcaccatgaaaaatcctcaaattctctgcttggtttagaaccacgctgttcttttgcccacagaacccactcctctgtccttcctttaatgtgtaatgagaaaaagaaaatctggtgtcccaaacagttcacaaactcaaatgccaaccgtcaccatcattaccccaagaaggattttagtgcatctggcggaggtgaggtcagggacaagggttgggtgtctgaatctttgatttgtgaaaacatggccagaaagaaatgtgtttatgagtcccttgttccaagcaggagatcagaggccaaattaaatctcctgaatcgaatgcacatgaagtctaattaacctgtaagattagtgttgattatgcaaatgaaagcgaatgtgttcattagcaggtggcaaagttatgtatgtgaatagttcttcacatgggaacctgaatgagaagcagagcgagggagatgagcctcatagtgtcgagtcctgaagggctcctgtggccaccctgtttgttctgagcttccaggcaccccactttgaccccagttgtgtttgctgtctcagtggtaagcattgtgcatgagtttccacagtcagccatcctgaatgttttggcagactgtggacaagaggaagatctgaatctgcagaaatagagaataatggcatctgaggcacagaaagaggcactgcagatggttagaccccagaaatgtgttcaaagaggagggcgggtggtgcattgggtggagtcaccatgcctggccccactttcacttataagggccattgtggtcatgttggacccacctgggtaatcccagatcatcacccatatcaaaaccttcacttaatcacatctgcaaagtccctttgccttgtaaggtaacatattcacaggttctgaggattaggatgtagacaaattggcctgcctctgtcttcttacagcatggcctctgtcatgtccattcagtcctgagtctttgaaatgctgggtttggacaccttggggtaccgaggtcaggccagcgagtgcaccttccaagattcccagggcggggaatggcgttccttcccatggagctttcttggtagccgaggaggtctgatagcaagatctttcttatgtatagcactgccacgggcaatggtgtcgcccttcctggcggggtccagcagaagcagtcagtgccagccaggagtgtgtattcttgcttcaaggtgagggttgcgcagtcaagtatctgaagcctcattggcactgagccccaccaaggccatgactgtggctgcttgcaggagcctctctgcaggactctgagagcctgcactggctggatggcactcacaggtgcagacagtggttcgttccttgcctttggctcttgaaatatcccattgtgaaaccccatctctactaaaaatacaaaaaaaaaaaaaaattagccgggcgtggtggcgggcagctgtagtcccagctactcgggaggctgaggcaggagaatggtgtgaacccgggaggcggagcttgcagtgagctcagatcgcaccaccatactccagcctgggcgacagagcaagactctgtctcacaaaaaaaaaaaaaaaaaagaaatatctcattgtgagcttttgcatttaggtgagtcaccaatttgagatgtggaagctgcaactgtgttttcagatcttggccacatccccgtgttggccacatcccctggctggtaagacagggaacctagggagacataaatagtttcaaaagggcgaaactggtcagcccatggagaggctgtcacaccagcggcttccccaggcaggtccagaaaggtggttctggaaggttttacgaccccctgccaaccattcccatctgtagctgtttcttcaaaggcacaaacaccaaacacacacaccaagtctaactaaaagtggtggctttgtaaacaagcacagcttcagagcatgccccctggccctttgcccacatgaccgctcacccctgttgatcccccatgaccactcacccctattgatccccatacatagaagccttctacatcaggagatgatggtagctgatctggggagctgagctctgagagcggcaggcagctagtggttaaacacgcctgttgttgatgcctcaagggctctgaaagtcattctagtcaataagtttcaaacaggaccatgaatgggcaccaagggccccccaatccctaaaattgcttgaaaatatatggtgtgtgagagactgcctccacgtgccattctcattacaccactttcactgctctcttccaattctttaactcatatgaactggtcgtccctgaattgaacttggttgacctgtgtttttcatgcaaaaataaaatttcagtgatatttgttgggacacacaaaatctccaattagccatagtccccattccaccctatgtcttgtatctggcctctccacttgtgaactggctacgtggtttgtgaaggtgttgcagtatgaaaatccagtgtatcagtcagctatgtaaggaccccgtgatcatgtagggcccacttggatcatctctccgtctcatgatccttaacctaatcacatctaccaagtccctttgacttataaggtaacatattcataggttctaggcactaggatgtggacaaatttgtcacaatcatgccacataaaaaaaccacccaaatctcagtgatttacaactacagtttgccctccatatccatgagttctgtgttcacagattccagattcttttagtggaagattgtgtctgtattgcacatatacagactttggttttcctgtcattattgtctaaataatatggtatcacagtaactatttacatagcatttacattatactaggtatgataaataatctagagatgatttaaagtatgcaggaggatgcgcataggttgtatgctactactacatcattttatctaaaggacttaagcatccatggatgttgtcatctgcaaagggtccatgagccaatcccccttgggtaacaaggggaaactgtccaagctttgctctcatgctcccagggctgtaggtcaagggcagtctggacctgctaaggggaagctcaggcgggagactgccttggggtgtgagctggctgggcttagctccaagccttgagctgagtgtctgtctgtccatgtgtgtttggtcctgggcccaggctgaaggggcagagttattctgggtgtgctcctctcacagcagctcattatcctctcacctaagaccaaaactggtgtcctgtccattaacatcccccaggccaacgtgagacacgaggccaggccatggggtgaggaagtcctcaccacccagacatacggggtgggtgagtggagggagtgcgtgctgcactcagtaaagccaccatcaccccccggcgcgtcaaagggctgcttggctcggaaaatatcccctattgctgaaatgttcttgcacagtttccatctgtgggaagctttagacatcccctttcccatgttcgtttcttcaacaaattatgtgtcaagtgcctggtacttgccagctaccatgctgacaatctacggccaggagtcttatcgggggaagttcaaagatgagatacttaaagactgtcccaaatacgaactcacacctggcgaatgatgaaccgtgtcgtgctcagcataggatgaacaggggcacttgaatgagtgaggaaagaagaatcataagtgagacaagcagtgctggctgtgtgcctcgcgctctccaaatgctttgcatataatcctcctaagcatctaatcctccttcaagcattcgaggtagacacagtgagccatgacctcaatttgcatggggggaaccgagacatgatgcatttttcaaacccactcagtaagagctggaggtggaattcaaacctgggaggtctgcctcggaggacaagctgtcgcttgtgcttattcttgtcctgaaaggaaatacacccaatggatcaccccagctggcagacactgctccaccctggttcccgttaaatctctttcactgctctatatccctcggtaggtgtgttagccagctagggctgcctgaacaaaattccacagactggttggcttaaaacacagaaatttattttctcaccatctgaattctggaaagtccgaggtcagggtgctgtcaagggtggtttctggtgagggatctcttcctggcttgcagttcgccaccctctcggcatcttgtgtcctcagagggcctttcctctgtgcatggagagagagaagctcctggtgtcttgtctttttttttttttcgagacagggtctcgctctgtcacccagcctggggtgcagtggtgtaaacaggactcactgtagccttgacttcctgggctcaagcgatcctcctctcaagcgatccgccaagtagctgagactacaggcatgcaccaccaagcccagctaatgtttgcattttttgtagagatagggtttcatcatgttgcccaggatgggttcaaactcctgagctcaagtgatccacctacctcggcctcccaaagtgctgagattacaggtgtgagccactgaacttggcttcttcatcttcccgtaaggacaccagtcctgtgggattagagccccctcttaggactttatttaaccttaattaccatcttaaaagcctgctctccaaatatagtcacactggggcagagggctttgtgagatgaattttggagggaacaattcagtctgtaatcatggggttggctctgtcatcctgaacctgcttccgtcactgcaccacctggggctgcccctcacttttgtgcacttgtgcggattcttagaagagcctgggagcttcttcctgggatcctctttgctgatgatggacaggtgtggaatacgaaagctcagccccatctcccccactgcagacaactctgaattgtcatggacacggttggactcagagcttcccacagggtcaggctgcaggctgggtcattgaaagcacaccttctgtttgcttcttcctgcaatgtgaactatttccctctccccttctccctttccagtttctcctggtgcgtggggagaaaggaaacaacatccttaatcagtcacttgcaaatgaatccttgtcttatgatcggcttctaatgaacccaaactgagactctcagaaacataagagccccccccctcccgcttcctcccctggtgaaatgtcctcttagacggggagagagcatttgttaggaaaactgtcaagcaaaacagctgttctgctggagtgccgtctccctgtaacctagaacctctgaaagaccagggttgttatggtcctgaaaccatctgtctataaacactcagacccaggaagacagctagcacctgctccatacacacaccagaccgcgtggcatttggtttccaggctccccatcaccctgggagaggtctgagcatctcggcagtcaggcaaagtcagccaacaatttaccagagtgcacgtcgtatttacagggtgcgaggccaacagagcaattagcatgctgcccaggtccttccccgtcagtgccctgtgacagagaggatcgagcatgaagcaaatgcttctgtgtctgcagggaagaggcagaaaagcacatagagagcgtgctgaaaggcaggaacacatcttgcggttcttttggcatcctcctgttccttaggaagcatcttccgcctcccccttcatctcctttcctcggtctgcatcttttttcaaaaccaggtgtccgggtgagtctgagtagctggggagcagtgaagcgagcagtgagtctgacctcagcactggcaagagggaagagcggaccctggctgcttttgattcgaacgttgcaccttgatctgataaaggtttctgcctcaagcattcctggagccttactttaagctcattccttcagggaaaatgctaaaacttaggtgtttctttaaactgtgggcatactctgaagttcaggggggactccgtgttgggaatgcaaccccctaaggctgttgatgaggcgggctccccagcggggtcggtgtaggcacacctgcctgccgctccacttcccactggcccacatgcacctgtgctgttaggtgctgaacaccttcacttcaaccggttcacttatgtgtctcaagtttctcattaggcattcttattaaaacgctactgttaacatctcttccagaagcaaatatagtatcttaaaaatagaaacttacatagaaaaccataatattctgtagattttatagtgcttgacagcacacagaataatactgtgtgtatttcactgtctctggcactttacaaaatgctctgtgtacattatttcagtaaatctttctaacggtctcatgaactgaggtatcataccattgggcaaatatagaaaagaataaagacactcacgggaagtaagcatccaaatgaatatttaggcaaatcataaaaatgttttatttaaaaaataactttaatgtacacaaataaatggagaaaatgcctatcagttgcacaaaataaaggtgagcataaacaaatacaattaaaacataaaaatcctggccaggtgcgatggctcacgcctgtaaccccagcattttgggaagccgaggctggtggatcacctgaggtcaggagttcaaggaatttgagaccagcaggccaaccctgcctctactaaaaatacaaaaattaagctgttcatggtggtgcgtgcctgtaatcccagctactcaggaggctaaggcaggagaatggcttgaacccaggaggcggaggttgcagtgagccaagatcacaccagtacactctagcttgggcaacagagtgagactctgtctcaaaaacaaacaaacaaaaaaaaagcataaaaatcctattgaagtctagctagctaatgttaatagcaagaggctgtgtgcttgccttggaggttagagaaaggggttagcaggtgcagggaagtgctgtggacacacgagagtgcaagggtgtccagtcttttggcttctctgggccacattggaagaattgtctttgggccacacataatatatgctaacactagcgatagctgatgagctggaaaaagaaattgcaaaacaatctcataatgttgtaagaaagtttacaaatttgtgttgggccacattcaaagctgtcctgggccacacacgcagcctgtgggctacaggttggacaagcttgcaagcagaccaagctgagattttcttctccttacctttttattaggcttatttttttaatgcctttattttacttttgtaatcataaaaacatattcaaagatatgttttttaaacccatattccatatcttatgtaactattaccattattgcgtcctgccttacagagtatatcgaagtatttttataccattgagatcagtctgtaatatgttacgtctcttttgtaacttaacgttgccaaagtactttgcttgtcccatacttagctttttaaataactgattaagtggatggacctgaatttatttagaaagccccctatcgcggggcacctgggttgtttgttctcagcgttttagtataaataaaccagtggcagacatttccacgacaatatggcactgccttttccccccattctgaatcatggagcacagggagctgctgtgagggatttctagtccgagtttctgcccttcctaactttattttgtcacccctctcctggccttcacacccaacatagaaattggggaacaaagtcaaaagctggcaccagatgagtgaaggggccagggaagaggcagggagccaggaatggcctgcgggaggagagggagggaccccgcgtggtgccccttttactcctccagtccctccttgttgcagctccgggggtgtctgtgcccaggactggttacgggccatgtgggagactttcactttaacctcaaaacttctaaaagaatctaaaaaggaaacactttctgtccacgtgattcaaccttactcaagggatgcacgttgccttttggaaacctttcctgggatacttcatcagtcccctagaggggctgtcactgacacttgtaattgtaggactgaatgctgagaggctgcaaagctagctggactcagaggcatccatgtgaaattctgagccatttaaccaggagtcgcaaatgcaagggacaggtgaaaggaggaggtgggtaaggaagcgggtggaatgaccatgccctgcaggctgtgagaggcggggagggtggccggctgcaccctctcagaggacacatccattctttaggctctagagccttcccaggtgggaatgccggctgtcagttgccagatctctggatttttctagacctgctgaaaatccagaaatctttcaattttttaacatttgcttggatgtttaaaatccctgtgcaaatcaaacaaaacgtatattgttcaggaaaaattgttcatcaggaagtaaatcatgtgcaaaagtggcctgtttgagtcaaaataatgcctgttttctttaggaggttgattgcctgtattgtccaggtacagagtttgcagcaaaacagctgtctgggaactcgactgtgcctcttttggagggacttagaaagaaggccagctgtttcaaagactcagctgcccctcattttcaccacacgagccctcctaaacagagcacatcgcacagacgctcctgtatttccagcagatgctataaacacgcatctgagctccggttcttatggctgtaagtgtcagccctaattgggatcctggtgcctggcgtggagttctctctccctgctcctcttgtgacccagcttctagtttgatggggtggtctctgggccagtgttccccatccgttcttggaggagactgggatccacacacttccatagaacagtgagtgatgcctctcctgttcttccccctccctggaacagaagcagctgctgcatccccaagctccttaattcaagagccagcatcgtgcttcagggactctctgctgcaggggagaaaagtaaatcaggcaggtaataaaacgagaaggctctttccaaaaaaacaaaaaacaaaacaaaacccaaaatcgttgaaaatggtgaataaaatgcccattagtattcctttaagcagtctcagttgcataccttatatacataactgtgcttggctatttgttttggagaattctggaacaggaacgtgctcatagctgcttaaacagttttcaacagtgcttagaggaatgaagtgctaaaataatctgcttttccctaaaggaaattgctcagaccaactgccttctgtaagagatatttgaagattgcaaactaccacaaattaaaatctcccaaccaatggcataaacttacattttgggtcccctcctaaaacaagttaaaaacgtctcccactccacacacgcaaaacttatagcaggcttctgtgagcatctgcagcaggataatttattgatacacaagttgtgtgggtctccataaaattgtccctccttttcaccttcagtaggcttcaggcctttggcttcctggactccataggggtttgtggcaaacgttgactgttaaagcccaagatcattgaggttattgttgttgcctaacttttttttttttttttctttgatacaagatctcattctgtcacttaggctggaatgcagtggcacggtcatggctcactgcagcctcgacctcctgggttcaggtgatcctcccatatcagtctcttgagtgactgggactgcatgtatgcaccaccacacccagctagtttttgtttttttgtgtgtggaaaaagggtctcattgtgttgcccaggttggcctcaaactcttgggctcagtgatcctcccacctcggcctcccaaagtgctgaggttacaggcctgagccactgtgcctggcccaagttgtctgtcatttgtagacactaaactcttccaagagaatttgctggaggcattggggtggtgggtggagagtaggggagaggaacagttgaggagaggctgtgaaagagcctgaaggaagattttactggagaccgaagggccagatctggcatcccaagcctcgatttgatgtttgaaatggtgaaggggcttctccattgcttgattctgtttcaaaatgcaagccccacagtttatcatcccatcaagactacctaccatggaggaaatgaattttcccaaaggaagtcaggatgtgtctatagaggaggaatagatgctgggcagtgaaagctgatgtgtaggacatggcgcccatgagaacctgcacagtgttggacagtttgtccacaccatcacccatttccactatacagtgagtattaatatgatccattttcaaattatgacactctgtgttataggttgtacttttttcagaaatattccaaggaacatactctccatgtccccaacccacaggctcttctggaacctctctactctcccatgaacaggtggcaactttgtcttctccccttgaaactgggtgggctgtagtgactggttgactcatagtgctgagcagaagtgatgctatgtaactttcaaagctaaatcataaaagcgccctgcaccaacatggagggagccctattgtccaaagccaccatgctgtgaggaagcccaactatcccatgtggaaaggccaaaaggaggacccccgagccttgtgaatagagcatggtgtccagctgcccctgactgctcctgccactatctgacagcaactgcatgagagacccaagccaaagacacccagctaagcccttccaggactcttgattcacagaaacaatgaaaaacaataaaatgattgcttttgttttataccactacgttttggggtgatttgtagcatagcaacatgaaagtgaaaaacaggggaactcctctgagttcaactacttgccaagcccaacagctactaaagatcagtgtcaatattttagtcctcttctttatggttctaaatgccccttcttctcccccaacaaggaagagattcctaattaaagagatattgacgggtttgtcatcttacaccaagggacccttcccacttcccagcccagcattacctctggaagcttatttcttttggcacccaagcctcatttaaggtatttcatggccagaatgaggagtttctgctttcttcattcccatcatagtctgacatgtggtccccagtcaaaactgaaaatgtatgaagcaaatatatctctcagcatctgtcctgaaatgatttattgtatcaagttaacaagtctctcaagctcttgccagaccagtaattagttttaggggaaggctgggaagctgatactctggcctctgacataaagcaggtgcatttcagaactaatgtctcgccttagagaccctgccttaccaagaggcacaggtgaggtcctccccctgaaaccatgcctctgttactggtcctcagacagcaaactggacactagagcaggattttgggactagatttctaatatccccaaggctctgtgtgtctcagagaacatattcacagtcttctcagccaccactgagccaccatgctatgcaaagttcatccactttggaaaacccttcagatttcacagactcttgttattgaggctccttctcatatctggctgatcttcacaagacagtggcaaactgcagtagaaatgagcagttgcctttttatttttaatttaatggatcttttttctacatcagaggtcaagtgtttgctgacatcgtgcccaaatttcaagtactccacaaagcaatatggcgccacaaataacaacgtggcctcttgagccagcccggcaacttggattcacatcttggctcttctgcgtggaagtcgcgcggtttcgcgcacattagtcagtctccttggctcttacatgaaaatgagatgataagtaataatagtacctttgctgaggagtgcttgtgaggattaagtgggttagtatatgaggggtgcccacctggagtgttagttgtgttttctatggaacaaggcctccttaagttcttcctgacattttttacacagtggtacagaatatcttgcattataattgtggcagagacacagcactattttcccttggtggctgatgtgatttggctgtgtccccacccaaatctcaccttgaattgtagctcccataatccccacatgtcatgggagggacccggtgggagggaattgaatcatggggctgggcttttcccatgctgttctcatgatagtgaataagtctcatgagatctgattgttgtataaatggcagttcccctgcacatgctgtcttacctgccaccatgtaagatgtgactttgctcctcctttgccttccaccatgatcatgaggcctccccaaccatgctgaactgagagtcaattaaacctctgtccttcataaatcataagtctcgggtatgtctttactagcagcatgagaatagactaatacagtggcacatgccaaccactgagctatactgccctgctgactttgatccactccaaattcccactggaagctctatcctgtccacctccctcttcctttcagtggctggttggctctggcctttactcccaccctcagggcaacctgtaggtaaaagagagggcagtgcccagtcagagggcacctggtgattgactattctttgctttgactatttataagccaacactaaaggtcctaggcttgttgcaatttgtcactttcctaaggtatattcccccttgttcctacttttgttatttttataatcttgatttatttgggggtaaaatgtaatacatttacatagttccaaactcaaaaagtatacagacttatatacaaatatctacttctgcctccagccacccagtgcaagcccccagaggtgatcaacatttgcagtttaacacatacctttccgaaaatatttcatgcatatgcaaacacacacacacacacacaaacacacacacagacacacacagacacacacacaaacacatacacacacaaacacacacacagacacacacacacacacatttcctctcccactgcaacttcaaacaattttttttatctaacaatatatcttgtattttttccatgttagtacataaagttctttattctttttttccaaacatctgtatattatggcatatagtgtaaattatataaaccaacccccatatgaactgacatttaggttattctcaggttttttggggttttttttgcctggaagtactgctttgaataaccttatgcaaagactgttttgtacttctgtgatcatattcgtgaaataaactccagcagtggactagctgagtaaaatggtgtgggcatttacacattgcatattagcatgttaccctgcacagagacggcacccattcacaccaccaccatctttacccacacgttcctcataagctgtttgatcctttgagactcatattttatgtactcagaaatgacttggctattgagtggcctgagattaccactcaccgtggaaatcgtgctatggatttttaggattttgtgccagagccagccccgtgactcctgggaagctctagcatggtatttgtgagcctgggatccactgagtcactggtgcatcccccttggatctgctgcagggacagctactatgtatgaacagggaccatgtgcaggctgtaccttgtgtcttctctaaattctcacttaacctgggctctctagttccactctttccaccaatgccagcaccatctttcttttcaaaatgaccaaagtgttctctttaaaacataaatcaggctgggcatggtggctcatgcctataatcccagcactttgggaggctgaggcaggtggatcgcttgagcccaggagtttgagagcagtctgggcaacatagtgagaccctgtctctacaaaaatacaaaagttagccaggcatggtggcacatgcctgtagtcccagctagtggagaggctgaggcaggagaatcacttcagcccaggcgacagaagctgcagtaagccctgatggtgccattgcactccagcctgggcaacagagggagattctgtctcagtcagatcagggaacttcctgttggctcaatctttgcatttctttctgataaatccccaagcttggttgtggcctgcaagatcctgagtgatctggcccctgcccactctggaccttaccccatgcttctcccatcacttgcaactcatctcccacagtggccttccaggagacctgaccctgatgagctaagcgtgtttctaccccagggctcttggatctgccattccctctgattggactctttgcatgaccagattattctaatttctacatcttagcttaaatattctccaagaggctatctgtgaccaccatggtgatcacctgcttcatcttatttctagaactcacctgtatggaatcaccttgtttctttgtttgccatctgtctctccatgagaatgcagatttcaccatggcagggaagtgcctatcgccctcacgtctgtgtgtttagggcttaactcagttcctggcacagggaagggatggaaatatttgctgcatgaatacatgtattgctgagtgaaagatctttgtaacaatatgttgagttatcttgtctctagtttacagatgaagaaatgggatcagagagccctcgtgttgagagtatgaatgctgaatgactagataaatgaatgatgcttgtcatgatatattgaattagagcctgttgtcccaccgtacagataaaggaagaggctcagacagtctctatgtgctgaaagaagggcgccctaggagtcaatgatggagccgcaaggttttggaagggaaatgcaagcaaaaaccaaagctactgtcatgccccatggcttctttccttcccccagacctccctgccagctctcctcctctcaacagctgtgataaaggcagggggaggatttattcttcatgcagtgagggatttatgaagcaaagtttttatgtcaatgttgtactaggcactgctggacatatagacattttgttaagatgtcattccagttggcaagaacttcatggctttgcccaagcttgaaatttgctaatcataaggaaatatagagcttcttcatctttattttttcatgccaggctgcctctcagaaatcagagacttgcagggagcaggaaagctcaggctgttcccctaaaagcttgaaaacggaagagtcttcacacgctgccttctgcatgcctgttaaaccctcccagttagggacctctgactacagcagcctgattggaaggtcttagaggaagcacctgaacttctgtatttatattcatcagtcaaataattattaagtgccttctaagcagtgggcatattagggttcattaggtctggacgatgaccgtgtggacgtcattgttggttagaaaagatgcatgccaaaaagtattcagttgcaactatggcaaatgctataaagaagaggtgtgcagtgttaaggaacccacataaagaagtgtatgacttaggatatgggccaattgcttgcaaaagagactttgtttaaagtggtatgaatttcaaaaacgtaattttttctgttccatagagatccaaagtggtttggtgcctctgctctgcaatgccatcagaagcccagtctcttttctcctggcactagaggctgcccttgttgatatgattcaagatggtgtgctagtacttgcaagcccagccaatgggaggatggagagcgagggagggcagtggggcagagaagagatgggtggggtgttggggggagtgatccaggaagataccgtcaaccagttagactatcccaataaccccaaataaggatccaatgcgcgtctaccttcccaccaccatctaccccaaactacagcctccgcaaaactggaaaccgcatctctctctcctctgtcactttgcacaagcccatgtggcttggcgccaagcattctgaaatgacacccaagcctcttaagttggcaaaatatttgaggttgtggttcaggagaaaacgtagcaacacctattttttaaaagcggtacgaaaagagacagtctcttaacatagagagattatcttaataactttaaattggcccttcagacctcttacttcttttctcaaagacatcatgacaggttgttccgtaaggctgttctccatgcctttcctgggtaacctaataagttttttttctttctgttttcagcatcacattaattcttcataagtggtccttattattccctgcttgttccatctccaatgcagtattttctcaccaggggtgtgtaaactaggccggctaaatggcaaagacgcctcattcatcatgtctttaatttccccaccttagaaggaagcactgcagcttaagtgtaggatgaaagcaaatcaccttaatacttcaccggctgcctgggctgaggctctgcatgcctcgccttcctcccgtggagcagacaagggcaagcgaccatcttaaaaccacagtggtcacccctgtaaccatggtgggtgtagattgagtaggataaagggatcagcttctgtgacagcagcccccaaatccctggttcatcaagatagagcagatttctctcttgtttgtgtgtttgagttcttgtagcagcttccactctgcaaaggtggcaggtacccagactcctgccagcttgtggctccatcaccccaaaatgttgctacagtcagtgcaatccaagatagctcatcaccaccatgaactccagccagggagagggacaaagggtaagccaggagcctgctgccttcttttaagtgcaggacccagaagctcttgacccagaagctctgtgtcatgtcccatgacagaacagacataccagctgtgcctagctgcaagggaagcaaggaaatgtcatcttgtatcctggtgaaccatgtgccatgcccaaagggcacagaggaagaaggggacagctgatagtctctactcaaattcaagtacaaatctgaaaatactcagagaatgaatgttgaaagaaatccaacatgagtcctctgaagtagaggaacttctgggagtcagacaggaggtccagagccttggcaggtcctggaggccattctggaaggaggtcatctggacagcaaggtgagggctcaactgcaaaggacagaagtgggcttgtaaaagttttcaatcacatgagcaagaaccagcacaacacagagggctgctcggcagaaagagagactttaatatttaaggcgaccattgccacaagccaaggactcctgtttgctccttggagtgataatgataatgatgatacaatcatctaatgtcccccattagtagagctgctgctgttatcctagcactgtgccatgcgctctcgggcaagtctgggtctgatgtgattgaatttgggcagtgtacattcccggaagaatgactcttcagacctcagatttctcacacataaaatggggatctcataagattgttatggggatgacaagtaatgtaaaaatgtgacaagcttagaactgtgcttgacgcttagcaaatcctcaataaatattatctcttgtcttagttcatttgggctgctcaaacaaaaataccacagattggtcggcttaacccatttatgcctgaggttgcaattttttgaatttttgcactcagaccttggcgatgaccttgagcaataggatgtaaataactcccacatgcttagtgttccaataatggaacactaggcataaatggctaaacctttatttctcaaagttctggaggctgtgaagcccaagataaaggcataaaggcaccgcagacctgttgtctgaggagggctgcttctgggattgcagtaggctgctgtctccttgcgcctcacatggcagagagagcattccgggctctttatctcctcataaggacgtgagtcctattgtggaggctctatgctcaagatctcatctaaacttaactcagctctgaaaggcctcacctctcagtacaattgcattgggggttagggtttcaacatatgaattttaggggggcacagatatgcgggtcacaacacctttgtgttgagaaatagtaattattatttctcacggctttgcagtcagtgaggagaggcttcagccatcacagcatcatctccagcagtgccccgcaagccagcatgagattcaagtacaaactgtgccgcctggcctggggagcgtcaaggccagcactgtccagcagtgctttatgcccaccccgtgctgcttctttgcaggaattccagttcaaccatgatgttttctgattcttacatcaaccctgagatatgggtacgatgggtcccatattccagaaaacaatgtaagtgcagtgacggggttgagagataacatctgccatttaaaatcagttctgccacttacatctcgtacaactcagggaagacacttctctgggcctcagtttccttatctctaaaagggaacttgtatttctcacctcatgagattgccctcaagagcaaataatttgacaagtgccacatgcttggcccaaaatgagagctgctgatattaggaaagccagggattcttgtttgtgggaggcagcttctgacatggtctccagggatccccccttcctggtagtcatgcctttaaacaatcctgtcctcttccacgggctagactggcaatgtttttaaccaatattatgggatattgttatggagaatggtctgagaaagataataattattataactaattaacaaaaatattatgggatatctaactaaccaatagtgatatgccactcccatgattaggtggcaaagcctggggtttatgtgttgctagcagactccattgtcttcttggcctgtgtgctggcagagcccgcctggcagagaactgaaggtggtctgtagccaacagtcaacaaggaactgaagctgccagcccaatagcccatggtgagcagaattctctcaacaacgacatgatcttggaagcagatccttctccaactatgccttcatataagaccccggcctctcctaccacctggatttcagccttgagagaccctgaggcagaggacagaactaagcttttcaggattcttaagccacagaaactttgagatgataaatgtgagttgttttaaaccacagattttagggtaaactttcgcagcaatgcataactcacagtgttcttacagatgacctagaattgcttgtataaactcttggtattaaaaaatagtcaataggaaaatgtaaatataagaagttcttcatgtctttatggaactttataatttgcaaaaagcatctccatggatatcatttcatttgatcatcacaataaacctttgagagctggacggggtagtgggaattcatgtcacaggtgaagaaactgatatttaagggcattaaaagtaactcatccaaaaccacctagcagagtagaagaaacaaatggtattctatctccaaaatgctatattctttccaagaaattcaccatctatttggggatccctttttccaaaattcagcataaattccatagtttgactcttaagaactgcatgaaggtcagtaacataatataatctaaataggtgaaaaaaaaaaaaagaaaaaagaaaaagaatttgagacaaagtcttactctgtcacccaggctggagtacaatggtacaatcttggctcactgcaacctccgccacctggattcaagcaattctcctgcctcagccttccgagtagctgggattacaggcgtgtgccaccatgcccagatagtttttgtatttttagcagaaatggggtttcgccatgatggccaggctggtcctgaactcctggcctcaagtgatccacctgcctcagcttcccaaagtgctaggattataggcatgagacaccaagcctaaccaaaaaaaaaaaaaaaaaagttttaatcaatagctgtctctgagctttcagagtcccttgcattctaggctttcagattaaagaatgctactaaagaggataacatgaggatgaacataggtctaatatagaaaaaaaatgattgacattttgtgtgcatatttctgaaacctatattgtttgggggaggttttcctaaagaacctattgactttttggacctgagaatgttatttctttgctcgttttatttaaatgtattgggttggttcaaccattacctgaaaatgtgaaacattgtgtttggccctatattgattgcagccacaccatagagggaaagatcctggctgttggtatttgctttgtttgtttctagagcatatcaaactgacataaaacgcccatgaaattacttctgagtttgaatggcagagtgacgccatccttacatgagattgatctctttgattgaatcttccatcagaggagtaatgggtggataaatagccacattcccagctgcactgccacatcacgtagttcgtactgtatggtgcctcagagcttagactcagaaaagactgccagggttcgggttccaacattcaacttagtaactgaaatttaacaagttactaaactctatgtctaggtttcctcgtctttaaaatagtgatgacattaatagcatccaccacctacagttactttgaaaattaaattaatgtgcttctaaaggctcctgggaaacatgaagcattatcattgtgcttaatgttggtatagttgtggttattgtgttgcttttagatgtttcagggatcctcacttctagaaacttgggaacaaaataccaaagggatgcatcattttgaagagcaaattcagcttattgaccctttagaaaacatcccaacccactttcaagttttccaggaccactcaaggatagccagtcttctaagaccccatccaaatcagaacatcataatgtctccttcaaggagtgtttcacacagacctatctttatccaaaaaggctgtttcaatgcaagagaaagaagtgccaacccaaactcaattgaaaaaaagaacctagcaaactaggagtaagcttgaattctacacaaggggatttagtagttcaatgtatgtcacccgatgactgtagttaataatactgtgttgtttactttgaaagttgctaagagagatcataagtgtccacatacccatagacacacacacacacacacacacacacacacacacacacacacacacaactggtaactatggaaagtgatagaggtgactacggtaatcgtttcacagtgagtatgtatatccagtcatcatgttgtatgccttgaattaatataatttgtctttgtcaattatatctctataaagctgaggaaaagaatatgtcactagaaagtggcctcctccactttaaggtgttttgatttctttctgctctcctccactggagtcattctcatgcttcacgtggcaggatgataggcatatcgtctccaccccactgacctttccaagctcgagtccagcagggcagaaagcagctctgttcctgtggccatgccagagttctgacgaccagtctgatgtgaaggttctaggctacaatgcctgtctctgaacaagatccaatgccttgtgcatgggctgtgctgattcgatttgctaagcctgtgccatgtgctgcaccgtgggagccccatctcagccacgtggcctagagatagagatgaaaggaccccctaagttacatgacgcaggagccaatgtccattacacagcccttcctgaggggtggacctcatgcagagacatttactgctggcctcctccacagtgcctcggtgtgcagaatgggtttgtgatttagggaacaaatgatgccaggagtacatttactaaacagtgtgattgcttcgtttcttttcaaaaacacctcttaacaatgtcatcttgccattaaagaagggagcagttctctcttacttacagaccaaacgcttttcatggtgccccttaatgatgaagaccttcaggggcagccagaggatatgaaactggaaaaaagaatcatagattttcatagcagcaaggatgcattctcctggcttcactccaacagctttattatttatgctcataccttgttccacaaaggattttagacaatttacaatactgtctccaatataggaagccaaaacacatttcaaataaataatcatagcaaatacttaccctgtacttgccgtggactgggcattattctaagcactttatgcagacttatttaatctccacatccctacgaggtgggtgtggttatcagctctggtttacagatgctgaaactgaagcccagagcgtttaagaaatgctccaaggtcacacagctggcaagtggcagagtggggatttcaactagctcagaatctatgttcttaacctctcctgatactgacaaggagagaatgaaggtgggaaagtgaggtgaagccaggtgtgaggtggacgcacaaaacaggcgtcatgaaaccccgagccccgtgtccctcagctttctactaacaagatccaaagtgcccatctctcagaaacaatctgcccagtgaaaaccacagtcaatgtgaagccagaaaaggattgttaccatgggttctttatgcaatctttacttcatttaaaaatatttactgagatccttctctgcgctgggcactcactcttctaggactgagtgacggaagagactgagaccctgctctctcatggcttttaatctagagaggagaggacacaggtagacatgtgacctgccagttgaggacacattccatgagagatactgaagcaggtgagcgggggcgtgctgagttggagcggtcaacccagttctctgaggaggtgatgtttgacactggaataggaagggtgtgagcacaggcagagggcacagtgagctgagtttgggaccgaattgggagtctccacagtgtccagcagggctggagcaggccccctgaggggataaggtggtggttaaggtcagagagagaagcaggggccagttatgatttttttaatcaggacaaacatatctgggtctgacaggccttcttcggtctccttcctgcagcaaaaatcaggcccaagtatattttttactctgcctttcttacaaagacagatgttaaaagcactaatgagctcttaaatggtgaaaaaagaaaaagtctttcacctactacagcaaatatatacatagtggacagattttttaaccaaggagtgaagagtagaggaagggaggggaggggaagaaagtaaaagaaaagaaagcacaatttacattttccatttataccatcagctttttattaaccaggtgacatgaagacagagcccacactagagcggcttgtggagagagtagtaaaacctgacaggtaatttggtaaatcaagacagtcagcaaacatctgttgaggatgataatattcaaggggttgcattggttctgtgaaaacttagccacactgggcttggattaatttttcattgtctccagttaaatgaggattgcttacacagctgcctcagatagagccctgatcgcattccatcttttgccaaaatcacaaaatactgaaaaagaagaaattaaataaaataaaaaaccaacctcagatacattgaagtctcttctggtctccaagcccctggattctttctttcttcactatattttctttgatcactttcgatgctcttttattatcattgccgttaacgtgagaagtgaaaggagagatggagaataaacactgtccatattaggaaaaatatgaaaaagcatataacccaccgtgaatacaactggggttatcttctcgtcttaggctccttagcaccagagaggagtggaaaggtgaaagaaagaaaattcaagggctgaaaaatatctacacctccccacccccgcaccccccacacactcacactgtggtcacattgagaaaagatgcaagacgcattctgacacttaggtgaagcacagccactggggatgtgctttctcttgtcagtttcttttccaagtaattcacaacacgtgagtgcattcatgggcctttacaaatcttgttttgacatgcacgtcagagaaaaactgctctgatgaatgggtcttgggttagacttcattccagaatttgcttggttttgccttcttttttacgtgtcactcccctaatgggtgtttttactgatgccatgaacagaaactagattgcagaggcctaacgaaacacggcttttttttttcctttgactcagcatgaagttcagaggctagggttaggctgtggctggctcagtgtctccacaacgccaggggacccaggctccttttctctttctgctctgccatctatggcatgtggtggcttttctcatgctcacaggatgacagctatacccacaggcatcttattgtgttccaggtagagcaaatggaggaagatgtatggctaaggcaataagtaggtgaaggctggcgctgtttgcctctttggataagaaaaacaatagcttccttgcaagttcagccagtagacatctgcttatatctcatggctgaatgggacccgtagagccactcctagcaataaggaagtctggggaagttactattttcactttggcacgttaccaccctgaaaagatcagggctttgttagcaagaaagaagaaaaggatggatgtcagggaagcaaccaacagtggctggcccaggagacaggagggacatgctttctttgggcttttggatgtagtcatgtggaggtttaatggcttggagttgctctagctaccttgaaactataccagacaaggccaaaaaaataaaaagccagtgttctgaggatggtagaacagaaacttggaaactctctgtgtccttgatgacattgcggagtcaccgaattaaccaacccttattgcctgccttctacccttttttatttgctgaaaaggtacatctcactatcatttaatccagtctgagtttaggtttctagagtgttcagtcaaaatattgtaactgacacagtcttctacaaaggagaatgttttttaatgaatatttttattgtggtaaaatatacataacataaaattgaccattttaaccacatttaagcatacagttcagtgacatcaaatacaatgaaactgttgagcaaccatcaccaccatccacctccaaaatgttgttttatcttcaacggaagctccgtacccattaaacactaattccccactccccctccccgcagcccctggtaatggttctattttctgtctctatgaatttgactcatctaagcacctcgtgtaagaggaatcacacagtgtttgtcctttaaagggagtattttaataagggctttcatggttataggagacagaaaatctaactgaaatctgttgcagagtccacaagagaatccagttaggcacggttggatgcaggaactcagatctattccattaagaggtgccttcttgtcttgcagtaggtatattttctgtgctgactccacttagaggcagattttcctttcccccgtaccaggtcttcatcttcttagatataaatcaagtgaaaaagccatgactgctcctccactgttcacacaaaacattccagggtagagaattactggctgtgattgagtcacctgcttatccctgaaccaatcatatgtctctgctggcctctgattggccagacctgggtcacattcctactgtggcctctgctagtctctgattggccaggcctgtgtcacatgcccactgtggcctctgctaatctctggttagctaggcctgtgtcacacgcccattgtggcctctgctgatctctgattagccaggcctaggtcacatgcccactgtgccacactgctggcctctggttggccaggcctgggtcacaggcccactgtggtctctgctggtctctggtcaggcctgggtcacatgcgtactgtggcctctgctgatctcagattggccagacctgtgtcacatgcccagacctgggtcacatgactacttgtggcctctgctgatctctgattagtcagacctgggtcacataccaactgtggctggtgctggcctctgattggctgggcctgggtcgcatgaccactgtggcctctgctgacctctgattggctgggcctgcgtcacatggccactgtggcctctgctggcctctgattggccgggcctgggtcacatgcttacttgtggcgtctgctgattttggattggtcagacctgtgtcacatgcccagacctgggtcacatgacaagttgtggcctctgctgattgaccagacctgggtcacatgcccactgtggcctctgctggcctctgattggccagacctgtcacatgctcactgtggcctctgttggcctctaactggctgggcctgggtcacatgcccactgtggcctctgctggcctccgattggccaggcctgggtcacatgcccacttcttgaagccagtgacttggtcccactagaaacatagggtttaaaagtggtgaagataccagagaaatgcaaatcaaaaccacaatgagataccatctcacaccagttagaatggcgatcattaaaaagtcaggaaacaacaggtgctggagaggatgtggagaaatgggaacacttttacattgttggtgggactgtaaactagttcaaccattgtggaagacagtgtggcgattcctcaaggatctagaactagaaataccatttgacccagccatcccattactgggtatatacccaaaggattataaatcatgctgctataaagacacatgcacatatatgtttattgtggcactactcacaatagcaaagacttggaaccaacccaaatgtctatcaatgatagactggattaagaaaatgtggcacatatacaccatggaatactatgcagccataaaaaatgatgagttcatgtcctttgtagggacatggatgaagctggaaaccatcattctgagcaaactatcacaaggacagaaaaccaaacactgcatgttctcactcataggtgggaattgaacaatgagaacacttggacataggacggggaacatcacacaccggggcctgtcgtggggtggggggagtggggagggatagcattaggagatatacctaatgtaaatgatgagttaatgggtgcagcataccaacatggcacatgtatacatatgtaacaaacctgcatgttgtgcacatgtaccctagagcttaaagtataataattttttaaaaattttaaaaaagattaaaaaaaaaagaagccataacagtccaattcatgggacagaaagtagaatggtggatgccagaggctggaggagggaggattggggaattaatgttcaatggggacagagtttcagtttgggaggatgaaaaagttcttgaggcagatggtggtgatggttgcacaatttgaatggacttactgccactgaactgtacccttaaatggttaaatggtaaatctactatgcatattttactacaataaatttattttacttttttgcaatcaaaaaaaaaaaaaagagagtggtgaaaataggactccatttgcagagcccttagtaccaaagaggagtggagaggtttccccaaggaaaactggatgctgttattggaaaaacagaatacatgcttgatgggcagactgaacagatgtccactaccgagggcactttccacacagtccagaggagcctgccccatttggaacccacatgctctccacagctgggccctgggccagaacgccacttccttgctcctggcagatctgagctggacacttctatttccctgctccattgtgcattcttcctcactcacttttatatcgctcagagcatcctgtctatgcatggtgctaatcaatacttattagttacggctcattccaatgctaatatttggagcaccatttgtatgataatagctaatgtctctcaagcaccagctacatgccgggtactggctgaagcgcttcgctgctatcatttaatcttcacagcatccctaccatagagaaaccgttattatctcctgtttacagatgaggaaaccaaggctggagcaggtgaagccacttttgcacatgacttcttgttccgtcgtggcggcactgctgccccacctgaatttgactgatctgaagcccttgctcctaggcatgctgtcactctgtttctttggccaagttcaattgtccttcccagtggcccccttctggagggcaggcgagagacttcagttccggtaaattggcagtgtttccgtgtagactggattgttccataagatctagattgatgggcttgggtggttccaagtggaaaaaccatgctaccttggggcaccagggactgattccttggccctcataaagaaagggcctggtgctttgagtttcttcactgaatttggccagtgcaggcagagaatgcattctccagttgtccttgccactcctcattactttaggtccagcctcttcacatatttccattatctgactggtctctgaagacatttgtatttgcggccccttttctaggggtcagtaggtgcaaaacaggctatagcagagataacaggtaataaaataaaaaccatgcaagttcctctctcatctgtgcctcccgctatatgcactacaattcctcgctgtgtctttctttgtaatgtggacagtcctatgctttatctttctcggcagtaggattatggaataatacctttgaccagcatttacattgttacaggataatttttttaaacacagcaaagtcatcataccttataaatataaagagaggccggacatggtgagtcatgcctataatcccaacactttgggggggccaaggcaggcggatcacgaggtcaagagatcgagtccatcctggccaccatggtgaaaccccatctctactgaaaatacaaaaattagctggacatgatgatgtgcacctatagtcccagctactggggagactgaggcaggacaattgcttgaacccaggaggtggaggttgcagtgggccaagatggcgccattgcactccagcctgggcgacagagtgagactccgtctcaaaaagaaaaaaaaaagaaaaaaaaggacatgtgtcaaatattttacttaacgattcatgagtctataaaatgtaggatttcaaaggaaattttatcaatgaaaggcagagaaatatacagaccatgagataaatttataagtgggtgaaaagctgacttttatacatgggtgtggagggcaacaattgcccctccactgaacataatttatttgtatgtctattgacaagaattgtttccattgctatcatttatttaaaagttatggaattgtaaaataggtcaaggacgacgcactatacaaacatcatagaatcaaataacaggaaagatgtgttccaaacgtggcacagtttaccattcatgacactcagtagtcttttggtccacttcgaagcctgtcagagtatttcctacaatatgtggccactaagttatctgcagctgatatcttgcacctttcttgggcatcatgaatgtccctgtggtacaattcatggtcaggacctaaactgaaaagtgaatggcactttgggaggctgaagcgagtggctcacctgaggtcaggagttcgagaccagcctggccaacatggtgaaccctcctctccactaataatacaaaaattagctgggcttggtggtgcatgtctgtaatcccagctactcgggagggtgaggcaggagaatcacctgaaccagaagggggagtttgcagtgagctgagatcacgccactgcactccagcctgggtacagagcgagactctgaaaaagattagaaggggaggggaggggaggggaggggagtcagtggcctcccagtatctgtgagggtagagtcaaagccttctctcccgaagcccttaaaattgaaacagaaaagagcaaaccattgcaaaggggaggctgatcacctctgcagcttgaagttgagttatatatgtactcagttaattaaaacagcccgtgagtgggcagcttctctttgttcaatggttcctatcttttgagttaatcttccttggcatgagactttcccttggatcagtaactaggatagagtgactaatggcttgtaatcaatgataatagcgacatgcttgtacactttctatttgccagcctttgctggcacttggtatgcatctcttaatcgtcacatccatcctctgcaattatttctgtgttacacatgtgaaaattgagacaggttaagccatttgtccgtgatcgcacacctaaggggtggcagagttttgaaggcaggattctgactcccaggcccatgctttggttgtcgacattgttgttgttgttgttgacgatgatgatgatgttggaaaatctttttcattttgctggcagaaagctgttcagaaaacttcaaatgtgcttaaaattaatcactctcttagtttttgtttctcatggtacattttattgagatacaattcacatatttaaaattcacccttttaaagtgtaccatccaatggtttttagtgtatttacatacttctgcaaccatcaccactgtttaattcttaaacattttcatcacctcaaaaggcaaccccatatccactagcaggcatttgaccttcttccctccccacagcccccatcaaccactaatctgctctctgtctctatggacttgcctattctggacattttatgtacatggaatcataaaatatgtggtcttttgtgatggacctccttcacttagcatcatgttttcatggtttattcatatgatagcatgtatcagtagttcatttctttttatgtctggagaatattccattgtatgggtacaccacagggacctgtgctcttagtcccatttgttactgtctcttttcacggttgggagaaaaattggtacattaagagtggggatgtatcatcattttgttcccagaggttctggccatggccccccttgggataggagaacctgggagacaaaccttccccaagccccggtgacactcgcttttccaggctgctttggaaccaaagctgtgcttctgtgagatctctgactgtgacagtggctgagcgttctgtccccaagccttgaaaatgttcctttcggaaactaattggcccatcaagggattgaactgtgcctctcgccaccggtgcactctgcttttattaactcagctctccgctccagccttgccctcctgaagtggctattgatcttttaaaagttttatggtctcatcttggggtcacaaagagagcagtggcctttaactccccccagggcctgggatgagtctctcctcctcacttccagttaagcaggtacctgcccttttagtcctgcccttgatgccttattagaaggcttgaaataccaccttcttcgcggctcccctcaaatgaggactctgcagtgccttcaggtagccatggaagagtttcctaaacaccattcaccatgtttgccatatccgcaggtcattagtacatactattattatttagtttgtcttgtatattcaaattaactcatttttttcttcttaaatatatttcaagagaaaactttatgtcattaccgagtatgaaaaaactgtatcatttgccataaataaaagccaaccataaaaataaatgcagttaaattcttggccttgggcccgcttccctccacgccagtggagctgagtgagcctaaatggctcccttctttcctccaaatgccccaagagagctttcatcttaatcctcttttgtatgaacagaaggatgcatttgaaattagaatataggtcatgcctggaagcgaggcaggctgccggccccacctcccacactggtcgcagcctgtatgtcaacatggattctcaattcctccttcaccagccctccctcacctccgtctgagctccccgggtacccactcccagctttgctttttctgttctgcccaccaataacacccttttacttgagtatccatctgaattcgtttgtaccttcaaagtctacttgtcgccttattatccattatcagatgcaaatgactttccaagtagatcctttcctcctattaaacttacctgagaatggaaaattaaagaggtttttgttgttgttgttgttgttattgttgagacagagtcttgctctgtcacccagactggagtgcggtggcatgatctcggctcactgcaatctccgcctcctgggctcaagcgattctcttgcctcggactcccaagtagctgggatcacaggtacctgccaccgcaccctgctaatttttgtatttttagtagagatggggtttcgccatgttcgtcaggctggtcttgaactcctgacttcaagtgatctgcccgcctcttcctcccaaagtgctgggattagaggcgtgagccaccatgcccagccgaaagttttttttttagtaatagataaacacagttataatttgggagatcgtaaaaacatgactccaaatagaggtgactaggggagttttatttttaggggattatctatgccagccctgccttgcaacaattgaaccaacttcctgaagcctgttcagtggaatgctagcaccacacacaagcgaatgctgccaaggaaaacgaagctccattcgtggagtggccagtggcgccatcttatagcctgggggcgagcacctgaaggagcctccttagcccatgcacgggcctcagtgccacagttgatggggaaggagacacatgaagaaggcccttgctctgccctccctacatatctcactgcctcgtagcccagctttgttcacacgtccaacatactggcttgtatcaataaatcgtttctactctaatgtcttccattaagaatgtatcagttgtcatgtcaacatactactttaaaattgctgaaaaactgtcactttgtgaatatgtgttggggcaaggagaacatgaacatgcctcttgcattacccacccctcctcccaacaaacgtctggcccccagcttctcttctcaaatacatttggaagataatgcaatttatattctctttgttggagcatcccaatgcacattacatagtaggaaaggcactgataagtcctgcaggaaggaaacttcttgcttcccaaatatgttggatggcagaacctctccctgcaggggtgatctacaaaaggcccacagagcccacttagagaaatgatgcacgtgctctttgctgagtgcctacctctgtgctgggcaggagagagggaagcagaggagaagaatgattaactgagtccctgccttcaagctggagagatgggctgattgatactgacccagatgagccaggataaatgtcttgatccactttgctgtatgaatccagagagagataagagtgggctgtatgtggtcaagaaggctctttggagaagtttgaactgctctggacctggataggtgactaaaatttaagtaaagaggatgggaggttcaaagaaagggaacagttcagcaaagagactgtgacacacgtgttcgcaggcagtgaggagagatccagaaagacacaggttcaaacccaccatgtgtactgcctgggggacctgggtcagacaacgtaatctctccaagcctcagttcccccatctgtaaagtgggaataatactgtgaattgttggaaggattaaaaaacaagcaaataaaaataacccatgaaaatagcctggcagatagatcgagaccatcctggctaacacggtgaaaccccatctctactaaaaaaaaaatacaaaaaattagccggacgtggtggcgggcgcctgtagtcccagctactcgggaagctgaggcaggagaatggcatgaacctgggaggtggagcttgcagtgagcagagatcgcgccactgcattccagcctgggcgacagagccagactccatctcaaaaaatgaaataaaataaaataaaaataaaagcaaacaaacataacccatgaaatagcctggcaggtattaataaatcttacctcactgcagcctggttagagggagtccaaggtcacggtccaacgtgggaaattggatgaccaaagtagatatatttttttcactccatgcagtgattttaaaatcaacacattttatctaaaaacctgaatttctgaattctcttgcaaaggacagaggtgcattgcacatggcattgatcaggatggagaaggagtatgatttttcttatagcgacagtccccaccgctccctgagactaaacttacactgcccgctcgcgccagcttgctaccctcagtgatatgacttaccccaccccataggcatctgcattttcaccagggcttctcagctttggctctgttgacactttaggccagtaattcttcgtgatgggggctttcaggtgcctgctaggatatttagtggcattcatggcccttcccactagatgccaactgcacaccctcctctatcccaattgtgacaatgaaaaatgtcctgcggggggaaaaattgcccttggttgagaaccactagtttacaacaccaaacctcccaccctccagaagctgagggtcttattatgaagaaaagggagctagagctgcaggaagatcatgagggctctagagagtcagagggaagtttgcaccagatcagggagcagatataaagtcactgccactgattaatgcggatatgtgtgggctcagacggagtgctcagaccatatcaaaacgctgttggaatccccattccgggaatctttttttttttttaatttttccttttaaacactaacaaaagaaatgtttaatttgcaaatcacagtgagttccaaaacccagtcagtccttgaacaaatgtgcagcatatgtctgtggtgaggccccttgcagactcctgcttccaccggaggggaggggaaacaccctttattgcatctgcaaaggacacattccatctgtgggtttcgcagtatttcacagctcactttgactttcctttgaaaaggatggattctcatcacagcagttaccacaaatcctgggctccttgaatctgaacctctttccagtctttaaaatgcaaagttcgccatgataatgaccaaccaggatattagacacatttgagacccagctggagtgcgtttcagagccaggcagctgatgtcgatttgcctgacttctcatcttctctttttactgcattagctcgagggggctctggttcagggcgatctaagcagtgccaagtcataaaggaacaaagttatgaggaaatggagaaagcagatgttttattcagattccccgaagagatgtattgggggtgatgtatagcttatggttttatgccattgagaaaaggttgagaaaaattgagttgtgtactgagggggtgcaggctgccagactccagcttagaagagccaaacaagtggcttcagctccgcgaatccttcctacatttcctcagcaaatgccacacccaactctgtggcagacgaggggccagatatcagagggtcagagattccaacgacaggatcccaggcttcagtgactgcatggacttctcgaggagaccaccatagaagaggaagttgaaaatatttgcaacccatgtaacagacaaggaatagtatcgagaataagaaaaagataaatataacccaatggaaaataggcaagcactatgaacaggcaattcactggaaaggaaataaaaattgccattaaacctgggaaaagatattcataccactgggaattaaggaaatgcacatgaaaacaacaataagatttcatttcaggtcagtgtcaattcaagcatttcataatctcacaggtgaatggggatgcagggaaaacagactcttacacactctgtgtgggagtatacattgatatagatgctgcttttttttttttttttttgagacagggtctcactctgtcacccagtgatatggtttggctctgtgtccccacccaaatctcatcttgaattgtgctcccataattcccatgtgttgtgggagggacttggtgggagataactgaatcatgggggcagtttcccccatactgttctcatggtagtgaataagtctcacaagatctgatgggtttatcaggggtttctgctgttgcatcttcctcattttctcttgccaccgccatgtaaaaagtgccttttgactcccatcatgattccgaggcctccctagccatctggaactgtaagtccaattaaacctctttttcttcccagtctcaggtatgtctttatcagcagcatgaaaacagactgatatacccaggctggagtgcagtagcaaaaatcttagctcactgcagcctcaaactcctgggctcaagcgatcctcccacctcggcctcccaaagtgctgagattataagcatgagccatggtgcccagccctgtacagacactttggaaagcaatttggaattttccattcaattcataaatgtttacactttatggaacagcagttccatttgtagtggctgagaagagaactcagaaaaaggcatcaaggttttactcactgcagtattatttataagagaaaaacactgaaaacaacccaaaagtttatcaatagggacatggctaattaaatcaatatatatcattagtttccaaacatctttgatcttatactcctaattataagtaatttttgagcatgcaattcattaataggtatgactgtatcaggttaaatagatgcacttgtgtgccaacatcgtacactatacaacatatacataagtaagagttttttgaaaatgcaaaggcatgcaatgcactggggggaattatttcagtgatgagattctaagtctcccttatgcagaatattggtcaaaaaaaaaaaaaagctttacaaaaaagaattttgagctaagtactgaagaaaagttgctctgcaggtggaaaagagttctccgcctacagcaatcatctctagaaaggctcaccttaaatcagactggtgttgattggacctcactggtcctacctgatgctgggaacagggaagactccaggccctgatgctgggaacagggaagattgagagagctccgtcaacagctgggaatggctggaccctagaggacaggaggggaactactgctccttggttccctctctcaacgtgtgctgagtattcccgagcacccccagatggaggcccagtggccacacagcagccgccccccgccccaccccaaccacaagttacaccagcgagggctgaagaagctgtgcatgaagctggcctccttggcagaaagagcagcattcaaacgtcttcatccgtggtttcactcctgcagagaaaaagctgaatgaggagtcttccccagggtgtctctgctgaatggctctgtggggctcttggagctctgggagaaaatgagtaggagaagacctaaccgagcatttctgctcttcaagaggcaaaaagaaagctccagccagggtgctggctgtgcatttcaggtattttgtagcaggatgaagacagctcctgccaaggcatatttcttaatccaaactgaaagaggcagatgatccactgttgaggcaatcttcttgctggcattggagatatttctcacatggttttagttctcagtcaccatctctgccccagctggagaacatttcagagaaagtcccctgacctttgttggcctctacaggaaatagttccttggaagcaggagaccactggaattaatgagaaactttctggagttctatgcatgaaagttgcaatatcactggaggacccagagcacatgtcacctcctccaggaagccccccttcaattctgtcagctggtaaagttagtcgttctcatccttcttgaaccatagcactttgcacacactgtatttttgcccttagcatattctagtgtaagtactcgtttttgggtctctccctacctaaacactgacactgttagggtctggggttggtttcctaccttttgtgtatatcccactgtgctgcgaatggtctgtagggttaataattgctgtgtaacaggcatccccaacgtgcagtttttcactgccgtctttctgctgctcttcacatgtgcatgattttggtgagacccagcaggtgctcacactgatccatgtggcacccattgaggccacctcaactgggtccagaaagtccacatggccccatctgtgcagctggcgaatgggtgtcagctattgtcagctgggtgctccactgggcgagggccggggggtctttgctgtcctccacatggctgtccccacaggcagcttccactcctcccaccatggtggcctcggggcagttagaagctggctttccccagagcacacagcagaaggtgccacgacacctcaagacttaggtccccatctggtgcagcatcatgtctgccaattgtctttggaaaaccctttcacagggccagcctagattccagggtaacagttaggaaaggcttgagtccaggaggcatgcttcactgggggctacaatgaatgcatcagcaactgatggaccgtcttcacacttgcagccgtgaaacgtctctacacgtacaggccgtggctacttttttgaacactatgttcttgatgccaaatcaccacacacgtgaaaaaatgtatatttggggatattgttattgagcctgtaatctaatgccatctctggatagtggtttggtgataggagatgttaaatgcccaaaggctaagacccaaccattcttgcaggagtgtgtcctggagtgacaggagatgttaaatgcccaaaggctatgacccagccattcttgcaggagtgtgtcctggagtgacaggagatgttaaatgcccaaaggctaagacccaaccattcttgcaggagtgtgttctgcagtgacagatgttaaatgcccaaaggctatgacccaactgttcttgcaggactgtgtcctgcaggagaggtgcacaaaggcactgagacatctatcatggcattggggaatggtcagataagttctgggacttcccttaactgaaatattgtatagccatttaaaatgagtcacatgtgtacccaatgatctggaacattctctaagaaataccgcaaagtcaaagcagcaagcagcgtgtgcggtgtgctactatttgaggttaaaaagaaaatgaaagggaggccacggcatggaagaaccttgaggacattatgctccatgaaatcggcccgtcgctgaaggatgaatactgtagaattccacttagcagagataattagagtggtcaagttcatagagacggaaaatacaagggcgggtgccaggggctgggatgagggggaagtggggagttcgtgtgtaatggggacagaggtttagttttacaagatgaaagttgttctggagatggatggtggtgacggctgcacaacaacatgaatgtgcttcatgctgaggactgtacccctaaaaacggtgcagatcgcaaattttatgttatgtgcaccttaccacaatgcaaaagaacaaataaaacgggaatatatgtatcaatgcatagcggatctctgggaagctctacagtgggaggggatttgaggaattaagggtcagggatgggagaaaacctaaatttttgcataatttttgttatgtttgaaagtctgccactgcatgcatgggtcccatttaaaatgtctattttaagtgtcaaaaaagttaaacaatgaccatagccaaacatactttatcattatatattattataaatacataatatatgcttgtatgtgacttatagtataggcatctattaatatattgtgtttttataaatatataatatatattataaagatctatttagccgtatatatttagcaatctgtgacctactttgcaagactagaattctcctctgttatggttagaaggattattaactacagggggaaatgggatttgggcttgtatttttccactattacataagcaaataaaactgccaagctgctgcctttatttaaatattccttaatgatgtgtgagacttttcctctgtatcttccttgttttgttctctctctctctgtctctcaaaacaactgtgccttttgtggaaagaaaattgtggcaaatattaaacaggaagctaagccagcacgggaaggaagatgtttgtcttacataaagccgatttaaactactctcatccttgcctcatccctgaagccacgtctggctcatgctgtggggagcactgtgctcagactcagcaaaagccctccctgctgcctgggacaattcctgcctccctgagagccttcctgggcagcacctgctctcctctggcggtgcagaggtcacaggacatgggaaaaaacagagccaaggacctggaaaccctgcttttcagtgactgctcttccgttttcacttagagccatattcacagatacgttgggccataaaggcggaaggagaatggaaagggaattgcccagtgtggggatgcatcatgtacagctccattcagggaatgcgttcttgtggtgctgtttccagtgggtgttggcagcagtggatagcactggccaaataggccttattgcccaaagtattacataagatggtatcttagttcatccaggctgttataatgaagtgccatggcctgggtggcttatgaagagcaggaatggagctcacagttctgcaggctgggaagttcaagagcaaagtgccaggacattctgtatccggtgagggctcccttcctcctagacagccatcctctctctcgaatctcatctggccagaggggcaagggagctctctgggacttcactggtaatgtcactaagccaagtcatggaaggccccaccctcatgacctaatcacctcgctaaaacctcacctcctcacacaatcacctcgggggcttagatttcagcatctggatttatccgggggacagtgaaggcacaaacattcagaccgtagcagatgactttatgtggatcatgtacacaatggcattaagccaatcaaatcacaaagtgagaatgtgattgcatctattgcactctcagattctcccaatgagtcctgttggggatcagccttcaagctcaggactttctcctgcaggaagagctaatgaggcactcactttattgattttatattggcaagggaatctcactttcaaagtgatgcattgatatacagttctctgttaaataaatgtgtgtaagtttgaggaaaaaaagtgagtcgatttacagagaaaacacaaagtaagtaacagaacaatagttacctcgaatgaggaaaacatgatgcaggcgatatgcattccaaatatgaagtttggagaccagagcttaaggataatagtaataaaaataacagtggcagcatccaactcttaaatagcactcaatccgggtcagactctgtgcaaagcatattgaattcttgtaacaccctaggacagaggcactttggtgtaccctcattttaagatgaggaaatgattcaaatttccagagtacagaagacattggtcacaagatgactttcatgtctctttctggctgggtgcagtggctcacacctgtcatctcagcactttaggaagccaaggcaggtggatcacttaagctcaggggttcgagataagcctgggcaatatggtgaaaccccatctctacaaaaaatttttaaaagttaggtgtggtggcatgtgcctgtaatctcagctactcaggaggctgaggcagatggattgcttgagccagggaggttgaggcttcagtgagccaagatcacaccactacactccagcctgggtgacagcaagaagctgactcaaaaacaaaatttttaattaaaaaaaatctgtttccaatatgtgtgtgtgttcattcattcatccgttcttttgtacgtagttggagtcttttagttgggaatcgccatgggttgcttgaatccaagccttgcctcagtgctatggactgagtgtttgtgtcccccccactcacaaaattcatatattaaaatgtaactctcaatgtggtggtattagggagtggggactatgaagccttcagggatgcgattcacgccttaataaaagaggccacagagagctccctctttccttccaccaagtgaggacacagcatctatgaaccaggagaaggaccctcgtcagacaccaaaactgacttcaccctgggcttcggcctgcagaactgtgagcagtatgtttctgtggttgataagtcacccagtctgtgagattttattatagcagcccaccagccaagatacctggtgtaagaagagaaagtcagggactgtgtttgcaaactcatgacaccgtgcaatgccgctgctgattttatgagacagtctatggaagggctgcagactggagctgccttgggagcatttgggactggaggacagtcagcgagcctgaaagcagtatgaccaacgaccacagcccagattgcagggtgtgtcaggctccagggtgagaaccaggttgtcatgtcggttccctacatatggagagggatccacagactcccggctggaaaggagtcatgcacagctctcccgatgcaggacacgaaggcaaggcgcacaaggaacaagcgttagtgcagaacgtgaggcccctccaccagccaccccacagcaagctatccagcatgcagccctgcaagggcctccccttgccctcaggaccaagatcagacttttctgcagcctgcatccctccgcccagacctccctccatgctcacctggctcccaccgtccctctcaccccgcctgcctccctcccaacccacactgcccgtccgcccactgtgcactggcctctgttcatcttccaggttttagtataaaaatccacagcctgcacctccccctccccacagccccccacccccttataagttaccttctctcgatagcgtcgtgacgcatcgtatagtagtagatttccctgattctttattatctattttagcatgaaaagctgtcataaaacatgcagaaataccagaatgatctcccagcacagaggcagtagaagttttgctcagcattcactttccagggcctgtagcacctatttgatacctgaaagaggctggattggaataagcctggatttgaattccttttttttcccctcttatcagcagtgcagccttgggcaaggtacttatgctttctatgcctcagttttctcacctgtaaagtgggaataaagcgtacttacctcccggggttattatgagtactaaatggtcactgcacgtgcagtgcttagaatcactcttattcatcatcatcgttgttgttacgtttgaagcaacaaagtttcatgaatcattactgtgccttcctcaagaggaagaaaaataaacagtggaggttgttcattgaatgaaccattataacccaaaaagaaattacttctctgggatatggaggctttgggagattgacgaaggcctacccatgggctctcctgggctgggctagggccaggacactctggccacaggctgaagcacacgtgtacccgttggagggcaatgtggaagtcagagttagtgcattcacaagggatctgggacaaggaggcctgcttgagactcgggatgacaggatccagatccaagagcttactactgcctgttatgatgtcctcacagcagacggcagagcttaacagagatgtatactcgaaagttagcaactgggtcagaaaataaaccactcaggaaaacaggatgagaaacatgtaattcagaaactgtgcaggtggagaaaaagaaaaggttgcaaattctcaatgcttagaaaatgacagttggcaaactgtggcgtaacgtagctgcacagtcagagccaaggctgtgtgagtcaaggtccaggttcccaacgagggactccgggtctcccccactgccacccgattcctctggccagagcaagaacagcacctcagtcttggcaactcccttttagactgttattctcctgccagattaaggagaatggtgttgagtcacatcacataaggagacgcaggaggttcaggctgtccaggggcaaggggtgtagacatgctggactggaagctgcatgcaggcaggctgaggctggctcaggcagacatatgttcttcagccttgtttttgtttttaaagacagggcctcgctctgtcaccaggctggagtacagtggcaccatcacagctcattgcagccctgaattcctgggctcaagccatcctcccatctcagcctcctgaggaactgggaccacaggtatgcactgccacacccagctagtttttataattttatgatttgtagagaaggggcctcactatgttgcccaggctgctctcagactcctagcctcaagtgatcctcctgcctcagcctcccaaagtcctgggattatagtcatgagccactgcagccacgctttattgtttctaatataacacttttattactataaatgcatactacacagtttgcccatttaaaatgtacaattcaatggtttttagtgtatctgcagaattgcagaactatcaccacaatcaattttagaacattctcttcatcccaaaaagaaatcctatacccattcatttgcagtcacacccctccccgcctcccccagcccccggcaacaactcatctgctttctgtctctgtggatttgcctgttctgggcgtttcgtgtcagtggaatcatagtgtgtagccttttgttactggtgtcttccactcagcgtcatggtctgaggggtcgtccatgcctccttcctttgtatggcggagtaacatcccagcgtgtggatagaccacattttgttcaaccgtttgtcagctgatggacttttgggtttctcctcctgggcttttatgaataaatgctgctagaaacatccttgtagaggtttttatgcagagatatgtttccatatgatatgtacacttaggagtagaatttctggatcatatgggagctctattttcaactctttaaagaactgattggctgtcttccaaagtggctgcaccattttacattcccaccagcctgccccatttgtctctttacatcttttattgaagtatttgccaagttaaaaaaactgacagccaggcacggtggctcatgcctgtaatcccagcactttgggaggccgaggcaggtggatcacttgaggtcagaagttcaagaccagcctggccaatgtgatgaaaccccatctctactaaaaatacaaaaattagccaggcatggtggcacatgtctgtagtcccagctactcaggaggctgaggcaggagaatcgcttgaacccgagaggcggatgttgcagtgagctgagattgtgtcactgcactccaacctgggcgacagagtgagactcaaaaaaaaaaaaagaaaaaaaaaaaaaaacagacacagccgagaggctttacataaatactcagattcttggccttactggaaaagctgaaggtccctgtagctagcagctgcccctttaactgggccaggcaggctccaggtcatcatcctaccctgacacggaggctgcgcctaaggtcatcacacagcaccatgctgctgctgtttagtttttacacgcctgtatcgcttcacttatttttatctcctactcactggcactcttggacatttgagaatgggactcctaaccccaggggaacagaagctcccgtgtttgcatcttccccaatgaccacacactcctcccagtttctgaatggcaagttctcaggaatgtgtgttcagtggatggacaaatgatggaaggaccagatgagtgatgcaatggatgaatgagtgaagttcattatcctccaaagctgacttgggactaacagcaggaagttatccccatagatttccactccagataaagaacgacttcctggcagccaggctgtgacaatggaattggcagttttaagagatgctaagctccctgccctggctggaaacttgctgaggctgagggatggcctgtcagaacagccacggaggggacacgggcttaggggatggggagagaagatgggtgacctccagggattcccccatagcgaggacccccaggctcccagattcccttttcttatgggccatttaactgcagggtcctggccctgtcattgtctccattctttgagaatcaggaggcctgggcccttctcagggtgagccgctgcctttgggatcctagggccacgtttccctctgtagccagcctggctctgcagtggggttccctgaagccacagccacagtcatccaaattctcatggttcttctctctgctctctctttctttctctctctcttcccttctctcaccttccttctctcttttcttcctttcttttctctctgtcttctctttctttcctttctcatcttccttctctcttacctctctttcttctctctccatcttcctttcctctctctctccaccttcttccctctctcctctctccttccctctctttctctctcttcccctctctcaccttccttctttcttttctttctttcttctctctctcttctctttctgtcctttcttatcttctctcttacctctctctctttcttctgtctccattttccttttccctctctctctcctccctcttccctctctcctctctccttccctctctttctctctctctctcctcaaattaaagtaagaaacagatctctccctcagtggagctggagctggtcctttccactctccaggcaagcccatgacgagtgtgacctcactcccactctgcagattgcgatgtggagacactcacacagccaatccatggagctcaggctttgacctggatatgcctgattcctgcatgggaattggagttgagttggtctgggttccggtcctgctccagcagctctgtgcactggggcaggtcctgattctgcaggaggccggtgcctactttacggcattgttttgaggactgtgtgagctgaggcacattcgacacccagctcagggcatctgcaccctaattacgggtccccatctctttctccactcattccaccaggttccaatcccttgaacaattctgaagatgagagacatagtacaggggccaatgcagactctttccctctcctgtacagcttcaaacctccagtgcattttagtttccatctctctctcatctcgtcacagcctaaggcttcctgcttgcctaccaaatcatggaaagaatgctggcaggtgtggtaggagcctgagctccaacctctggctctcctgagttagagagcaatggggctccttctgtaccccaacataagacctgctctcaatgccggcccacccaccgcccctcccccaccacccactgaggaaacaagagggaacaaagaaatcagccaagggagagcccccacctccaccgcaggcgtccctgaactctgtggagtctgagaatcatttgctcctgggtcagcactgagtccttcgccctgcacagcttgacacagactctgggcagtgtccccaccccaggggggcgccacataaaaggggatgtgcccgttatgagtccgtgacagctgacatctcgggagcatcactcagtgctgagccacgtgctatgggctgcatattcaccacagagagccactgtaactctccccccatcccctgccccccaaccccacacacactggaatgaaagctccacgggacatggggtctttgttttgtggctgctgtgccccccattttttaagaactgccttgcatattgcaggtgcttggtgggtgtttcttgaaagaatgcacattgcacggtgcaaatggaggtagccagggacctcccacccctgcacctggtgaacccggagccaccctccctcccaagcaaggctcggaattggagaaagtgaaagaacagctgtcacggttgctttgtaacacttcagcacagggaggcttctgggactaaaactatttttcaacaaggatgatgttttccatttccagcgtgaacacagtgttattcaattccccacagccctcagtccagggatcccacctaaacagtttactctaagacgaaattgcagcctttaaactgatttctcagaggatgccattcatttcagcatcttcactctccatgcaggcagcttccaagactcctaagaatggctttttctaaattggaggtcccctcggattgcttcagtagaacagctacggcctcagtgcctgtgatttgaaaaatgcccctagctgtccgtcccggctgctgaagggaacgagcttcggtggtgactgcatccctcacatccgaggagggtgagatgctcgccggccagcattcccttcttaggatgggtcaccgccatcggtgaagctggaaggaaacactgctctccggagaacagtgcagggaagtcttgttttgatcctccatttatttttctatccactgcattttttctggtatctgactctcttactgtctctggagatggctcacagaggagacatttgttcacagcgtctgcctgcatttcaagccagaccaccttggtgtcataatacaaggaactatttagagatgaaagagtttgacatgattctcaggtaacctgaggaaggtaggattttgtcatctgaagcgacttctctccaggccctggcttcccaaagtgttggtgccaaatactactagagtccagggtgttaaggcacagcagggagatcatctggccatcttaccatacccgctgttcactaaggggggaagctgggcccagggaggggcaagggtaattgccaagccaggtgtatcagttgcaaaacaacagaactaaatctggctaacctaagccaaagggacccatgcggtgaagaggaggaggccacgggattgtaagaggcagcaggaggcacgtgggggtgagcctgacccagtgagaccagaggccaggcagcagctgcctttgccagggcctcaggcagaggggtcagccagcatcacccgtggcactgacaaatgcagcccttttctcttttctttcttctttgcaacacttaatggcaaggacctagaagggaaatccacctggtgacgtcacactgaccgtacagaatgggaaagaggaatcagccgcttcagctttaaaacagaggagcatcccccagaacgtagcctcccatcacagctccatacagtaggagaagggcaatttcccaggaaaaaactgccatgcccaccatgccgttaagtcaggtggatgcggggaagctctgcagtgagaacatccactctatcagggccagccgcccacttccccattcctgatcccatgttctgtccatcacactgggctgccccttttgcaggtcctggtacagaggcagcagggcttcactgatcccgttttctgtccatcacactgggctgcccctttcgcaggtcctggtacagaggtggcacggcttgactgatcccgtgttctctccatcacactgggctgcccctttcgcaggtcctggtacagaggcggcagggcttcactgatcccatgttctgtccatcacactgggctgcccctttcgcaggtcctggtacagaggcggcagggcttgactgatcctgtgttctctccatcacactgggctgcccctttcgcaggtcctggtacagagtgggcagggcttgactgatcccgtgttttctccatcacagtgggctgcccctttcgcaggtcttggtacagaggtggcagggcttcactgatcccatgttctctccgtcacactgggctgccccttttgcaggtcctggtacagaggcggcagggcttcactgatccctgttctgtccatcgcactgggctgccccttttgcaggtcctggtacagaggcaccagggcttcactgatcccatgtcctctccatcacactgggctgcccctttcgcaggtcctggtacagaggcagcagggcttcactgatccctgttctgtccatcacactgggctgcccctttcgcaggtcctggtacagaggtggcagggcttaaagaacctgccttcccgtcaccacgcacagcagccccagcagactgaaaccccaccacgcagggctcttcccactgaagactgtttgttaatattaattttgtcaagtgctttatcatctccatgggacaagcaacttgaatgactgaagaccactgtcttccggggaggtcattcttttcagctcatctgttttctgttaaggatgctttcaaggcgttccataatggcttttccaaaactgcggatgctaagtagctcggcctttcaacagtgcccccctagaagtgagtttccttctctccaccttttcctcaatttacttttgcttctccaaatcagcttaaccagttggctatatacccttctgcaatgttgccagtaagtttataggagcgttggttaatgcaaatagccatgctgtccccaaagaaaattaagctggggacatgcacagtgggtcacgtctgtaatcccagcactttgggaggctgaggtgggtggatcacttgaggtcaggagtttgagaccagcctggccaacatggtgaaaccccatctctactaaaaaaaaaaattaaccgggtatggtggcacacaccagtgatcccagcgacttgggagcctgaggtaggagaatcacttgaacctgggaggtggaggttgcagtgagctgagatagtgccactgtactccagcctgcagaaagagagagcgagagagaggaaggaaggaaggaaggaaagaaggaaggaaggaaggaaggaaggaaggaaggatggatggattaagctggaagctagaacaaaggaacatagattcattatcttattattaactaatatagatgtgttcatcccctcctatacttccaggtagtattctaaaccttggggatacaacagtggccaacacagtttctcatctagaggtgcttacatcttaccagagaagatagaaaatgaacaaaggaaaaccaaacaagatttccaatggtgttaagggcaacagcgacagcctagcaatgtgatagtttctggagctgcaggccttaaggtgtctgcctgaggcgggtgtttaagtgtttgagggtgttgacttctatagggagcaaacatgcagagagtagctggagggagagcaaatgcagatgtggtgtgtctgtggagcaggcagaggtcccagggtagctggagcgtagtgatcaaggagggaaagcaaaggctgagatcagagggagaggatgcatccaagtaaaagatttcaggggctccccagagcacgtcctcctaacgtgacagcttctcaaagactgtttcttttttaaagataaaatgttgacctggcagttattaaaactatgtttttaaaactgttggaggaggctgggcacggtggttcatgcctgtaatcccagtagtttgggaggccaaggcaggcagatggtttgaggccaggagttagagaccagcctggccaacatggcggaaccccaactctactaaaaaataataacaataataatgatacaaaaaatagctggatgtggtggcacacacctgtaatcccagctacttggtaggctgaggcaggagaatcgcttgaacctgggaggcggagattgcagtgagccaagatcaggcccctgcactccagccagagcaacagagtgagacatggtctcaaagaaaaaaaaagtcagaggaatgagtgtggaagacagctccccagccccccttccaccacccagcaatgatgcaggatcccaccccagccttgctccccgatgtgagaatgtgtctgggcctctgcacattgcacccccagaccagtgatcttctttcagttcctcaaagtctcttcactcccaatggcccctcttcctaaaatacccctgcctgttcctcctggctttctctcacttattgttcagctttcagctcaaaggccctgtctcggggaaccctctaaccccctgggtttagttgccccaattttagggattgtgccaggctttcttcatatcatagccctcgccacattttactgtaatgctgggaccatgcgctgctgagctggaggtggggctggggtggggctggggtggggtttggggtggggtttgggtgggagtgtgttccacagtggcttgtctagtttcaatccatttcctgcccttccttcgttgagtgatccctgcaaactacattttccggaccccttgccaactggattttggctacatgtagccagcaggaggccctggtgggcagttgacagtgggaaggaaaaaagaagcctgggtgttttttgccctctgcttctgatggtgtcacaggcagtggctcccgttcctctgcggctgcagctcccacagggaaactctcagtgtagacccagctcttatccagtgaattcacccctggggtcatcacccccagcgtttgtcccttgaccctgaaggtggaagcatcttcctctcgttgataatctcaggttacctaacttgtctgctccttctacacctttataaccagaattaaatctctgctgcagaactgcctaggatgggcttggttttcctgcctgatgagcaaagaataagaagtacccagtgaccgagcccttccaggtactgggggacaggaccttcctgtggcactgggaaacctggggcagcgatgatggccagggcacctgggcctctgacatgttgctccggaggagacggttgccttgctgctgctactttcatacagaaataggatctccatatttgaaactattcccttaaaaaatcctttttaactgtggctgcacatagggataccccaggaagctttaccaaaatgaaaagtgatacccatgctcgccatagataagctgaatctgcaaaggagaaagagaaaaggaaggttttttaaaaagcaagagtgttcttctgaagttcaccaagtgattctatcatgcagccaaggttgaggaccttgaacaagaggacagagattgttagtgtaaattattccagaatgagtataatacagaccctgatatggtttggctgtgtcatcacccaaatctcatcttgaattctagttcccataatacccacgtgtcataggaaggacctggtgggaggtaattgaatcatgggagccgttacccccatgctgctgttctcgtgacagggagtgagttctcacaagacctgatggttttttgttttttgttttttgtttttgtgtttttttgagacagagtctggctgtcacccaggctggagtgcagtggcgcgatctcggctcactgcaagctccgcctcccgggttcacgccattctcctgcctcagcctcctgagtagctgggactacagacgcccgccactgcgcccggctaattttttgtatttttagtagagacgaggtttcaccgtgttagccaggatggtctagatctcctgaccttgtgatctgcccacctcggcctcccaaagtgctggtattacaggtgtgagccaccgcaccgggccaagacctgatggttttataaggggcttttccccttttttgctcagcacttctccttgctgctgccatgtgaaggacatgtttacttctccttccaccatgattgtaagtttcctgaggcctccccagccatgctgaactgtgagcaattaagcctctttcctttataaattacccagtcttgggtatgtctttattaatacagactcatacccctaatacaaagggaagtgctgcagcgagaattggatggctttctcaagtggagtggacccatgcctgcttgggaaacacctttgcagctgggcaccacagggggcatggagggacaagagcagagcagccccaagacttgctgccttccaatgcactctggtcagtctcctcgcgtgtctttagccaaatggatggggccctgatcacaggtgtgagggaactccctctggcagtctggggcccaccatggaccacaatgatgcgcttctgcacctctcccactgtgcctggcacaaatctggtgcctggtgaatgcttgatggatggacaaatggatgaatgagttggatgctgagtagagaaagccttctgttttaaatgtaaaaactatatccccccagggccttctagtcttagcagttagtgctaccacagagaccctcaacccatcaattacgaaaattaactgtaaattatccttttgcatagttaattcagcctcttcattctgtgtttagtagcgctcagcaggcataaaattcaatagcaagctttggagcaaatccagtttctgtcgtctgtgatattttgaaaatgcaaagttttaggagtggaccttggagcgtgtctttcctggaaggtctccaatgagctctgcatctcgcttctctcttggaatgggctcaacccttctggaaaggctgatagcttcaaaggatgcgtctgtcctcctctccagctatgcagagaggcctactcccttcttgagtaaaaatgaataccaacctgacttgtggaaggaaagaaaagtgtgactgtcggggcactcggctcctggcgcaatcacccagtcattcttcactccgcaaacatttgctgtgcactttctacgagtcagtgctgtgatgtatcacgaggcgatcacggggagtagaacggtgtccttgctgccatgggactcatgacagagaaaggaggaggaagatggtgaacacgaaatgcatagaaatgcatcctgcaccgaggctgtatacataaagtggccaagtgagtcccgtgtaaccagggtggatgtcatgaataagtgagccatggatggcaggggtgaatgccaagatgggcgagccctggggaaaagcacaggcaggggcactgaggtggagggcgcttggcgggttggagtcgtcctaaggtggaaggacctggtaagagggtagggaaggggatcagtgcagtggcggtggagggacagcttattattaggcttgtgagaaagtaattgccttttaatggaaataacttttgtgccaacctagtatcaggatttgggaggtaaaagcattgcagatcctgaggccaggctcagaatcgtcatttgataagcattttgtggctgagtatggtgaccgattgcttgctctgggagcagagtttcctgatattcacagttttcttttctgtgatcccagcactttgggaggctaaggcaggaggattgctcgaggccaggaaacaagcctgagcaatgtaccgagaccctctctctataaaaaatttaaaattaagaaaattagttgggcatggtggtcagtacctgtagcctaagctactcaggaggtaggaggatcacttgagcccaggaagtcgaggctgcaatgagccacgatggcaccagtgtgctgcagcccggacagagcaagaccgtgtctctaaaataagaaaggtttttaaaccacaatccacttcagcttaccaacgcatgagtgtatttccaatctacaagctccagcgtgcaaaacaatctgtgcagccctatttcttcaacaggcattgcacttggtgtctccccacattctatctggtggcagaaaacttcatcttgctcattccaggtctgataaggaatttccagttgaaacttggttgattcaacctctcgagctctgcctgatctgcccaagattgacccaggagggcaagctcgtcatggcactgccctgtgggggaaatgttaggtcttcaggtattcaccctcttgtggcttccttcacaggggtgtacgattccatcgtttagccctgaaattcaccaaggcatccatgtttctacctggtctccaagtacatggtctgtgccatcctcactgctccacccattcttcctgcaagaaactgaggccaggttcagacttgcctccgttctcacctcagctaacttcagtgacccatcctggaattaggccaatgtcccactgctttccataccattcagggctttaacgtcctggggattagggtggcttcctctgagttcctctctgcctgggcatcccaagctaatcctgatctacctctgccacatgctgccagcaaagtgcagaggagactttatgatcacttgggaatgagcaagagaactctagcaatcagaaccttcatctattgctgcttgacaaggtggcccaaggttactggctccaaacaaatatttgatatttctcactataagttggaattttctgggcagttcctctgttggagctgtatccatctgaggcagtcacttggggctgggttggccaggcttctcccctctccacaggattctgcatctaggggtcttcatgacacattggcttcagagcagtgcacggagagagtgaaaaaagcagctagaaggctcccaaaggccctggaaattttgcattatcagttctgcagccttgcaggggctgaaatgaatcacagggccaggctagattcaggcgggtgaggagacagatgctcctcttgatggacagcacaacagagtccccttgcagaggggtgtgcatactggggtgggtagcatctgagaccatttaataacttaccacagggtctaaccaagagaacagatgctgcttttagcagttacaacagagggaatgagagcacaggaaactggctcaaagtgaggactgagctcagccctcgaaaggacctgcacccacttgtgcctctcccctccagcaggccctccatgcctgtgtttagtctggccaggagtggatgctgggcggagggcttggtgagtattcttcccgaatattttcttcacttagagccagtctacagattactttatatatttacttttttactcaggagccctaaatgttacatctcttttcttccactgtgctggcttttctgagggcaacagcagcctcctcactaccttccaggactcagggtgcggtaaagaagctcagttagtcaccagtaaggaaaactgcctggttaatatttcatagcatcatataaaactgtgcaaactagagtgtccacaagcagcaggaggcaaattggaggccctgagaaacaaagctagaaacaaagacttctatgtccttaaggaaaggactctgattgtggtcaggacagggaagaaccccacttgtggttgggccagagtggaagtagggtcatattagctgctatggaatggggaagtgtagagagaagagagtgtcgagaaagaatgttgaaggtgcaggttttccctccgtgtctctctccctggtggaatttgcctctcccatccaaagcctttccagcaaggagcttgtatgagtcagggttccccagagacatagaaccaatggggtggatgagtccatagatatagatttaggtagacagatttatggatacgtgggatggatggatagatatgataggttgattgatgaatagattggatggatggattgaaggatagatagaatggatagagtgattaattgattggtagatagatgggatgagtggatggatggatagatggacgtgtggatagaaagatggatggatagatagatggataatagagggatagatagatggctagatagataaataatggatggaagatagatagatagatagatagatagatagatagatagatagataatagatggatagatagatgatacaaatggatagatcatagagggatagacagatggctagatagataaataatggatggaagatagatagatagataatagatggatagatagatgatacaaatggatagatagatcatagagggatagatggctagatagataaaaaatggatggaagatagataatagatggatagacagatgaaacaaatggatagatagatcatagaggggtagatagataatagatggctagatagataaataatagatggaagatagataatggatggagggatagataataaatggatggatggatagatagataatgaatagatagtagatagatgatggatggatggatggatggataatagatggatagatagacagacagatggctagataaatgatggatagatggatgatagatgatggatggatggatggttgaatggatggatggatgcatggatgcatagataataaatagatggatagataaataatagatgggtagatggatggacggatggatagataaatggacacatagataatagatgaatggatggatggatggatggatggatggatggataatacatagatgacagattatggataggtagatggatggatgaatagacagataaatgatagatagatagatagatagatacatagatacatagatacatagataatgaggagttggctcatgcaattatagaggctggcaagtcccgaaaactgcagttgtcaagccgaagacccaggagagccagcaaagtacttccattctgaaggtatgaggaccaggagagacaatatttcattctgagtccaaaggcagggaaaaaactgatgtcccaggcaatcagacaggaggaattccctcttactctggggagagtcagcccttttgttctgttcaggttttcagttgattggatgacattcacccacattgtggggggccaagggcttcactcagctgaggtgttaatttctcccagaaacaccctcacagatacacccagaataatgtttgcccaaatgtctgggcatcccatggctctgtcaaggtaatgcataaaattaaccctcacagagaccagatggggcaggaggacaggggtgcattacggatctggtgtgatagccttcgacaccctcagtggcatcacgtcaaaccacctcctgaggcatcggctgaggagaaggaagtgggagaggacagcttcatgcatgaggcaccactgggttttccctcattcccctttttattgcttcaggtgtctcataaggtcctgggcagcaaggttggtttcccacgctggagaatttatactcattggagagcgagatgtgaaagggtcattgtcaggttccttgatcttttcaggtcatttgtggggtctttagagcctccatgcaccctagttccttcttctctgagaatcactttgaaagattcatcattttttggcagaaccctctgcccagcatgttaattggatctgaagggctggactcagtgcccgctttgggctggcctagggcccaccattgcagcactgggaagcccactgtgatgtctgtggagcaccaggagcctgcttgggctgggggctatctgaagccaagacacccaaacctctgaggccttctcagcaactgcacttcctgaagtgtgacctaatttagctcaagcttcagctgctggagaatgactacatgacacacttctggtatgtgaggcccatgcaggccacctgctgtgcttcaggaagttgcatcctgcatggaaaataaaaaccatcaggctctccagagcacaacagacccctcccccgtgtggccaggggttccctggagccaccgcctggggctttcacataggaggggccgggaagaactggaagctcccatagtctctctcctctcttaagggcttcgtttcatccatagttttattccccctgcctgtatttccctcgctgcccagcctcctttcttaattggattcgcttcaacatttatgcagtgggagatttcccatttttaaaaaatccaaacttctgttttattcttggaaaacagaccttctggcaacaaggggcccagacttccacctggctgtggtgcagctgcccctaaatgtggcagaggggcccctagtgtgtcacagcctctgtcaaggcctgtgtgtgacagtgcaatcacttgctttctacctgcctggcttccaaaggcgcttgagtttgtggactctgccacagatggacacacctctctgcctctcttgccctcatgccaagcgacttatcaaaggggcaggtctcggttccaggggcctctcttgtatattgacaagcttttcagagagtagatcttttctagaatttttaaaatgcattttatggatatgaagtcctgttattgctggggctcaccagtaaacaaagcaagtttttaaaaccctttcacggggcttacattttagataagaggaggtggaagaagtcaacaaatacgatgaataaggaagacacaggacaggtcggagggtgacgagtgctgtagaaaaggccagaagtagaagaggaggcaggaggtgtaggtgagagggtgatatgggagggttcatgtgagctgagacctaaaggaggttgagaaagcctccggatgtgtgaccaaagattattccaggcagaggagggagcaaagtgcaatgatcctaaagcaggaatgttcctggagtgtttgaaagcttccaggaggccagtggggctggaggagaatgagcaaggggaggggtaggagagtcccaggggtgagggtgggtggcaccagttaggctcagcctcagaagccctggtgaggacttcagcttaagccaagtgagatggggaagcccttggaggtttaggccggagaaatctctggcccgagtcacatctcagcagaattattctggttgctgcattgaggagagaggtaggggaagtagggggttagggccgaaatgggcatatcccagttaggaggcattgaagtgagccaggtaagagatgatggttgcttgggctggagcagtcgtaacgaaggtggtgggaagtgctcaggttcgggatatgttttcaagataatcctgttggactaggtgtggcatgtgaaagaaagagagcattcaagaatgactcctggaaattttagctgtgtttactcctcacatgacgactgatgtcatagtaagagctaccatttgtggagcatcacctgtgtgcccgactctttgggcgtgttaggtatgcacatttctctctctaagtatgcatagcacccctggaaggagatgaggaaactgtggttttgagagcataaatcacagaagtaatgtctcaaggctagtaaataattaagtgtgagattcatacccagggcattgactccaaagcttgtggtcacgctctcccatatgctgcagcaaggaaaataaataacagggccaggtctagctatatttaggggaaggaagggatgcaaatgtcattctggaaagatcacttagatcaggacctggggagcttggataaagtctcatcactcacctggtaccgtcagcaaatcttaggacacatggccttagaaagataaatgcattgaagtctttctgggctattaaacaggagaaatagttgtagcaatgctaagagcttccacttggtgggtagtcgctaccatatgcattaagctctacacatgtgctgtgccatttatccttgcaacaaacagcctcacaagggttggcttactacaggtcaaaaaccgattcttctagaggtgaagttaatatccctgcatattagaatcacctggggatctcttaagactcccaacagccaggactcacttcagaccaatgaaagcaagatctctgagatgggactcaggcatcagaattatctgtgtgtcaccacggttcagaactagtgagttaagtaatttgcccaagttacccctctgctaaatagtgaagtcagaattcaaacccaaatgtgttcagttcagaacccagagttgtaagatctacccaaccatatctgtgcatagaaattaggaaataaagaaaaaaagaaagtgaaaagcttgttaatcacagagagaaaacacttctgtgtacagcagtaattctccacattgacaacacattaaaatcacttaagtttaaaaattactaatgtctgagtgtcacctctcaagattctgattctgttagtgtagggtagacacagctattgatagtttttcttttaatttccccacgtaattataatattcagccaggatggagagcccctgatttagaggagggggaggctcaggtttcttccataaggattgcagatcttttaagcagtttcactggcatggatatgatttgcaatactctttcttttttcatcttttcatgcattatctgcttctgtaaatttttaggctttggagaatggggtagagagaagtgaaatgtggcttgtttgggtttttagtttttttattttgagacaaggtctcactctgtcatccaggctgcagtgcagtggccagatctcagctcactgcaacactgtaacctctgcctccctgcactgtaacctccacctccctgcaacactgtaacccccgcctccctgcaacactgtaacccccacctccctgcaaccctgtaacccccacctccctgcaacactgtaacccccgcctccctgcaacactgttacccccacctccctgcaagttacccccacctccctgcaacactgtagcccccgcctccctgcaaccctgctataaccttcacctccccaggctcaagggatcctcccacctcagcctcccaagtagctggcaccacagactgcaccaccaccctggctaatttttagtttttgtttttgttttgtttgtttgtttgtggagacagggttttgccacgttgcccaggctggtctcaaactcctgagctcaagtgatgcacctgccttggcctcacaaagtgctgggattacaggcatgagccaccgtgcacagcctgtttggcttttcaaatttgaactcataatgtaattcaagggtgcttggaaatagggtgaccttcatactctttgctcctccctgctgcctgtctctgttatcccacaccctgaactaggtacagagagcatggatgaaggagggacttcctctgtaaaaggccagattctttctcattcccctggcgtattggatctgggtgtgttagcttagctcagccaatcagagctccttagtcagacctttgaatgagggatccttaaggcaaagcctcaagaacaggagaaagttttgacagcactgtcctctctagaactggcatctgaagttctagctttgtagccttcctttgctcccacctaggccccatgcctatttctccagtcagcctggtaattttgaggcatttgttccattctcttttccttgtcaatcaatgcagggtcttttctgttgcttgcaacttgtgccaccaagggatgtgcctcagcaccatggagagatcccagaaagccctcagatgtgagtattgacattagggtcaatgagactttctaagaaagccctttccagtgaggaagcaagtgtccttgccttcatgaaatactcatgaggtagaatgaaataaagccaagcctggatcgagtgattctcttctcctgaagcggcttccctatgagaaggctgattttctttatttggttagtctcttttctttctgcgggcactaagctgtcaaccaactttggagctaaaatccctgactccctgtagtagggaggtaaagcccttttggcttttaactcacccccagactcaattttcttaccaaatagagtctgacagctaagaggtttggtaaattaggtttccagtggtccaaactttattgtgactgttgggagaattcatttgcttttgagtaagagctttttaagccaattttgaaaatttagttcaagagttactgcaagaaatctacactattgatttatcaagtgatagttcttgggtgctctctggagtcacttaagtgtttaaattcctctctttattactccaacaacatcacaagccccatatgagctgatgtgaaagactcttggtcccttcaaggcaaagcttagcaaatatttcagtctgattagagtcagcggaaaggcactgaccacagaagaattgaaagaagaaaagatttcttatttttttagtctctatctgccagtacaacgtgcattatggcattgtgtctacagaggcaggcactcaggaaatgcactgtatacaaatcttaatgagtcccagttcacagtgaatggctgagagcctgcccctccactgtggttcgttctcaggaagctcctgaaccaggcttcaaaagtgtgcctgaatggtggctttaggcagccaaccctaaagccactgagcctgaatgcgatgtcaagtcctgctaaaaacaagaaacagcttccatttattgatgcttgctggcatcaagttctgttctaagcactttgacttgttcattcatatcaactccaaaatgagagggattaacatccccattttgcaaatagagaaaatgaggcagagttgttcggtcatccagccagtacctggggaagccaggctgtgagtcaggaagtcctttgaagcccacaacgtgattcctgacatgtgtgtgctccccttaaagggccatggctttttgccttggttcaaactgctaactttcttcctctctccttccctctctcacttttttccttccttctctcctctcttcttcatttcatttattgtttcatttcttcttttctctttcattatttgaatgaaagacttgttggaggcctaatgttgacaacacatctgattggaggtgctctcattgcaacaggaatatgtctggggcgggagcggggttagggactggctccagccccatgcccactgctgtctcaccccttggagtgccacggatcctgggcactgcagttggagaatcaccacatgcatcatttttgggaagacatcttccacctcaggtcacagcaaactataaaatgcttttgccagaatatgtagatactggagggaaaccttctaagccagaggcaggaaactgagagtcagcagagatgttgtctgagctacgctatagctaaaaagtgaaggttcttataatttaaaatccagagattttagagaaaaaaaagcctagattcccagcttctctaggaaaatcttctgctctctagtaccactggccagccatcccatcagtcagcaaggacaaagtggagatgctcccttaaaatgaacagagcggaaccagcgacaccaaatcgcccagtgactcatctccacgaaagggtcaagtttcaaaatggggttgcattttcttcaacttagacaatcatactatgcattttttagagacgaagaagacaaaggctgtgtgggggtggagaaggggtaggaaagaatatgaatgtacaaaaataaagagacaagggcattggttctgtatcttcccagaggaattctttgtcttgtgtcagaacgttgaatcctaaggcctcccgggggctcatttctctgtcgggtcagtctggtctgacctttgctctatcacacacattcccagggtccaggtggacacagaactatctcttcttccttttgtctgagatctccaactccctgaaagacggatgtcggtgttctagccaggcccctgcccccagtgcaccagagagcttgccctgatgtcaccctgacctagaattctgtgcagctgccagaaagctggagttttcatccagttgtgaaacttgtatttttttttccattctgaaaccaagattaggttgagttggctcacaagtgatgggcatctgagtggggagctacagaatgttccaaacaggatcctgctgagttgctgccttctatctgtggttgaagagcaagttgatgcaaacacactttctggctgcagaggttcaaaagtgtctgctctgacactggtgcaaaatgagaaccttaatcaccacctcagggtttggattgggatttggaataaggtctgcgtggaacctggtccagtgcccggcacatagtgagtatattgttaacagtcacgtgttatttttattcttatgccaactacaacaaaacgctttcgggaggtcacctcactgctcacaaaaatcacataacaatatctttcaagccaaaaggaaaaataccccttctcttttcccttgtccatgactatgcctttcttaatgcccttcgttagcagaattgcagtggaggaggctgctcctggagcatgagaagttgtgctggcttctttttcatgcctctttcctccctgcacaatgggaatgtcattatttcagtcttctatatggtgcctctgagtctcggagagatgatgtgagtggttgcaatgctcacagaactttgtaagagagtgaagagaagtgcaggctgaaagctcattgcaacctctgtggttctgtgccagtataggcatccgtttgggactgaaagggggtctttggacatttggatggttgccacatccaatactaagggaagtgaattacttgctgagtagagtcagtcaagtagccatgcagctcctggacagcaccagtactggtacccagtggcagataaggagaatcaggtccagacgtgcttgctaagaagatgagatgcaactccctagaatgcaagattgtctgcaggccagcagtgagagaggatctcctggatgttgagtagtgcagagtcaacataaaatgtagcatctcctgtttcccagtccaatgctctttacagatcctcgcctaagacagctggtggtcaagaaccacctgtgggcctcagttgctggaccaagaacacatctcttagtttggaaacactctagactcaagacatctctccctcatttttaaagactagcaattcatgcttgagatttgcagcccctagcttgatggtcaagaccttagatttcttttccctcccagaggaatctctagcatctcataaatcatgattctgtgggccctgttcccggccctgtgaacttaaggaagattcacaaaacccagtgctttgtttggtgcagtaaccttcccgttatatccttccccagccactgagcaggactgagggtgatgtggtggagagttagtgctctggctgtcaatcaagccctgaagatggaatggtgcactcgatattagtgccccagcaaaggaaagtgtttcactgctactcttcatgttggcacatgcttgagatgcagtttttaagcatatttggtgtttctttcttgatatgccatggaaaatctcctttaattcatctgcaaacatgtagccttccaggagatggcagcctgaggtcttgctgaccactgacccaccacttagcgccatccttagcatatcagcagagggcactggagacacctcaggctggatgccaaggctcaccagaaccctggcccccctacaaactcagcgtgatgccttccatgctcttccttcttgtttccaccaatagcggttctattgatcaacagctctacaaagctcggccaacttccccttctctgaccttctctagccaatactggcaaaagttttctgtaaggatttggataagaaatattttaggttttgcaggctctacattgactgatgcaattactcaaccatgttcttataacacgaaagcaaccacaggaaaatgtaaacaaatatccaaggctgtgctccagtaaagtgttactcacaaaaataggcagctggctgcatttggttcacaggacacagtttgctgtctcctgccctaaggaaacaaacaaacaaattaaaaaaaaaaactgttggagacttgtgatgtcatatttgaccaccagctgtcttaggcaaggatctgtaaagagcattggactcggaaacaggagatgctacattttatgttaactctgccctagccagatatgtggttgtgggcaagccatctttcctttattggctttaattttatcatctaaaaaatgaaaaagtttggaccaacggtagttcccaaaatacatatatctcaaatgcatggaattggtcagaattcttagttgcagacaaagagtccctttagctaagtagcccctctgagcagaagagatgtcattaaaggatactaggcaattcacataatctctaggagaaccactgaattgaatgtatttactacacagccagggacagggcagccagtgataacacagacgacaaaggtccaacctctgcagaggactgttgtggtggaaacaccactgtcacccctcggcatgatgatgtgagggcctggatgccaggggcaccccacagctgccccaggagaaccagggccactgtgctcaccagaaaaccccaactgccttcctggctgctgctctagaacccacttcttcctctacgtcccaaatgagtgggtccgactggagcaaactgcttcaatcctgcatctagcagcaaggggttctgagaatgtagtttaggcctctcagcccctatagcagaggaggacaagcagagggggttgaaggtgctattgagtgagtggcctacagcagtggtccctgacctttttggcaccagggaccagtttcatggaagacaatttttccacagatggcggtggtgggggaaggatggttttgggatgattcaagtacattacatttattgtgcagcttatttctattattattacattgtaatgataatgaataatgaatgttgaataataatgaactaattacataagtcaccgtaatgtagaatcagtgggagccctgagtttgttttcctgcaactagactgtcccttctgggagtgatgggagacagtgacagatcatcaggcgttagattttcataaggcgcacacaacctcgatcccttacatgcgcagttcacaatacagttcatgcccctatgagaatctaatgctgccactgacctgacaggaggtggagctcaggtgataatgtgagctatggggagtagctataaatagagatggagctttgctcacttacccgccactcacctcctgctgtgcagccctattcctaacagcccatggactggtaccggttcatggcccaggggttggggaccccagcctatagcatctgccacacctacagaactgaacagaggccattcaggtgcatactgcaggtgtgagataaactagtttagctcatcatctgcagagctggtaataatcattccaaggcctcatcaacacagacacaggttactgctcattgttgaatattcttggcccatatccttaacttgtgggtgcttctctgtcccagatgccagtcctcactttgtaggtggttccatgccccaggatcccccaccaaaaccctggagccatccctgagatgtgtttctttgtctttatcttctgcgtactattatgaggagagaagggtcctttgaacaaagttggcttaaagccagtttcttttctctcttccaggagcagcagtttattcaatgaggttgtgcagatgaactttgaaatagccagtttcagcagcctttcagggactcagcccatcacgtggcaggtggagtacccacggaaggggaccacagacatcgccgtgtccgagatctttgtcagccagaaggacctggtgggcatcgttcccttggctatggtgagtcctgagttaccttggatgctcctgcattcagccacctgactgcatcctgtgtccttcctatctgtcatgggatgtttgctacaatgattttatggagtgtttactttcaaagtttctcgtctttcctcaccctggaagttgttacttttcatgagcctggcctttctcaactttagtcatgaagtttagtccagcaagtcacaatcattgctggaggtggaagtgagcacctgtgattttaagaagctcaccaggtgatttcagtgtgcagccagggttggaaacccctgagctaaaaggatggtcagctttgccatctttctgcaaactcggttccttcttgctccccactccatgcttgagatagatgcccttcatctcctctttccttaggatgatggagctcactcagcattgaactctcagaggctgtcactgggctgtgaggtcaacctgaaatgtagaaagtagatgagtgacaatgggcttgagtagtgcagcaccatctatctgactcacaatgtggccactcttagattactgttagtagtgtacactgatgagaacgtgtaagcaaacatgctacttgtgtgaatcatgctatgagaaatggattaatcaggattataagaaaatggattattcaggattctttgagttataaaggctacaaacacaacccaacttcaccttggctcatgtaagtttaaaagtctagaaaagtgtttctcaaacattatcgggcatgcagatcacaggaacattttgagtagatgcccatcctcacttaggaggtctgggttgggtacttatttttcaaagctcctaagccatgtcagcgcggctggtctgcagaccacacttggagtgtgaggggcccacgtgtgcaaatgatgtggtatggacagtggcttctcttcctttctcagctctccttcctctttgttagtcacaaggtggccccggcaatgccacgctggcttcttcacagcatcatgtccagcaagaaatgagtggaaacctcactgccaatcactccagcaaatcctttgggacagagactgattggaactgattggcttgggtcatgagcccaacttgaagccaatcactgaaatcaaaaggatgtgttgctctgattggccaggcctggggaatgtatcaccctggggcaggtgtggaatcaggtgaaggagatgtagcagcaggtgggacaggtgtagcatcaggtgaggcaggtgtgaaatcaagtggggcagatgcagagtcaggtgggacaggtgtggaatcaggtggggcaggtgtggaatcaggtggggcaggtgtagagtcaggtgggacaggtgtggaatcaggtagggcaggtgtagcctcaggtggggcaagtgtggaatgagactaagagcctgtgcatcatggaaaaatttggctttcactgaaacagggaacagatgctggtcagacaaaatagcagatgtgcaccccagaaggtatcatctaccataaagatctgtaaacacttggaagtcagagaatgattccttttgactttttatgtcctagaacaggggtcaacaaacaacaagccatgggccacatccaatctgctgcccggttttgtacaccatgcaagctaagaatggttttaacatttttaaatatctacatttttaaatggtcctgtctagcttcttcatatgctcagttctgcctgttggctcataaactctgaaatatttactatctggccctttagagagaaaatttgcagacctgtgtcctagagcacacaccagcatcagctctggattacaagtgttcagtttcgacctatttcagaaggataagacattcaaatactttgaaaaggaaaagccatcttaagagtgtgagatattataatggtccttttcaagggagcacaggtcttccttggatggatgtattgttattcttgtggtggttgtgttttcataatgcctttaaggtaaagtgaagtgattactaatgtctgtactcttgtcaggatccttttgtttgcaagtaaatgcatgtgaattcaaacaagctttattcaaaagttcattgataaacaaacacctttgcagcaccagcacagagctctgggctctgaacactggatttgggtgctcgtgcagtgttatggtttggctgtgtccctacccaaatctcatctttaattgtaggtcccataattcccacatgttgtgggagggactcgatgggagaaaattgaatcatggaggcagttttcaccatactgttctcatgaatgtgaataagtctcaaaagatctagtgcttttataaggggtttcgcctttcacttggctctcattctctcttcccgtcgccatgtaagacatgctttttgccttctgccatgattgtgagacctccccagccacacggaatggtgagtccattatctattttcctttataaattacccagtctcaggtatgtctttatcagcagtgtgaaaacagactaatacatgcagtatcaccgttttgcatcccctgggatgtacaacttgacctcagctatgcaaagcaacatggaaaattagaaaatagatgaggcaatttagagggacttctattctcctattttctgtatgttcaaagttttggttcagaataagctttaggacatttataaccaggcaaaaagtaaacttttattggaagtaactagctaataaaactgcagctttgactagaagatgagaaatttaaaaaaaattactgagcacaaagcaaatcctgtgttgtctgttagcagccagtgagacagctggttagatctttgaaccaattaagcatattttccaatttgttgatcgttttaaagaaaacaaacttcagaaaggtgaaacaggggattaacagatggaaaatctgcctcactggggaagttcttgccttaaaatcaagcattctgaagctcctttttaaatccaaggagagagccacggataggaggattcagccacagcattccccgtcacctactgcctctgactccccctgagtaaatgcaatgggaaaagcagggagacgtgctctcgactctccccagagcagaccctgcaggcggaagccacctgaatctcacttgctggtccctgggcactcttttgtttggagaggactgattcccaaggccaccgttttgctcgtcctgcctccaggcttgttgacaatgagcctcttgccttgtgagggcaggaaagctccaagtcttagctccacgaccctcctgccagcacccacctctccctaatcccctcctccctgcgctgtccccactgtgccagtgttaggcttgggggatggggtgagagaggtatctgaatgggaggaccaaggccactttcgtacataaagctttcagaactacagaggaaggagcatttgggacaactaaaatgttggcagttcagttcttcttcaatgtaagaaaaaagggttcatatcccaagttgaggccacatgagcagagaccaggcacagatttccaagtgatagtttctgtatgcgagtggctggggtgctggtctctttttaagaataaatggacaaggccaggcgcgatggctcacacctataatcccaggactttgggaggccaaggcaagaggattgcttgagtccaagagttcaagaccagcttgggtaacatagtgagacctcatttctacaaaaaaataccaaaattagccaggtgcggtagcacacacctgtagacccagctcctagggaggctgaggtgggaggatcgcttaagcccaggagttggaggctgcagtgagccgtgatggtgccactgcattcccagcccaggcaacagaatgagaccctgtctcaaaaaaaaaaaaaaaaaaaaaaggaataaacaagcagcagaattcattcaacctcacactaagctctgcaggtattcattgctgcatatcctcagaggacagcagtcaacagacaaagtttgccttcctgcaggtatactctagtggagcgacagacagcaaacaggtagatacttcctaaggtgaggtccagatagtgatcagacgctgctgtcacacaaatcaaggaggagtaaggggatggggtctaactgatttctagctctgttagcgtcatggactttcttcctactgcttatttgaaattaaaacaaaacaaaaaacaaagaaactaaattttaggcaaaaaactctagagaaggcagtaaccactaattttggcggtgtaggaagaagttctttgcccccgggactgatatatttagtctgaaattaaatttcctgagaagtggtgagatttacctggaattttgaaaagtttcaaatcattgccatttttcatcctttgcaaactcattatgaaatcattttccttgacccctaaaacatgacagtaacttgggttttttttttcttacacagagctttcaaaattcctagaacatgttcctatctctctgcataaaatcaaattaaaaataaagtggcaatcagtagggttgtttaaaggagagattgctacttattcttgcatctgcaaaatgattatctaattcttacctctctggggtgtcatagagattcattagggcttgagagatccttggagaccctggatgaagcacgccactagaaaggatgatcaagaaggagatggcagcggggccttctcccgtgactggtttgcccttccagacccttctcggctctgctctgggccctgggggctggcccatgtgaactacagcccccaggctcccttgccctctggcttctggagggctttaaccagtgggaggcaccagagagaactggagggaatgggttgaattatgcccaccctcccaagaaagcaggttgaagtcctaactcctggagccagtgaatgtgaccttatttggaagtaaggtctttgtggatgtactgaagttgagaggagatcatgctggatttgagtggagtccaaatgcaatgactggtgtacacaaggagacagagatttgaacatggaggatacaagaagagggccatgtgaggatggtggcaaagactggagcttccgatagcaccccgtagccaagggaagcaaagactagctggcaacatgccaagcctaggagagaggcaaggacggttctctctagagccttcagagggattgtgttgcagctgacaccttgatttcggactttcagcctgaggaactatgagagaatcagtgtctgttgtttcatcctccatccgtggtactgtttcgggagccctgggacacaatgcatcctcatctgcccggcctgatgtgtgtcttgcgggcgtgtggtcctccacgcccacacacctgtcccactgggaagtctgttttctgtggttctcctctctctgggctccagcatctcaactgccttgccctgcccctaggccttggggtagaaacagctcccagctgggactagcgtggggtgttgcaccatccctggctttttccctccgttatgcccacagctctatggctcagcctttacaacactccctccagttaaaccaccctgagcaggctgtctgttccagccacgactctgagtgatacctgagagctaaatgctgcacgctccctctagactctctttggctgagaacacaccattatcctcaaaatatatatgtatatgggctgggcatggtggcttacacctataatcccagcactttgggaagctgaggtgggcgaatcaactgaggtcaggagttcaaaaccagcctggccaacatggtgaaaccccatctctactaaaaatactaaaattagccaggcatggcagcacgtgcctgtattcccagctactcgggaggctgaggcaggagaatcacttgagcttgggaggcggaggttgcactgagccaagatggtaccactgcactctagcctgggtgacagagtgagactttgtctcaaaaaaaaaaaaaaaaaatatatatatatatatatatatatatatatatatatatataaccaggaaacattcccagggtggtctttcttctcttcatagacagtcaaaatggaagggagccgttaagacatcctgttggggtatcttgaccccagtggtttcactggattttcccacctgggggcatcctgtggttgttttcctgcatcctctgcccttgctaaattcagagacccggacgtacatgaacagacccatggcactgcagagatgctatcggatctgcacgtcaatctgcaggtgatggatggcttcactctgctctggggtccgtggggaagcgcgttagcaatatcttctgtgttcaagaagggcagaggcaggcgtgtcgtaggatgtgggggagatctcctttgacagggattggagaatattgcttttcaagagacaatggaaaaataatgttttattgtttttcaaaaacatctcgtcctgatctccactttcctattccaacttcaaaatgtttctatttgtaactctctaagagaattttaaggatgggttggatgctctagggcaattgaaaaatatttgctcagttgaaaaataactatatggacagaataagtattttcttgtcacagctggaaatttgctttgggattaggtttaaaaatgtccctcccctccaactaactggcccagatttttgcctaaaaagtaaatctctgatgcacatgaagctgttctgccttggtagcgatgtttgcagggtcactgattaattctccaataaatgataccatacccactgcctgccagagtcaacaatcaaaaaatttgaggaatcattgctgtctttagtagcatcatcattatctgaactttggtttccctatcagtaaaaggaaagtgggggactgagggctagcactggcctttccaagtttaggctttcattatgggacttgctttacttagaaagtaaagctatgttctggcacatgcatgcatatgtaacaaacctgcacgttgtgcacatgtaccctagaacttaaagtataaagtataattttatatatatatatgtatatatataattttaaaaaaatgaaacctgccaaaaaaaaaagtaaagctatgttctaattttaaagatgataagatgatataacttcagccgggtgcattggctcacacctgtaatcccagcactttgggaggccaaggcaggcggattgcctgagctcaggagttcgaaaccagcctgggcaacatggtgaaaccccatctctactaaaaatacaaaaaatcagccgggcgtgatggcaggcacctgtaatctcagctactcgggaggctgagacaggagaatcacttgaacctgggaggcagaggttgcagtgagctgagattgccacactgcactccagccttggcgacagagcaagattctgtctcaaaaaaaaaaatgatgatataacttcatgagagatgattgaaaaatgaaaacagagaatatttacataagcaataagaagaagaagacgaaagtgaaaagagtggtgctagaacagaaaaatcagcgggaatgacttaggtcagcattttcttcttcctcactttccaggtcaattggagtttgcgtaaggtaggaggagggcccaggagggaacaccatgccacagtgttgattaatgacagcctttctcattttttgccatttccaaaaaccactgagtctatcgtttacttaatatttttttctaaagagagaatagtatagaaattgggcgctcagcttcagcctgactgtgttggggtgagtcccaatgcctcctcctaatgcctgtgtgaccttgggcaagtgatttgacttctctgtgcctcagttttctcatctgtaaaataggaataggccgagtgtggtggctcaggcctgtaatcccagcactttgggagcccgaggcgagtggaccacaaggtcaggagttcaagaccaccctggccaagatagcgaaaccccgtctctactaaaaatacaaaaattagctggacgtggtggcgggggcctgtaatcccagctacttgggaggctgaggcaggagaattgcttgaactcgggtggcagaggttgcagtgagccgagatcgtgccattgcactccaacctgggtgatagagtgagactccatctcaaaaaaaaaaaaaaaaaaaaaaaaggaatgaaaatgacccccaactcatgggcctgtttcgagaactaactgtactcagaaacctttgcttggcacttagtaagtcttcaggaaatgctagttattttagcttaaataagcttcaggttacacttctacttatatttattaataagaataaaagtattcagatattatttgtgggtattcaaacagtagttcataaatcactttacactagaaacctgactgttactacagaatgttcatccatgtgccggttagaatcctactgagtcggggaggtagcactctcagtgaaatctgtccatagagccccgtaaacccagtgccaccctcatgtgaagagtgatgccacctgccagctcactctctcaatgatgagccctcccactggaatgtaagaaacacagtcccgagagaaactagcaagggaggggggtgaccctatgcttgtgccaataggagattgtgccctaaagctgcagcagcattgcagccaccctgcaggggtcctgaggtggagaaacccccagagaatccacacggctctctgaacttgaatgggaaagttacacctgcatttccacttaacctctaactgaaactgagcattttcttcctatcatagtccattccagctgctataacaaaatgccataaacagcatggtttataaatagtggacatttactgcttacagttctgggggctggaagttcaagatcagcaggttcagtgtctggtgaggacttgcctcctggtgcatagacagtggcttctcactgtgtccccacgtggtggaatgggcaaatgagctctctgaagtctcttttataaggacactgtattagtccattttcatgctgctgataaagacatacccaaatatgggaagaaaaagaggtttaatggacttacagttccacatggctggggaggcctcacaatcatggtggaaggcaaggaggagcaagtcacatcttacatggatggtggcaggcaaagagaatttcgaaccaagtgaaaggggaaaccccttataaaaccaacagatctcctgagacttattcatgaccatgagaacagcataggggaaactgccccccgtgattcaattatttcccactgggcctctcccacaacatgtaccaattatgggaactacaattcaagatgagatttgggtggggacacagccaaaccatatcagacactgatcccattcataaggacttcacctgcgtgaccttatcacctcccaaaggccccacctcctaacccatcaccttgggggttggcatttcagcatatgaatttgggggacacaaccattgtgaacacaggtcatagccccaaaagcattagcagctgccaccaaactcacacatttccatgtcatagcatatgcagttgatacagatgtcatgaaataccttctatattcttcactgctttgaaagtaaagcactacatcttattacttaattcagtaataaagaaacacatgtactacagtacctgaagttattttgaattttggtaactgcatttctttctttcttttttttttttttaatgagacagagtctcgctctgttacccaggctggagtgcagtggtgcgatctcggttcactgcaaccttcgcctcccaggttcaagcaattctcgtgcctcagcctcccaagtagctgggattacaggcgctcaccaccacgcccagctaatgttttgtgtttttagcagagacacagggtttcaccatgttgaccaggctggtctcgaactcctgacctcaggtgatctgcccacctcagcctcccaaaatgtgggattatatgcatgagccactgcgcctggcctgtgctgaacatttttatttttatttttatttttgagatggagtctcactctgtcacccagactggagtgcagtggtgtgatctcggctcactgcaacctctgcctcctgggttcaagcgattctcgtgcctcagcctcctgcgtagctgagattacagccatttgccactgtatccagctaatttttgtatttttaacagagacaaggtttcaccgtgttggccaggctggtctcagattcctgacctcaagtgatccgcctgccttggcctcccaaagtgctgggattacaggtgtgagccaccatgcccggccagtaactgcatttcaatacaattgatttcctgtgtgagcacacatatcttactgcatgcctttaaaaactttattctgagaaaagattctcagacctcacctgctagctagagatgcccacgacccacacagagaaatagctcaggcctgctgcatacagaaggaaacgctcactccagccccactgccaccccagcctgccgagtcaagggaggagccaccaagggcctctccctagtaagcacctactgtgtgcaagccttgttgcagatgctgccagctctcctcacccggcatctttgtcctcactgtgccatcctgagaggcacctcacctcctcctcctcttcattaaggactccttgcccacctcatccctggaggccctcctgccccaagatggtgctgacagctgcgttccctgcccccattccagcacattgcctgatctgatttttggcatatccaatacaattattgttttgtctgatcattgtctgacattatcttccttatgttttcatttgtttgtatgtttactcccctccccgctgaaatctggaatgttggctccttgacagctggaatttcatctctctctcattttagccttgacaaaattattgttctgtctgatcattatctgacattatcttccttatgttttcatttgtgtatatatttatccctctcccccaaccaccccagtctggaatgctggctccctgacagctgggattttgtctctatctcattttacccttgagtctcttgcctcctagtctcccaccagacactccctgggggactggtgagtgccactctagggaaacagcaacgagcataacagacataaggttcctgtgcccaagcaccggcaccccaggcattatcttgtgaacattaatcctgtgaccatcattcggaaagcccctgtgagccctgggtcccctgtcctgctgccttcaaccccagacagcaggtactgtaggtctgatgcctccccccgccctgcagctctgctctgcagtgtcccagctccctccgccgaggagtcaggcctccgtgcccagaaagtgctgggtcctggtcagtgccatgaaaaggaggccaaaaatggctgtgaaactgctggacagctcacggccagcagctgcaccacttgaggtggccacggagctgctgctgcaggagaaatctaggatgtaggtgtaggtgcaggtgcaggtgcaggttcaggtgcaggtgcagaatcctggcatcagccaggtctccccaggcctgccgcacactctggtatcgcacctgcccatctgtgccatccctcgaaatgcatctcaaatgcagcagtctccccccacctcaccacttccagtctcagcctagccccatcatctcacacctggatgtatcatctgcctctggactggtctcccctgctcaatgctgacccctgggagccccttcctcacagtaacagccttgaaccggtcatctcctccctgctcttgcctccctgaaaagcccactgcacttttttaaaaagtgcaatgtctggtccacggcggcacgctgagatctaacctcctttcccagcccctcccatgcgctctgccctggggcctttgcacttactatttcctgtaccaggagcctcttccccacattccaaactgtgttcttcctcctgctgttcaggtctgtgcttacatcttctcaggtgcacctccatcacctgatttaaaataacagccggccactctatgccctgaccggcttgattttcttgcgtaacatgaccaaataaaatgcatgtctatttgtacattcattatctgaatttccccagtggggtgtcagctccatgtgggcagcggacactctatcagtagcttctacaacaatgcctggcacacagtaggcacgtaacaaggagctgtaggatgtataggtgggtgtatgacccgccacatctgcctgctccacccggaggcgagggactctgatctgtttcatgtgttgatcaccactgccaagcacagctccttcctcatggaaattgctccgtgaatacctgttgcctaaatgaatgcagcccaaggaagatgcattatccttattgtttggtatatgattatggtgccaaggctaacattaaaagctgtcagcctttattctacagcctcataattatgtcatcatttgaaacatgtgagagcattgatctatgaatgaatttataatttattttaagtaattgtcacatgaggaggaaagaaaatattttggaggaaaaaaatggggaatacatgtctgtgtggatgcaagggataactttggagtgatttcaatctctcttacaaacatcatgcacactgggacctgctttacatcatcatccattcatttttcaaacgagaatggagttcaagttctatacgtggccctttgttcagcctttgttaatcttaagaataaaaaaaaacctgggacagtttcagtggctcacgcctataattccagcacttcaggaggccaagataggaaggtggcttgagcccaggagttaaagaccagcctgggcaatatagtgagaccttgtctctgcaaaaaaaattttttaaaaatgaggcgggaggattgcttgagcctgggaggttgaggctacagtgagccatgactgtaccattgtactcctgcctaggcgatgggagtgagatcctgtctcaaaacaaaaaaaaaccaatatgattccactaatatgaggtatctgagatagtccaattcatggaaacaaagagcagaatggtggctgcctgcggttggggaaggggagatggggagttatgaatcgagggccatgaagtctcagccctgcaggtccaacagtccccagagatctgcctgtagtcgacaacactgaattctgcattttaaaatttgtccaggcacggtggctcacgcctgtaatcccagcactttgggaggccaaggcgggtggatcacgaggtcaggggtttgcgatcagcctggccaagatggtgagactcagtctctactaaaaatacaaaaattagctgggcgtggtggtgcacacctgtaatcccagctactcgggagactgaggcaggatagtcacttgaacccgggaggcagaggttgcagtgagctgagatcacttcattgcactctagcctggaagacaagagcaaaactccgtctaaattaaaaaaaaaaaaaaaggcaagagggtagatctcatattacctgttcttaccataataaaataaattttaaaaattcaaatgcaagctgtgggctaagggagaggcatggctgtgtttcaggggtctttgaacttgagcagggacagcatggccttggggacttgggaaagcctgggtgcccccctccaaggtgtctcaggcggcaagctggcggcaagcccaggaatctgcatccctaacaagctccagggaccccactttgagaagcactgccctgggtccagggttgccacactgacggcccatgagggtcactagggggcaggggctggagcttctggccacatcccacaccacttaagccaaatcagcgtagttagaacctgggcctgtgtttatagttcactgctcggtgactccatgcacatccaagattcagcacggctgcccttgaacttctcacagctggctcccaggcttcatccaggcatctactcaaatatcccctcctcactaggccccctgactaacctgcctaaaagagcaacctggaacccctctgagctttccccactccctttgcagtctcatctctgccagacacgatgctatctgtgcagtcagcctctccatcgtccatgttccctctgggcggtcatgcccagaggctcgggaacttggctgtgtccactccctagtcctcaccttccagatcactgctcaatatctagtcgatggccaaaacatatctacattgaataagtgagttataataatgtgtgggccgggcacggtggctcacgcctgtaatcccagcactttgggaggccgaggcaggcagatcacaaggtcaggaaatcgagaccatcctggccaacagggtgaaacccatctctactaaaaatacaaaaattagtcgggcatggtggtatgtgcctgtattcccagctactcaggaggctgagacacgagaatcgcttgaacctgggaggcggaggctgcaatgagccgagatcacgccactgcattccagcctgggcaacagagtgagactgtctcaaaaatagtaataataataataatgtgtatgttttctatatgtttctaaactttatgtggttttggtcctggtctgggaaggaaagattcacatttagaaacagacgaagcagtgttatgtaatggagcttttggtcgtaatggtctgtgtctgcactgtccactctggggaccaccagctacatgcggtcattgaacacttaaaattggctagaaaaaaagaggaattaaatttttatttttatctaattttaattaattttaacataagtagcaacacatgactagtggccactttactgcacagagcagtgatagagagcatctgtggtgatggagttgactcactagaaatcaagaaccagattcggccccagccctgcagggagtcacagtctctttcctcatcattcttcatctcttcaccctttagtgtggttcttctgagatcctccagtgatggggctactttttttcagattgtgtgaaatctggtatgttaaactctaaaaattaaacaacgcatagtggaagattttgaattcctggtgtttcatcagcacaattttggagcaggtggcagaaacccaactcaactggcttaatccaaatggagaatgaattagattgaccatgtagcttcaggcacagttggttccaggtgcctgaacatttttagcctagccatttgtctctttgtctcagctctgctttttctgtctgtggattttttttctcaggcatagtttcccaaaggtagttcctggcatccaagcaatttctcatccccagtaaaaagtctgcctctttaccaagagttccagcaaaaatcccaggattcctcctaacggtattgtcatcccatttctgaagcagccaccctgactgtgactggccaggaatggtgtgtgcctgcctcccgcataacctcagatccaacaggagccaaaataattggagtggggatggggggaaggggggctgacaaaccccaatagatgcctgtgacccccggctttacagacaccccagatctggctgctactattttagttgtagcataccgatctctattgatcagagatcaggggcaagtgagcttcaaccggagtgaggcatccgggccttcacagccacagaccctcatcccttggcctaaattctgccaatgttatgaagacacaaaagagaataaggtgtcagaggctaacagccctcaccagtgcagcaaggattacttcagttgatctgtgtaaagcacttagaagagtacttggcacatattaaatactatagaaaaatattggccattattattaattagtagcagtagtaacagtaacattaattagctcttcctccatgttcataggaaattgctttgtttactacaaaggagctagttgctgttatttatgatccatacagacttaattgatgttctttttctctccagatgcatactccaaatttattagtattatgctagtttctgtgctgacacacctggtaaaattgtgcgcttaaagtcccaggtgagtggaggaacaggagtaatttttttccgactacgaaaatgggaagataacagagtaggaggagcactcagtcttctggaagatcaggaggaaagcaaccagcccttttctttgcacctcgaccatgtgtgcagaatcaataaggtcactgaatgagaacagtctccttagcatgaaaccttgcgttttccattcatttttctaggcaaaggcttctcctgacctcaaatctttatggaatatatctctttaaatcctgcatggctgcattcagcagtcttcagaatgtggtatggaaactcttggaggtccccaagaccctttcaaggagtctgtgagatcaaaactatttttctaatagtgctgtagtaattatcgattggtgcataacaattttccctgagacacagtggcttaaaatagcaatatagggccaggaattcaggagcaggtctgtggggtggttctgtcctgaggtctttcatgagttgcaggtatgagattggtgggggctgcagtctcatctgaaggcttgactgggactggaggatccatattcaaggtggtctcctcacctggctggcaagtgagttcctcccaagcaggccgcatagtggcctaacaacatggtggctggctccccccagagatcaaggctgcagagccttttatgacagcttcggatgccatacaccatggattctgctacatcccattggttacattgacagccctgattcagtgttgtaggggattatacacagggtgtgattactgaggacagggattactgggaccatcttggaagctgactccccaaaatgctataatgttatttgccttttttgctcacagtccctcacaagtgcacagagacataggatgttgtcatcaccctgacaataaatataaagtgtgactgtgtcatcttgagtttcaaaaacttttcagttttaatttctaatgcaatgagtatcaatagatgcaacctacgccagtaaaagctttttacagttctcaataatttttaagacaataaagggatcctaagaccaggaattctgagaaaccctcacctagttaagaaggctggaagaattaaatagtagtaccaaaaagagatgtttgggaagagtctttaattcctgattctcacatggaaatctagtttttcttaccaaacagttcttggcaaatatgtgagtcaagtgtgagtggagatttcatttatttaacttttcatctagattattcttcactcctttatgttataccccaccaccaaaaaaaatcatggttaataattaatattcccaagataatgggataagagccaagggcagatgtcaagctaactgcagcttcatatacaaaattgcctatcaattaattcatataacaaatatttattggatatccacaaagcaccaggaaaatattctagactttgagttcaggaagtgaacaaaataatcaaggttcctgcttacctggtacaagaatcacatgccttccttctttgtttgagtagggtcttgctttgtcttccaggctggagtgcagtggcgtgatcacagctcactgcatcctcgaactcctgggttccagtgatcctcctgcctcagcctcctgagtagctgggactacaggcatgtgccacgaaacccagctaatttttaaattccttttgtagagacacggtctcactatgttgcccagctagtctcaaactcctggcctctagccatcttcctgtctcagcctcccaaagtgctgggattacaggcatgagccgctgtgcccagccaacatgtcttttcattaatgaaaccaaaaagtaaggagacgggacttgatttagaaaccagtgcttctctatctgaggacagatggctttgaaaatatctgcgtgctgcttcttcgtaattcattatgtctcaagggaatggccccaacactaacccaaacaaattagaaagtgctttccatatgataattgacttccctttatcagaaaatacatgatgcctgctatgtgagtgacacctcctgagatgtggagcccttgtgctgtgcacagcctgtccaactgtacttggcagccttgtgcgatctcatctacaaactgagtaaaacccactttccttcgttacagagaaacagacgccatctatagggtgttcattccttcattagtttttccttcacctgcattttaggttttagcaccaaaccaaagactttgactctggctttgcctgtgccagagcctgaagttactgttattattagcttaagattcatggtatcccttttatttcctttccttctgaaggggcctggaaaaggctggatttattaggaaatgagtatatgagcagtagatagttccttttctaagtataactgtcaggcagctgtagggaagaagcagttttcattcttgtaaatgctgggctggtgtgtgtgcacatatcacccacaaaaaataatggggatcaggttactcagagcaagtattttaaagcaagcatttgctgtaatcagacctagattcacttacaaatgtgttcctgacattatctccaatacatgctttcataatgttaagagattctaaacagcaaacttgctaagatactgcattgtatcctataattgaagcaaaaaaagttttcagaatgcttacagaattcctgctgtgctcaagtgcagaaatcaccaaagccgaagtccctgcatactaaagattcttgaaagtaaaaatgaaaaggaattgttaatggaatttcattttcaagaaccttaggtgggtgcagattagaatgagaattaatcttgagtattttgctttgtaaattaatatgagaatagctagatgaaatgagttttttcttttttttttttttttggtttctatctggattttgtcatggagtttaaaaaggtcaaaatcagcacattcatttattttattaaaaagtgttctttgtgccttccaagcacacatatgggagagttctgttttccctttgaggggccacctgccaccaggttacacatgagcccctgaaacagatctccattgtctaaaagcaacccacagtgaagttgtaacctctcagggttgcagcagaacattgtaagagccatgggcaacttacagttttatttctgaacctaaagagaacttctgaaaagccagcgctcccaggtggatgtcactcacagtgtacagtcccaacatgccagctccctgccctaaaacctttatctgagagggagtttcctcttgcccccaagttgtgacaaaggcacaaaggtgaggataagagttctaagtgccacacatcctgcattcggagagccccagaagtcgggtctagccacctccccatagctgcccaatctcggctttattccctgtgggaggcaagctctgccagttctactaggttctcaggagatgttctaaattcttctcatccacatattttttttgagacagggtctcactctgttgcccaggctggagtgcagtagcacgatcatagcccactgcagtcttgacctcctgggctcaagcaatcctcccaactcagcctcccaagtagctggaaccacaggcatgcatcaccaccaccagctaattttttaaaattttttttagagacagggtctcactttgttgcccaggctggtctcaaattcctgggtcaagccatcctcccatctcagcctcccaaagtgctaaggtaacaggcgtgaactgccacacccggtgtcatccacatttttaaaaataactttattgaggtataattgatgtatcaaaaatctgcacatgtttaatgtacacaatttcatcaatttggacatgcacatctacctgtgaaatggtcattacaatcaaggtaacaagaagacccgtcacctcccaaagtttacttatgtccttttgtgggttttgttctgttttgttttttgggtttttgtttgtgtgtgtgtgtgtgtgtgtgtgtgtgtgtgtgtgtgtgtattaagaacacttaacatgagatccacccccttaacactagttttaagtgcataacaccctattattaatacagacccagggttggacagcagatctctagaacatacgtattcacctggcatgactgaaactttacacccattgagcgacatctcttcattccccctcccccagtcgctggcacccaccatttccttctctgcctctatgagttgcattgtttcagagaccacctatgaatggaatcatgcagcgtttttccctctgtgcttggtgtattttgcatagtatagggtcctccaggttcatccatattgtcacaaatggtaggagttccttctttatgactgagtaatattctactgtgtgtatctaccatttttctttatgtattcatctgtccatggacacttagactgttttcatattttggttgttgtgagtaacccagcaataaatataggtgtgcagataactcttctacatactgatttgatttcctttggatatacctccagaagtgggattgctggatcacatggtagttttattttttatttttaaggtcttcttttgcaaggtttgttgattttccaagaggattgtgagaaatcctccccacagcctacaatccccacaggaacagtacctaacattgtggagtgttcaccatgtgctcaggagctccttaagtcatcccgaaagctctgtatggtagcaggcattactcccattcgcagatgagaaagtcaaggctcagaagagtaaagtcattcacccaaaaatcacacagcttgtaaggagctgccatggggcttgacctcagtctatctgatctccttccccctccctcagatgactgcagaagctgagagaccagctgagaggctgtatttatagtgtaagcctctgtatttaccacaatcttttctaaattgtttttgctgttctcttttttaagtggtttttattttatttttagagatggggtcttgctacattgcccgggctggcctggaactcgtgggctccaggaatcctcctgcttcagcctcctgagtaactggataccgtctcatttttaaggcatctcccccatgttcctctcgccacgatacaaacctgcttctgggaagcactgcagataaaatgaggcctgctctgctacaaacagcccagtgggatcccacagttggcacagcagaagctcccagaacagaactttgctgagttcaactgcgaatatttgtctttctgtgacctaatttctctgcagccttgcatatctaggtaggaaccctgggactttcagaatcagcaaaagaaaatgtcagccataatttgggggctgattttaattgagattatttatgcatagagagacaccatgggaaacatgagagtgctttcattttctgcaaaacctctagaagcttccagttctgcatgggaagcctgaccctgtgtgtttgtcttcacttctgcagaggttggggtaaagaactggactggataaccctcttagctctgtgagtgactgaaggctaaataatgagtcatcatctcctttcctgacacctgctcagtgctctacagcttataaaatgctttcacatatttggtcttgttttgtctttcttggtgtcagtcatggaaaatcccccttccaggcaaacatcatcagtatcccccaaaataggattgtgtaatcctggggcacctaaccagaggaagtcagagtaaaaactagcaagaatttccagaaattagagctgccctggtttggtaaatctgtaagatcaaagtttgctgaaccctattgagtttcatttccacagtgataataattaacagttcctcagtgctggcaccatgctaagtgcttcatgttcattatttcgtttaatcctcatagcatctgtttcagcggtgtctgaacctatattatcttcattttacgggtgagggcattgaggcctgaaggcagagctaatataccctggtcacacagcttggaaaggtggttacggaatttaaacctatgtatctctggctccagggtttatcttttgactggcacaccttaaattggaaaatatttatagtaaaagggtggagaagaggaggagaatgataatggcattgatgatagttgtggtggttataatgactgtaaggctgctggtggtgatggtgattatgatggtgctgatggtaatgatggtagtgatgatgatgatgatggtgatggtggtgatgaagaggagaatggtgatgatggtggtggtgatggtggtgatggtgatgatggtggtgatggtgatggtggtgatggtgatgatggtggtgatggtgatggtggtgatggtgatgatggtggtgatggtgatggtggtgatgatgatggtggtgatggtgatggtggtgatgatgatggtgataatgacaatggtgatgatgatgatggtgatatgatgatgatgatgatggtgttgataatgacagtggtgatgatgatgatggtgttaatgacaatggtgatgatgatggtgatggtggtgatggtgatgatggtggtgatggtgatggtggggtgatgatgatggtgatgataatgacaatggtgatgatgatggtgataatgatgatggtgatgatgatgatggtgttgataatgacaatggtgatgatgatgatggtgatgatggtatgatggtgatgatggtgatgatgttggtattggtgatgaagatgatgatggtgataatggtagtggtaaagatgacaatgatgatggtgatgatgatgataataatgatggcaagaatgatggtgatgataatcatggtcatggtcatggtaatagtggtgacatcatgtttgagaatagccaaaaatcagatctgataaatgagaaaattggagaaagagaatggcatttttgacccaaaagaaggtgacaataaattgaagggattgacttctttcctttcttgtgttcataaattaactctgagagcagttcccaaaggtggacagccataatatgtcaaacatggatacctatgggaatagactgcggtcttccagtaggctgaccaaccatccctgttcacctgaaactgaggaggtttctgggatgtgggactcccagttttaaaactgggacatctgggaaaaacaagatgaatttgtcatccttcctcccaaattgactttggggttacaaacaggatgtgtaagtccactgtggctatgttaataccattttcttgctttacaagtgaagactgttacatggaagaagttctttgtcagaatcttaagatgaattttgttgttgttcatacttattgtttgggagatttcacacaaataaatccagattcctgacttaaagaatgaaaatatctggcaactcacagaccacaagacagaaatcagcaaggcctattggaggctgcatccctgctagctttggatcaggcgtgggctggggtttacaataatttctacaaagtccatttcacctccttgctttgcctgcccaacctctgtaagcatttcaattaaaataatgtgtgtaattagcacagggtttggcacttgggaagtactcagagatatagccattttaatttatgatttctgcttagtagctctcagttcaagagtactgcagtcactcagcaataaaaatgaagcactgatgcttgctgcagcatggatgagacttgaaaacattatcctaagtaaaagaaaccagtcacaaaagaccacatgctgtatgattccatttatgtgagattacagaaggggtaaatccacagagacaaaaaggagcttagtggccgcccagggctgggagggactgggggcaactcacaactaaagtgtgcagagtttcttttgggggtgatgaaaatgttctgaagttgattgtagagatgactgcacaactctgagaatctactaaaaaccattgaattatatattttaaatgagtgagccaggctcagtggttcatgcctgtaatcccaacactttgggaggcggaggcgggcagatcacttgaacccaggagttcaagacctaggtaacatggcaaaacctctacaaaaaatttaaaaattagtaaggtgtagtgacacaaacctgtagttccagctactggggaggctgaggtaggaggatcacttgagcccaacaggttgggccgcagtgagccatgattacagcactgcactgcagcctgggtgacagagcaagaagaccctgtatcacacacacgcacacacacacagtgagtggattgtatagtatgtgcgttgtatctcaataaaactgttttctaaaagtgtgctgcaggctagcttggtttccagtacaaatgccacacttgctgatgagaaaagggctgaagagatgaagagaaaaacacaggaggttcccagagggaggagtgcaatagcccgtggttggaatgcagagtcaggagatgaatgctcagatctgggtcctgacactagacggtgcccccttcacacaactccccaggcctcctcagccttcaggcctcatttgtgcccttgtccctgcatgaacacacttccatcatcttccccacagatccatgtccagcatctccctcaataacactaagacaacaactgcagacatgtccccccagtgtccctgtgagatctggagtgggttgggttgtgtccctcaaagaggtatgtccaagtcttaacaccacgtacctgtaaatatgaccttgcttggaaatagggtctttgccgaagtgattaagtgaaggatcaagatgagatcatagtggattagggtgatctctaaatccaatggcaagtgtcctcataagagacagaaaaggaggaaacacagagagcactgtgggaagagggaggcagagattggagtgaggttgctgcaagccaaggatcaccaaagattcctgcaaccaccagcagctggaagaggcaaggaagaaacctccccggggtcttcagagtgagcgtgaccccaccaacaccttgatcgtggacctccagccgcagaaccttgagagaataaacttctgttactcaagccatcaagtctgtggtcatgcgttatagcagccacgggaaactaatctaaaattggtattattttcccgtttttattttttaagtttttattttttgagatggagtctcactctgtcaccgaggctggagtgcagtggcacgatctcgactcactgcaacctccacctcttaagttcaagtgatttttgtgcctctgcctccccagtagctgggattataggtgtgcaccaccatgcccggctaatttttttttttttttttttgtatttttagtagagatggggtttcaccatgttggtcaggctgatctcaaactcctgacctcaagtgatccacctgcctcccagagtgctgggattacaggcatgagccaccacgcccagcttatttcccattttttgttttttttgttttgttttattttgttttattggagatagagtctcactctgtcaccatgctggagtgcagtggtgcgatctcggctcactgcaagctccacctctcgggttcaagtgattctcctgcctcagcctcccaagtagctgggactacaggtgtgtgccaccatgtctggctaattttttgtattttagtagagatggggtttcactgtgttgcccaggctggtctcgaactcctgagctcaggtatttcctgtttttaaagggaaggaagttcatatggtttagatgtttgtcccctccaaatctcatgctgcaatgtgatccccagcattggaggtggggcctgatgggaagtatttgggtcatggggaccgatccctcatgaatgtcttgatatccttctggtggtaatgagttcatgcaagacctggttgttaaagagtctgagacgtccgcttctctctcttgctccctctctcgccatgtgatgccaaccttcctttgccttcctccctgaataaaagctttctgaggcttccccagaggcagatgccagcactgtgcttcttgtacagcctgcagaaccatgaaccaattaaacctcttgtctttataagttactcagcctcagataatcctttatggcaatgcaaagtaaactaaaagagaagcggaggcacagaacggttaagtaatttgccaaggacacacaactcagaagcagcaggctgtggttggaatccagcgaactggcttccaagtgtgtgctgttcacctgtgctgcaccagctgggccagtgggcagagactgaggagagttttcgcaagtgtcctaaagcagggggcaggaaatgtttgtgtcttctgatgcccgggtctcttcttatcattgtagcgatctctcactgacttcagagaatgctttcttgaatttgccagaaaaaccatggcgtcgacgcaccagttcacttccccttaatcacttcaaagaaagagacaagatcctctttttctttccccagaggcttttatttgtccaatatgtcagtaacaccacgtgggacaagggatttcaggaccggattaccgcttgtgcttctcaaaattaaatctgcaaagctgggctgagacacaggaaactggaaaatgtctccactaatttgcaaaaggtttgaattaatccaagagatcaacccagggccgcaagggaggcccctggctgctgctgtctgggcatacccatttgatgtggacctcacgttctggcggatactcccagactcctcagcagacatgctcgttaacaattgaggaggtaacgaaacctcggctgaggaacttggctcaccgagagcagagaaaaactggccagagagcagcggcaagtcacatgctcagctgacagcatcacacacgtccatttggggccccaaaaatctcagtattcggacactgtatttgctgggatagacaacgggcagatttttaaaaatccatttttacagggaaatttgggaggagagagaagtacatctaattatatgtgttttgatcatttaaattgttgataatataaaacatgttattgttttgtttgctacgtcaagctgcttccaactgctctcgttttctttagattttcacttattttatttttattttttggttgatgataagccagaatgcctccttttcatcctattatctggttcttttcaaattttccaacataaagattaagtatgatgttacagtaatggctcgatgaacttgagccaaaaaaaagcaaggtctaaatataatattagaaaatggatttgagcccaaacctacaatagaaattaattgaaatctgaaatggtagataaattaaaatggtcaatatcattagtcatgggggaactgcaaattaaagccacaatgaaatatcgcctcccatgcacgacaaaagctaagatggaaacagtggccaataccaagtgttggtgtggatgtggggaactggaacctgcatgcgctggtggtgggaatgcagtagggtgacaaagagttgttggaaaacaatttgccagtttcttaataggtgaaatgtatgcttgtcatacaacccggaaattctgctctcaggaagctaaacatttgtccacatggagataggaagggaaatgttatcatgcaacattattcataatctccaaaacccaaaatcaatccatgtgtcctttaactggggaaagaataaacaaatttgtgggtagccaaagaataaaacatgatttggcaatcaaatagaacaataagtaaaaataaatcaaatacatgaaaaactatttggccataaagaaaccactgggatgaagtaagtgaagcgtttaaaaattacatattgtagaattccatttagatgaactttctaaaaaaggcaaaactatagggacagaaagcaggatcagtgatcgctgggggctggattttgaagcacatattaattgcaaatagcacaagggactttctgcataacggtgttccaaaactggattgtggtacaggctacacaattgtataaaattactaaactccatggcactatacgcttaaattgttaagttttatggcatgtatatttcccctcagtagggctctggaggtgttgacaatatgagaggagtaaagtccgttttcctctggtcaggtgtgtgagctgcagcttgttctttgttcagaaaagtccgcgacaggtaagatgtttgctgggacgcgttgtgctgccagtctctgccacaagagggcggtgccatctattatttaagtggcaggtgctgggctttcaacctgtggttagggtcaagtaggattcatggggtttgggggcgaacagcgttgaaagggagaatgagtcctctgtgctgagagctgcagtggaactaatggggcactgagattgtgaacctcctggccttcactgaaacagatcagaggcgaccctgaggggggactcctggccgcactggagaaagcctgggaaactagatgtggttgtgcccaagccaccgtctgtggagggtctgggtggactatggcgctgtggcttttcagaaccagtacggcctctctcctccagagccctctctcacggccttgccacagccagggatgggcaccacccaggctgggccaactgggtctttctgattcttgactggcgatgcaaggacagaacagaagccacctggcatcccctcgccagcatcttcctaccaagacgtggagaagccctcactgcccaggcccagtcatggcacctgaccgccaattctgtggggcacccgagatccttccagcacattcttctctcgcttgagttatccagatttcgtttctatggtcacacccccaaatcctcacttgatgaaagctttctatgattttatgggcaccaagaaaaccagcctccaaattctctctcctgatagcctatggatgttgactcaagccaccattgctagctcatccctctcttggaagtgtttctctctacctgtggttcctttgagatgccagtgccccagcaggggccccctttgggctcagtccatcagcgttggatgggagtgtgtttagctcagtccatcagcgttggatgagtgtgtttactggagtccatcggcgtgggatatgaatgtgtttactagagtccatcggctttggatgtgagtgtgtctactggagtccatcagtgctggatgtgagtgtgtttactggagtctatcagtgctggatgtgagtgtgtttactggagtccatcagtgctggatgtgagtgtgtttactggagtccatcggctttggatgtgagtgtgtttactggagtccatcagtgttggatgagtgtgtttcctggagtccatcagcattggatatgagtgtttagctcagttcatcagcattggatgagtgtgtttactggaacctatcagcattggatgtgagtgtgtttagctcagtccatcagtattggatgagtgtgtttactggagtccatcagcattggatatgagtgtgtttactggagtccatcagtgttggatgtgagtgtgtttactggagtccgtcagcgttggatttgagtgtgtttactagatcccatcaactttcaatatgagtgtgttcactggagtccatcagcgttggatgtgagtgtgttcactagatcccatcagtgttggatgtgagtgtgtttactggagtccatcagcgttggatgtgagtgtgtttactagatcccatcagtgttggatgtgagtgtgttcactagatcccatcagtgttggatgtgagtgtgtttactggagtccatcagcgctggatgtgagtgtgtttactggagtccatcagcgctggatgtgagtgtgtttactggagtccatcagcattggatatgagtgtgtttactggagtccatcagcgttggatgagtgtgtttactggagtccatcagcgctggatgtgagtgtgtttagctcagtccatcagcgttggatgagtgtgtttactggagtccatcggcgttggatgtgagtgtgtttagctcagtccatcagcgttggattagtgtgtttactagagtccatcagcattggatatgagtgtgtttaccagagtccatcagcattggatgagtgtgtttactggagtccatcggcattggatgtgagtgtgtttagctcagtccatcagcattggatgaatgtgtttactggagtccatcagtgttggatgtgtgtttactggagtccatcagtgttggatgtgtgtttactggagtccatcggcgttggatgtgagtgtgtttactggagtccatcagcattggatgtgagtgtgtttactggagtccatcagcgttggatgtgagtgtgtttactggagtgcatcagcgttggatgtgagtgtgtttactagatcccatcagcgttggatgtgagtgtgtttactagatcccatcagtgttggatgtgagtgtgtttactggagtccatcagcgttggatgtgagtgtgtttactggagtccatcagcgttggatgtgtgtttactagatcccatcagcgttggatgtgagtgtgtttactagatcccatcagtgttggatgtgagtgtgtttactggagcccatcagcattggatgtgagtgtgtttactagagtccatcagcgttggatgtgagtgtgtttactagatcccatcagcattggatatgagtgtgtttactagatcccatcagcattggatgagtgtgtttactagcccctatcagcgttggatgtgagtttactagagtccatcagcattggatatgagtgtgcttactagatcccatcaatgttggatatgagtgtgtttactggggtccatcagcgtttgatgtgagtgtgtttactagatcccatcagcattggatgtgagtgtgtttactagagtccatgagcgttggatgtgagtgtgtttaccagatgccatcaacgttaaatatgagtgtgtttactggagtccatcagcgttggatgtgagtgtgtttgctagatcccatcagtgttggatgtgagtgtgttcactagatcccatcagcgttggatgtgagtgtgtttactggagtccattagcattggaagtgagtgtgtttactggagtccatcggcatttgatgtgagtgtgtttactagatcccatcagcattggatgtgagtgtgtttactggagtccattagcgttggatgtgagtgtgtttagctcagtccatcagcattggatgagtgtgtttactggagtccattggcgttggatgtgagtgtgtttagctcagtccatcagcgttggatgagtgtgtttactagagtccatcagcattggatgtgagtgtgtttactggagtccatcagcatttgatgtgagtgtgtttactagatcccatcagcattggatgtgagtgtgtttactggagtccattagcgttggatgtgagtgtgtttaccagatgccatcaacgttaaatatgagtgtgtttactggagtccatcagcgttggatgtgagtgtgtttactagatcccatcagtgttggatgtgggtgtgtttactggagtccatcagcgttggatatgagtgtgtttactggagtccattagcattggaagtgagtgtgtttactggagtccatcagcattggatatgagcgtgtttactggagtccatcagcgttggatgagtgtgtttactagatcccatcagtgttggatgtgagtgtgtttactggagtccatcagcgttggatatgagtgtgtttactggagtccatcagcattggatatgagtgtgtttactggagtctgtcagcgttggatgagtgtgtttactggagtccatcagcattggatgagtgtgtttactggagtccatcagcactggatgtgagtgtgtttagctcagtccatcagcgttggatgagtgtgtttactggagtccatcggcgttggatgtgagtgtgtttactggagtccatcagcattggatgtgagtgtgtttagctcagtccatcagcgttggatgagtgtgtttactggagtccattggcgttggatgtgagtgtgtttagctcagtccatcagcgttggatgagtgtgtttactagagtccatcagcattggatgtgagtgtgtttactggagtccatcagcattggatgagtgtgtttactggagtccatcagcattggatatgggtgtgtttactggagtccatcagcattggatgagtgtgtttactggagtccatcagcgtaggatgtgagtgtgtttagctcagtccatcagcattggataagtatgtttactggagtccatcagcattggatgtcagtgtgtttattggagtccatcagcattgtatgtgagtgtgtttactggagaactccatcgtgtccaggtgattgccagcctggctctcgtggtgatttatcagcagctctccagctagctcccacaacagactactgatggaatttcagggattccacacagccaaagtgtattaatcacactcatgcaaagtgcggtgcaggtcagcctggcttcccctccagccagtgactcagggatccaactcacactatcctgtgatactgccacccttgattgtgccaccagggagggaggaagcagagagctgacacactggttcttctctgccttagcttggaagggacacacatcatttgcactcgtattttattggctgcaaaggatctgggacatagacgtttccctgtggctcaggacagagaagaggtccaggtgtggatgcacaacagaaatgcctctcacacagataccacaggccactttcacctctttcataatactgctggagcaggctctgcccttgggactgactttgaaaatacccttgatttatagcaataatgtgtttatacccaagtgatgcaaaatattgcaaacagtaaagaggttatcactttggagaagtatgtatttctcaactgcctcctttcttggctaggttgaaaaaaaatgccatttctcaggcaagttggtgccacttagcccatgtgccaccccaaaggacggcctgtttaataactcatttatagcatgaggcattccaaagatggtgcctgcttaaattgaattgctttcttttttaaatgcacgttttgaaatggattctctatcttgtattagaagcaaattgacagataagtaaagtttgtttcctgtaccccagcttgcactatgaatgaattgaaagtaaatgaggagggagttgggtttccctgcagtgacagcccagaattattggtctgttactgcaagccagcagagctgttagctatgtcctcagggagggaggaaaatttgctcagctaccatttgagacgagttgcatctccccaggattgatctgttaagtggtttactattgtgagtctatgttcctccagtggtaacctctggcagaaactcagagtgcagtagggaagaggaatgaggcttgtttttaatgccatgtgactaatgcagttaacacagttctccacagtctagaagccacatgcctggacccttgtaggtcattttgacaaggatgactgtcctttgtattctgactgctatattcttggggtttccaggtaccccaagaagacccatgaacacctcatgtaagagtctcattaaaaggaggccattgctattgtaagacttttaatatggataaagttttatttttaaaaaaaggtgggggaagcatggcatggtggctcacatctgtaatcccagcactttgggaggctgaggtgggaggattgcttgaggccaggagttggagaccagcctgggcaacatagtgagaccccatctctaccaaaaagaattattaataatatcagggcaaggatagtgcatgcctgcagtcccagctactcgggaggctgaaatgggaagattgtttgagcctaggggttacaggctgcagtgagcagtgaacttttttgccactgcactccagcctgggcaacacagcaagaccctgtctcaaaaaaaaagtcattgctggcccacattcatcaggagattagggagtcatcatggtcactcatagggcacctgagaaattgcagagccaatctcatgtgttacttgaaatgtcccatttacatggatgcaaatgaggtaaggctcaaattccaccaactggagtggtgtgggctccaacgaatcagaacagaccagagtcataacactgaccaatcagaagggggtcagagggtccacgtagaccacagagcagcagcatgggtataaatctccacccctcagatggggactgcagattcaaaccatgacttgctgtcctgagcctcgcccagatttctaaatccaccattccatcagggagtaagaaacaaaatttagccccatccttcttggggtttctacccacttcacagttttttggggtaacaactcctggatctcctgttgcccaagcccaaggctgcagcttgaagattttgtttcctggtcttgacacacaggctgccctgagctatccatcattcctggattgcagagtctcttcacatctgcagttgtctgcagcccaagcacagggccctggcctcatctccaaggctggctcttcagacaacgactccatccagggtcctgatggtgctcctgcaggaagcaggccaagatcctgctgcttctttctaattcaaggccttcgtcttaaagcgccgtgccctcaaattgccttctttaaaatgcttttagaactcaaataggaaagatgtgcaaatggtttctccttttctttcatgctctatatgttcattaagcaactactatgcccagtcactgttccaggcagtgggggaggaacagcgactgagagacacaacatctcttcatggagattccctttaagagggagacagagaaggcctcaaagctgaaataaaacaatgtctcctaggtgatcacagctagggagaccatagcagggaatgggaatggggggtgaaggaaggtgagggtggagccatgtggatatctggggcaacagcactccaggcagaaggaacagcatatgcaaagactgccatgtttaagatatagcaacaagatgctgtggctggaaaacatgatggagtggaggagaagcagggaggaaaccaaggggtccaattccacagaactttggcttcactctgactcagatgaaaaccagcgggacgtttgagcagagcagcagcctggtctcattgaagttttaaagggtttttaactctattttcagctccatgtgactaatgcagttagcacccttctccacagtccagaagtcacatgcctggacccttgcaggtcatttcgacaaggatgactctcctttgtgttctgacctctctatccttagggttttcaggtaccccaaggctggccctggctgctgtgtgcagagtaaactctcttgaaataggatctagccacataactagataatgagagaacccttaccccatcctcgtctgcacatcaaagggatttcttgttggctgtggggcggggtcggtgccaggagcagagctgcacagagcacctgcaaggaagctttccccttcctccgggatgggaagtgggacacgtcagccccacaacatcccattgatctgtgtttacaaaattggaagagacgcaggacccaacaaagaactcctgtgctaataaagggtcagcgatgagggtcactcattaagatgcaactcgcaaggcagccgataagctataattaatgagacaccatccaagaacgtttacagctcggaacacagagttctcggagccacaaggagcaggattcacagaagacagaggacaatgcctccacgtgcctataagtggagcgtgctccgggaaacgggcccaggacaggaggcctgcctggtggccagcatggccacacttcccagcccctgacccgggtaaagcccttctggagcccccattgctgtctggaatgaccacaaaaataatggcagaggagtggatttcatagcatggagaaaagtgctcaggccaatttggaggaaggagattcataaatccacgggattattctaactttgtcagttcaccagagttaaagaaagataattcgccttggggaaaagtctatgtaattacctacttttaaaaaggacctgtcataatgcactcctaggtgtaaacccaagagaaatgaaacctacatctacacaaagacttgtacttaaatgttcgtagcagcattactcgtaatagccaaaaagtgggaacaacccaaatgtccatcaattgagaaagaaatatacaaaatgtagtctatccatataatagaatattatcaggccattaaaaggaaggaaggaccaatccatgctaccacgtggacgaaccttgaaaatatgatgaaagaagccaggcacaaagggccacatgttgtatgattccctttaaataaaatgtccagaataggtaagtccatagaggcagaaagccaattagtggttgctgggggctgggaggagggggggatgggagtgcctgctaatgggattagagtcgccttctggcataagggaggtgttctgaagctagattaagtgagagtgtactggttagtatgctttaaatgtgtgcatcgtatggtgtttgaactaaatctcaataaagctattttttaaaggagctttcctgagatatttagtgtatgcatttgcattttctgagttgagttacaatatatgagggatattggtgtcagatattgtagtgggtcagagcatgagctttagggttccatcggcctgggctccatccctggctcccctcctgacctccatacttagtagctgccagttcttgagctagttcattacacttcctgtaaatcttccatttcctaacctgtgaagtgggggagaatgtaagtgccggctcattgggctgttgaaactagataaatcagtgcatgcagaaatgcctggaacagcacctggtacttgaaaagagctcaaaatcatggtgaggtgcgaggtggcccatgttagggttggtatttttactgctataatggtgctgattggatcaattcaccatcagctcagaggggctgacacaggaaggggagagcacactggggggcttggctgtccggaggccagaagggcgggaatccaagccctctgtgcctcagtttcccctcctgtggtgacaccagccctttctactctgctgtgttgacaccagccctttctactctgctgtgttgaatgtcaaatgtggcaatgatttatgtgaaaattctttgcaaagaataaagagacattgttgcaggttgacttttgttcccccaaaagatatgctgaagtcctaatcctcagtacctgtgaatctgaccttctttggaaatagggtctttgcagataccattgggttaagatgaggtcattaggtggctgctaatccaatgactggtgtccctataggtgggagatttggatagagccacggggagagcgttccacggtggcagaggcagagattgcagcgtcacatacacaagacccagaattgcagggttgcaggcaaacccctgatgctaggaagaggcagggaaggatcctgccctgcagcctcagagggagcacggccctgctcacaacttgatttcaaagttctggcctccagaacagtgagagaataaatttcagtcgttgtatgccatcccgtttgctgtacttcattacagcagccttagaaaactaacagaggcatacacatcaattactgttattatcatgactatgtatacaatagtgcattgcttcctgcctaacaacatcgtagatgcccaataactctgagccgctctgatgattgatggctcctgcaggatctccgagctaactaggaagctcttgtcactcagcgccacacgcaccctgctgtactctgctacagaatgctgggctgagatgctgcctggttttagacatggatcttaattggtacactgttgcactgtgctaagatttctagaaggaattgcaaagtcaagacaaacagaggtgacagagaaggcgtaactaagaacagcctccctatggatgggcctgccggtgtattgatgaagaaagtcttttctcttgctccctgtaaatgttcaggagagagagcttcctgagaagcctcctctctcctctgtcccctgccctgccacctcggggtctccctgctcctaccgaatctaaggcagtcgcagaggaaatgaggggaattgttagtgttgtcatcagcaacgcattttactttcggcatctcctcaagcattttttaatcaattctaccaaaacatcatccaggactcttggggttcattaggaagtgggagccgggaggcagcgtggtcaggtaacgtgtccagcctggtctgctccgtcagggctgcccttcgcaagccggcggtaacagggttctcttttctcccctgatgagaggagttgttataccgcactgtgcggcacagccggggtctgcacttggcctgcttagagggaaaattaccttactgggtggaattgcaagaggcctcccctgcaatgcctctgtgtttgtgtgcgtgtgtgtaatgtattcttaatcacctgattatgtaaatcactggttgcacctaacagagtcagcttgttaatcagatggctcttctctggactactctgccctgaatccagaacccacacttcaagcgccctcactaatcagcacgccagtcggctgctgggcggcccgtgcatcattttaactagtatgccttgaattgggaaaatgaagcgcccttttggagtaatttttctattgctgcaaattaggctgagttgtcagtctctgctttctccttcctcttataacagccttgctgtcagcctggctccacaggggcacccaccaccagcagccacagagaacagtgggattaccaccactccctgccattcccaaactgcaagccaccatctagcatcattgccagggacttgacttctcatgggtacaaaaccggaatttgttgtaacgcattccagtataaccagtagtagtctttgtccaccatctcaagcataaaaagaaatatctacataagttagccttaagtttggctgagaataaccgaaaaccttcaaaacctctaggtgaaacataaaataagtttatttcacatacataagtaaggccatgaccactattagtcatcagagatttaggcttctcctatcttaccttctcaccatcagtaaatggctttttgtttgtttgtttgttttttgagaaggagtctcgctctgtcgctcaggctggagtgcagtggcaggatctcagctcactgcaacctctgcctcccgggcacaagcgattctcctccatcaccctccctagtagctgggattacaggcgtgtgccaccacacccggctaatttttatatttttagtagagacagggtttcaccatgttggccaggctggtctcgaactcctgacctcaagtgatctgtccacctcggcctcccaaagtgctgggattacagacgtgagccactgtgcccagcctagcaaatggcttttatgtccaagtttgcctcatgatccaaggtgactgctggtgttccagccattatatctatattcccagtagcaggaagggaaaaaggacgaaagaaatgccccacttactgagtttcgttctcattaaggagattttctaaagtactgcatatttccgtttacttttggactagaccggttctcaaccttcaacaacatcagaatcactggaggaattggtaaagcactggtaaatgtgccccaccaaccttcagagtttctgattcagtaggtctggggtagagcccaaaaatttgcatttctaacaagtccccagaggatgctgattctgctggcccaggcaccacactttgagaaccactgtgtttgaacccagtcacatggtcacagccagctgcaagggaggctgagaagtttagtttctcctcccaacccacctcccaaagcatcatggttcagtaactgaagaaaaaaagagagtggatattgagaggcagcctcttttgccacaatatcttgctctatttcctccagatctaatcagtttattttcctagcccctgccttttgggggctacctctgggattcaaggtctttgtgttgctgcacagacaccaggcaggcatcttctcctgcgtcttctccaaaatctcttcctagaaaccagacgtgtgtttcctttcagaacccaaagaccactcctcctctctctttacctcccaagagaaaaaaattggttctttctttctggaaggatgggtgaagggagcgcccccctcctccgtgattttggccaaacattttgtcatacttgtgaactccctcacctctctggaatttgggaggcattttgttttctgtccttctcctccttcccccaaagatacatacagaactggtttccctgcttgaataggaggaagaaaggggaagccacagagagggaaaacgtaagttaatatctcaatattatcccagcaaacagatttcatcattgtttggtagctagaaaagctctttttctttacttcaggaagggaggccaggttttataagcattgggtaatgagatgtgatgagattggatgttgcaatgaggtgatgcagggaggcatgatctgactggatcctgccatggggtgacaccggggctcaatctgattggatcctgccatggggtgatgccagggctcgatctgattggatcctggaccgtattatgcagtgtcctgttcttaattcagttcccacacctcagtttgagcactcagggttcctctgtgtctgcatgtgtggctcatctaggcatgctcaggctatgtgaccttcaacctgggggtccatggcaagtgaaaaacaactcacaactctgttacagaaaaatggaacctattggtctggtgcagctacagggagctcaaaagcaacttggtgaatcaggacattcaaatagtgtcacagtttgtgggctctgtttcctgggatgaagttggatggggttggggtggtggagtggccacctctgtaccaggcactgacctgggattttttgtaggtcctcttgcctacaaccctagaggaaactgggattatccccatttcacagatgaggaaagcaaagctccaacaaggcaggagcagggacgcagctcccatggaggccacaaggcaggagcagggacgcagctcccatggaggcctcaaggcaggagcagggacgcagctcccatggaggccacaaggcaggagcagggacgcagctcccatggaggccacaaggcaggagcagggacgcagctcccatggaggccacaaggcaggagcagggacgcagctcccatggaggccacaaggcaggagcagggacgcagctcccatggaggccacaaggcaggcacctttttagtttgaactcatgaagccacgatggtcgctgccctctgaatgctgagagctggaccctcttttctgggttccaatttcaaaactggacctttcttccccctagaacctgccacatgagctatctccccagaacctgccacgtgagcggtgtgccttcccactgtctccagcgtcctcctaacctgctgggatgtttccccaaccaactgcgcttccgctgagatagaggaagacatgatctttttttttttcctgttcatatacttttcctttggagcaggcagtatggtaatgttatctgctatggttaagtccagaaaggccagttttaggggcctcttgctattcaagtgtttatagtcaccttccttgagctaaaagcacatacagggaaccggatgctttcagtaacacaaaaatcatcacaaatgtaaatgatcaaccacttataaagttctccccaattcaaatctcccttcctatttaacatgagcccctctggtttagcgcaagattcctcataggtccaaacatgcaatgcaaattatcaagatgcaaatctatgccaagttgagcaaagggtgcaggcttttatggaggaagccatcatgctgatgttgaagtcccactggaagcatggtggatcagaggctgtaaccactgaagaggagaaagcaataaggacaggagttagcttctgcaaaaggaagatgactccatggctctaccagagagaatggcctgaaacttgaagactaaaagaggcctttggaggaaagagggcccttcctgttggaaaaatgatcttgttcagggatcagcaaagtttttccataaagggctagatagtaaatattttcagttttgcaggacacagtctctgttgcatattgtttttcttttctttcttttttttaaaagccttgagaatgtaaaaatcattcttggctaacaaatttacataaaaacttgccatggacaggaattggctcctgtgtcttattcatcagtctgcaaaatctaatgggatgtgaaagacgtctgtgaagccattacagacacctgctctccccacagaaattcaatccatctttctcttcattctgagaagcagcacatggttgccatctctgttctcagcatctactttgaattagtgaatagtagatttccctattagttgccttcctcaaggaaaatgtgaaacttttggtctgcagtcagctccgcaagcccccagaggagaccaagcaagacaccctgagctctgtggacgtctgtacgtgtggagggggagcattcgcccagttattcctccctcagagacaggtggcagggaagaaaatccatggatttgggaggcactcacaggaatggactgcttctctggctacagatggaaggaaggacacttggattaagcgtccttaagtgtccttggatagatgattgaagacggattggatagatagatttaagagtcagcgatgtcagaatgggtctggagagaaatgaaaaatgtccatgtcccactgtccagtggcttctccagtccagggtgagacaggccctcagggccactcgtccactcccacaacccccactggtgggcttgttttctagagggttgtcttgtgcaaagagtaagaaccaggggctggacctctcacttggggttcatatctcagctccaccgcgctgctggctttgtgaatttgagtgagttagttggcattcttgacgtcgtctcttcacccttcaaatcagggtgagaacagagtctccctccaagggttcagggagctgggatacacgaagcgcttaaagagaatctggcacgtaatgcatgctgctgtcgacaccaaaggtcggctccacctcagagaaaacacgcttgagagaggtggcaggtgtggtggataaaagaaatgaaaggaagatggtgtcactgtccagctgtgtggccctgggcaagtcattcctcctcgtccaggtgggctgaggaacccctttcctctctgattctggtgctcaaaaatgggatgacttataacttgctttaaaatagccagttctataggagaagtttcttcccagaaattaaacttgggaatgagaatgtaaggtctgggcacaaccactgggagttcctgcagggtctcctttgagatgtgcggccaactagtttaacctgcacggctagaaacgcctcttaagtccactttgatccacttagaagggccaaattttcatagcaaagtgtaaggcaggctaattcctgctttctctatgggcttcccacttgttgtttgtggttcccagacactttatgcagtcactttcccagcatatagttcaaggatggggatcagcttcctcaaagaagaaaacggcttgccaagccccatttgcccatgtgcccacgaccttggcatcgtggactggcccaaagccaggccttagggctctcaggtctctgcagtccacaagccctgaacctccacggccaccgtgagccaggcacggtaattacagtaatagggaagtaaatggtaccctacccaccaaaatatctaaaataaagaggctggtaaaacagcaggtttcaccagagaaacaagatgaggagggaggtaggtaggtaggtagatagacagatagacagataggagacagaaagaagatagattagatagcgagaggtaagatagataatacatagatgacagactagatagatgacagattagatagatgatagaagatagattggatagatgatagacacataaatagatagacagatgattgataggctagatagatagacagatatagctatgtgtcatggacaaactgtcatgaagggcagcctggatctttggggcacaaactgaagtgctgtccacaggcaagatttcttcctgttcagggaagcctcagctctgcttctaaatgcctttcaaaccaattggatcaggcccacccagattatgcaggataacttcctttataaataaagtcagctgattatgagcattagtcacatctacaaaatcccatcacagcaacagctaggttaatgtttagttgaccagctggaaccatcacctggccaagggatacgtaatcatgggggtttgccagggtctcagggaaggacggcctcacacgctgctgctcagagtgtatgatgacaactgcttggaagcaccaaatagcaggatcaaagaggaaaatgtgtaccctctcaacccagcaatttcacttctgggatgagaagatgctaaaaaaaaaaaaaaaccctggatacatatgcacatggagggattcagttatttgcaaaggcaaagaatttgaaacactgtaagtttccatgggtaagagaatggaaaagtaaaatatagaaaaggcacacaatggaatttagtcagttttgagacaaatgaattcaatcagtatgtaaatatggatctaaataggaataaatgctccagctatacaaacagggatagatcataaaaacataatgttgagtgttttgaaaaacaaaacacaggttgatgaaagtacaatatgatatatttacataaactatgtaaaacgtgcttttgtataaaacataaaagcaaaagacaataccatattttctttacataaatatggatatttggttaaagtataagaatcacaaactggaaagatacatgccaaatcctgacagtgattgccactagggagggaaattgaggatcaggactggaaaaatgacagaggagattttaaagttatcagccatgttttctcttttgtaaaagaaaaaaaatctgaaaagaatacaaaaagtgctaacataaatacattttaaatgtgtttggatgtctgctatgtgcttgacttgtttttattttattttctattcctccccctgcacagccccaattttcagagagaaagagagattgaagtgggtgaatttggcctccctccagccaccaattgccttatacgagacacttcacatttatgtttaatagctgccctttgagtcaacttggactttgttccaaaccctgacaggcaatccataaacattatctgatttaatcttcacaacaaccctaattattctgggagttcacagtcaaggaatctgatgcttggagcatttaaataatagcaagaaaagggcagagccaggatttaaggcaattctctctcaggtccttgctcttgacctgccgagaagttgtggtcaagaacatatactcctgccctgggctcgacattcaaatgtggctgaatcatgtatgggctatgtccccagacaagtcagtcactcagctccatgcctcagtttccccatccatagactaaggataacacaactacccgcttcatgggtttggggtagcggtgagaatagtagcaacacctagcacatgccaagagctcctcaaatgtgacttggctttttttttcctttttattaactactacctcttcttgactcccagccacatggattgagagaggttgtttgctgctctctgggacattttagattaagctcaccctttctccagaccctcatgaaatttaaacccccaaagttgctttactaggcagacgtctggtctctgagccacgaatgtgtctgttcttagtcccatgtccagggtcagtcagctgtgggtagagatagatcattggcttgtctgaggccacgcgggagcccagaatcgaaagccggatctgagcctgatgtggcctttccatggctccagccccatcccacactctttcctttcttttttatagagatataattctcatgccataaaatgtactgttttaaaatatacaggtcagtggttcttagtatttgcaaggttatgaaccatcatccctatctaatttcagaacacgtgcatcaccacaaaaggagacgtcgtacccattaccagtcacttcccttccccatccctgcagcgcctgaccaccactaatgccgttctgtctgcggatttgcctggtgtggacatttcgtatgagtaggaccatgtaatatggggcctttgtgttggccttgtttcacctcacacaacatgttcatgatccatccatgttgttgcatgcatgcattcctttttgtggctgaatagtcttccgttgtgtggatgtaatacatttcctcactcttttctactctgcaggagaacccttgggggatattcgaggtggggcgttttacacccattcctgggacaaatcccccatctctgtggccagtgagtcaaactcccctaacatatttcagtctattcacacttccgagtctttttaacacttccgtgttaaggaacatggatttacttctggaatgacttcatgaaattacttctatgtataggtacgtgtgcctgcatgtatgcgtgtgtgtatgtgtgtgtgcttgtgtttgtatatgtgcgagtgcctactctgtaggcctgccacatcaatatcatgcacacacaggcactcacacatacaggcacatgcacccacatacaggcacacccacccacatgcacgcacgcaggcactcacacaggcacacacacatacaggcacaagcacccacatgcacgcacacaggcacacacacctgcacgcacgcggacactcacacaggcacacacacatacaggcacatgcacccacacgcacgcacgcgggcactcacacaggcacacacgcatacacacaggcacacgcacccacacgcacgcacgcgggcactcacaggcacacacacatacaggcacaagcacccacacgcacgcacacaggcacacgcacccgcacgcacgcgggcactcacacaggcacacacacatgcgcacaggcacacgcacccacacgcatgcacgcaggcactcacacaggcacacacacatgcctgtgtgtgttccatgaagtcgttccagaagtaattccatgttcttatttatttaaaagttaaaaatatagttcacctagaaaatggccaaactaatttacatttatgagggtaaatcaaacaacaaaaatgtgttttctcagaagcctctggcttttttcaaatttgaaatgaccatgatttaaagaaccctaccttattgattattttcagcaaaacagaacagttctctgatttatgacggaggtgggtggagggcttcagagcaaggtaaaaggagagaaaaaacatttaataatacaaaaagcttccaagtcatagttatgcctttgtcgtgttctgaggccttgagacagtgttgataagcggtctctaacacctactggggtcggcaggaattgtacacctgtgtgctttcaggaagcaggctgccttctgtgatgctaaactcatcagagccggatggggccagaggaaaggcagctagcagtgtaagccttcttccgagcagtgctaagcagcagcataaagggaagcggcatccaccgccagccagccatgcacatgatgtgttcttcttggtcccgcgggggtttaggtgggtctcagaagacagaacaattgtatacacataaatagtgtgctaggcatattgctgtgaattggcctcaactaaaaaggtatttgagaggtgcaaccagatgcaaagaactctgtaggcctgccacatcaatatcatacacacaggcactcacacatacacacaggcacatgcacccatatgcacacaggcactcatacatatacacacaggaactcacactcatacatatacacacataagcactctcacatacacaaacacaggcactcacacatacacaggcacacacacaggcactcacacacacataggcacatgtacccatatgcacacactcacacatacacaaacaggcacacacacacacaggcacatgcacccatatgtaaacagacactcatacctatacacacaggctcgcacacacataggcactcgcacatacacaaacaggcacacgcacacacaggcactcacacatacacaaacaggcacacacacacaaataggcacatgtacccatgtgcacacagacacacatacacaaacacaggtgcacacacacacagacacaggcactcacacatacacaaatacaggcacacacaggcacatgtagccatacacgtaggcactcacacacacacaaacataggcgcacacacacacagaggcacaggtacccatatgcacacaggcactcacacatacacaaatgcaggcgcaaaaatacaggcgcacacacacacacaggcatatgcacccatatgcacacaggcactcacacatacccaaacacaggcacacacacacacacacacacacccaggcacatgtacccataaacacacaggcatacacacatacacatacaggcacacacacattcacaggcactcatacacaaacacaggcacacacatacacccaggcacatgtactcataagcacacaggcactcacacacacaggcacacacacattcacaggcacacacacattcacaggcactcacacaaacacaggcacacacacacacatacacacaggcacacgtacccataaacacacagccacacacacattcacaggcacacacacattcacagggactcatacacaaacacaggcacacacacacacacgggcacatgtacccgtaaacacacaggcactcacacacaggcacacacacattcacaggcgcacattcacaggcactcatacacaaacacaggcactcatacacaaacacacaggcacacacacacaggcacacatacccataaacacacaggcacccacacacacaggcacacacacattcacaggcattcatacacaaacacaggcacacacacacatacacacaggcacatgtacccataaacaggcacccacacacacaggcacacacacattcacaggcacacacattcacaggcactcatacacaaacacaggcacacacatacacacaggcacatgtacccataaacacgcaggcactcacacacacaggcacacacacatttttttctctctgccttcatgagacactgaatcttgcacttggacttcccagcctccagaactgtaagaaacaaatttctgctgtttagaagctacccagtctatgctattttcttatagcagcctgaatgaactaagacagtctaggattcaacagtcgaaaagatagatgacatagcccaacccctgctaatttgtaaaatgaggaaacaaagattccaagagatatgatatgtgatcaggattgcacaggaagttaatgggaaagcaaggagcggaatccaggagtccagactccagggcccaccacttcatagacaccaaactaccagtcagaagagtggttttaaatacagggaacttcctccatgtcacagccagtttattctggaggccaaagtttccttttatcatttgttatttctatgactattaattctctgctcctgaaattgatattggtcagtgaaaaatatatatgtccgaggcaggtggatcacgaggtcaggagatcgagaccatcctggctaacacggtgaaaccccatctctactaaaaatacaaaaaattagccgggcgtggtggccggtgcctgtagtccccgctactcgggaggctgaggcaggagaatggcgtgaacccgggaggcggagcttgcagtgagccgaggtcgcgccactgcactccagcctgggcgacagagcaagactccgtctcaaaatatatatagatacagatatagatagagatagagatagagatatatatacatacacatatacatatatgtccaacccatcttaattttggtggagtgcaatttagggacagggagtgttaggtagagtgtgtgaacatgtgtgtgtgtgcgcatgtgtgcgtgtagttgcaacagccgttagaaaactaatcacaatccatgagggaatgtactgctttaatgaagccattagccaaagaccattctgagagagaaaatgtaaagactgaactccaagcacattacctgtaatgaacctgaaaatagacctggggaatttctaaagtattcttagcctccataatagacattgtgcaagctgcctggattgcagcccagctccaggaatcccacggacccaggagaagacacagccgagggtggtaactgctggctgatgcaaaagcatcacagagaggccgaggctctacttaaaactcataactcttttagctgcgcccttgtttaatgcaaaaggtcatttttgtgtcaattgcttccctggagaaagaacggagaaaatctttttccacctcctgcttcacaccagagcagtgtttctggaaagggactttgtgagaaactggcatcattagatgtcccaaagccaaggccctttttcattttcatctgtccataaagaaaagaattataaaaaggcaatcaggtagtatcctacaaaatcaaacagaaggtattttcgtcatcacctggcagatcacaacatacatgagaggtgtgacactaatagttttgcgtgaagtcgtctgagcaggataaatcaaagtccccattgactatgatggaatgggctcccatggagcaacagaggaaggcactttgctttgctttagtcttcattttttaaaaaatgaaggtgccaagcacggtggcccatgcctgtaatcccagcacttcgggagactgaggcaggaggatcgcttcaagctaggagttcaagaccagcctggacaacatagcaagatcctgtctctacaagaaaagtaaaaaattaaaatgatctgggcatggtgacacttgcctatgttcccagcactttggtaggccaaggtgggaggatcacttgaggccaggagttcaagaccagcctgggcaacatagcgagaccccatatcaaaaaaaaagaaaaaagaataggaatggttgaagatgagggaaggggagatgaagggggaaaaaagatgtcaagaaaattgacagcatataagacattgtttggccctctgaacacaatcatatcccatgctataggcatttcaggtacatgagccaataaatttcccttatatataaagtaaaaaagaaaaagaaagtaatggttgaagacattcattccaccttatttgggagacacagcccattatttcctgcttttagtatccttgaaggtgatctggactttgcaaaaccttcttcagctcttcttttgttgctgggagcaatccaggatctagcccgtaaggatctgtgttagtttcctgatgctgcgatgacaaattaacacaaatgtatcatcctacacttctggaggacagaagtctgaagtgagtcttaaggggctaaagttaagatgttggcagggctgcactccttctggaagctctcagggaaaatctgttccttgccttctccagcttgcttctagagactgttcacatctcttggctcatggccatatcaccctgacctctgcctccactgcaacatctcctcctcctcctctgaccttcatggctccctcttataaggactttaggatgactggatccacctagataatccaggataattcttccatcttaagatcttaattcaatcacaattgcaatgtcccttttaccatgtaaggtaacattcacaaatcccggagattagagcatggatatcttttgcaggaggtgagaggaaagcattattcaacttactgtgcttgctcaaggtacccagggttagtttctgttgcttacaaccaaacctaactgatgtattacttccacttggtctctgcaataaagaaaaagaataaatactttttgattgttgttgaaaactagaaatatgatcataaataaactaaaagtaaactgttaaacattcttggtaaattgttccaaagaatagccctttattccaagtcctggtacagtatgtaaatggtacagtgtgtcttgtacaaacaaggacagcctggtgtttaccctgggagattccccctagaattgtccagttcccaacagaatggaatatctcccttgacccagtgtgtttgattctttttggcaggacactgaaattctgaacaccgccgtactcacaggaaagacagttgccatgcctatcaaggtggtctctgtggaggagaacagtgccgtgatggacatctcagagtcggtggagtgcaagtccacagacgaggacgttatcaaagtaagtcattccacagccagctggatggaaccggtgggaacttcacttggacatcccgtttgctagggacatttagactgaaatacatgacgttcaactatacagaggcttatgtgcaacacacttccagctgatccactcaacgtgtccattgccatctctttgttttcacatcatgccaacctggttagggtttttggttcattcctgtctttcttcctttatttgacaattaaaaattgtgtgtgtgcatatacctgtataatgcacaacatattattttaaaatacatatacattatggaatggctaaattgagctattaggccaatgcaaaagtaattatggttcttgccattacttttaaatggcagaatccacaattacttttgtaccaacctaataattaacatatgcataacctcacatctcacatacttatcttttttatgtgatgagaacttaatctactctcttagcaattttcaagaatatattattacactttaggaggctgaggtgggtggatcacctgaggtcaggagttctagactagcctggccaacatggtgaaaccccatctctactaaaaatacaaaaattagctgggtgtgatggtgcacacctgtaatcccagtacttgggagactgaggcaggagaatcacttgaacccatgaggcagaggttgcagtgagctgagatcgtgccactgcactccagcctgggtggcagagcgagactccatctcaaataatatatatatatgttattagtaactaaatgtagcatattataccaaaaaattgcttgaacatattccttctcctgtctaactgatattttgtatcttttgaccaatatctgcacaactgtccccttacccatcccctggtaactgccattctatctctgctcctatcagttcaacttcactagattccacatgtacgtgagatcgtgcagtgtttgtctttctgtgcctggcttacttcacttaacatgatgtcctgtaggttcgtccacgttctaacaaataataggatttctttatttttttaaggttgaacagtcttccattgtgtttatacaccacattctctttacccactcatcccttgatagaccatcagtggtgctttggactatgggtcaaactctgaatgcctactgtagctaagcaggtaacttcaataagtgaagtggtaaattggttctgcctattctagaagagcagccaagattctgctctttgtctttcccagcaaggaaattgctataaccagctgtggtcatgaggtagtgggatttcagtattttatgtctccaaaagaacggaaaatctagatttctggttaaaaaaagcaacaaccttgtttttcaaggttagcagcaaattctaattttttttaatgggcaaaaaaataaaaaacaaaatacatttgtgctgtgggttggccgatggggtaactgtttaaaagcacccttaaagagtaggggttggcaaaccatgagccatgggccaaacctagtcactgcctattttgtaaataaagttttattgggacatagccactcaaattcacttccattttgcctgtagctgctttgggggctaccacaggagaattgagtagttgacagaaaacatatggcttagaaagtctaaaatatccagcattttgctcttcccagaaacggcttgcctagagtaatgtgtgctctagagtcttaagttttttggaggaagaactgcaattcctggtgtttcccatcattagtcatgatgctacaccacaatgcttgcttaaagaataaggcgatgtgagggctttaccaagccagaaatgaagcattttgtctctctctgtatttttctgtaaaccctggaaacacatccaggaaaaaacaaatatcaaaaaaagcattcgggtagtgatttttgtttccctcaaatcaagtctgacagatagcaaccagccttctctctggtgtttaaaactccatgtctgagtagaagagaagtttacaaactgttgaggtggataaatggcatggaaaaacacttctctgcaaaccccacccccagaacaagcaatagaccaccatgctagactgtccactgggctcagcgccaccatcacacagcgacgtccacactcaaccatgacagcattccagtaggtggcagtaaacattccagcaacatccatatactatgacgattcttctgactgttggaggtagtatctcaagaaagggcttttttccctaatttacccggaagtgatatatgacctggtggtggccttcaatacagagtgctttaacagaaagaccacaaagcccatgggaggaagaggaaaagggggatgaagttctaaatcacactgtccaatggaaacacaatgtgagccacatatgaaattttaaattttctaatagccacattcaaaaaaagttttaagaaaagttgaatttaattgtaataatgcattgtgtttaacccattatattaaaactttaccatttctacatgtagtctatataaacattaataatgaaatattttacttttttttacactaagtctttgaaatctagtatgtgttttatactaacagcacactgaaatcgaaactagccccatttccagtgcttcatagccatgtgtggcttgtggctcccacagtggacagcacaggtccttgttggtcactggcctttgtcactgatttgcaagccccctaaaagccagaacacttgatgaatgtaacgtgttgataagacacctccagtactgataacttttctagaggtaaataacctttcagcctacaaaaaccaagagggaaacaacccaaaatttatcacagctgtatacatagcaatccttaactactcttaagacaattttgacaggaagtccattactaatatctccaggaattataatcagtatctttagggaaataaatgtattcaaacagaaaattgcctcctgaaatgaatccagagttgatacccctggctgttgacaaagcaatgtgaaatcttgagtcagcagaaactgggtgaggacatcagagcaggcaggctcagtgtacatgagcacagtccataggacccaggcttggctgtggccttgggtctgatgagatcaatgatattttcagtgctagttgggtacagctcagaatgccatggagagaagatggggagggaattgacatttaatcagtgcctagtctgcagcaggcccatgaggttttggatttaggcagttcagagttctgtcaagaattctgaaggctctgagattgcaccctagtgtaaactggcaaatcaaactgtcacagttttgtggatgctggcagaagacacaagaccccgaggtcagagacaaatgacagtcactgtatcagcatctttctgcaccagttgcctgggcttcagttcccactggcttatgcagaagaggccagtgacacttgcacatgtagtggatcgggtttcaggagaggaatgctggccttcgagaatgtgcatcttttatcatgggctgtatgtttgtgtcccaccctgaattcatatgtggaagcccttaacacccaatgcaatggtattagaggtagggcctttaggaggtaattaggcttcaatgagggtggagccccacgatggcagtagtactcttataagaagaggaaaagagaccagagcttgctgtctctctactatgtgaggatatagcaagaaggcagcagtccgcaagccaggagggctctcagtagaacccagcaattctggcatcctgatctcagacttcccagtcttcggaactgtgagaaataaatgtgtgtgtgttgtttaagccacctgacttacggtattctgttaaagcaggccaacctgacttaagacaggcaggaagcctgcctgacctccccaaagagacaatgcctttatcatactgggcctgaagctccagaagaaggcactgtctgtcttccaagactgttcactatataaaacactttgaaaagacctttcagaacaaaaatagtctatgctctgtttgtacaatgtgctgaaatgcaagcatatcatggagaatgtctcccgaagaattcctgatggctttgccacattcaagctgtgcagccttgagtgaatcatacagcgttccctccagtactcagtctccttcttagtaaagtgaggataagcatagttcctaattcaaaaggtcagcatgaggattaatcagttttataaatgcaacagagaacatgacctagtagccagcatatagtaagggcttaataactcagagtcaactctggtcatctcatgtaatcctctgattaggtagatcagggattaagactggaggcttccaagtatatttgtgtgatatgcacagtgttgcttaaaaatgtaagaattggatgcaactcacttcaaatgtacaattcagtgatttttagtaaattatactaagtttggcaaccatcaccatgatccgattttataacatttttgtcacagttaatccccattcccatccctggcccctggcagtcactaagctggtttctgtctctatagatttgcctgctgtgggcatttcccatgaatggcatcatacagtacatggtcttttgtgtctactttttccacttagcgttgttttcgaagctcatctacatggtagcatggggcagtagtttgtttcttttattgcggaatagtattccactgtatggatataccatattgtgttcatccattcactcagttgggttgtttccacttttcagatgtttcatccatttatgaatcatgctgcaatgaatattcacattcacgcctttgtgtggacatacattttcattcctcttgagtagatacagaggagtagaatggcttggtcatatggtaaccttacatttaatgtttgagaaactgccaaacttttttccaaagtggctataccattttgcattctcacgagtcatatctgagggtttcctctccagcttattgggaaaatccagcagatctggcagagctacagtgtgctcacctggcaacactgtggggtgccctttatttattttttcatttttccataagttattggcgtacaggtggtatttggttacatgagtaagttctttactggtgatttgtgaggtttttggtgcaaccatcacccgagcagtatacactgcaccatatttgtagtcttttatcccttgcctcccgcccccaaaattccccccaaggccccaaagtccattgtatcattctaatgcatttgcatcctcagagcttagctcccaccggcaccttctgatttatcacagttgccttatgtttggtccacttccattatctgcttggcccgtgtaagcacttgaatgtgtgtagatgggacagtacccaatgtgtaaatgtggaggctgagattcagcaggaggacttgggttttatgattttgcttcctcacttttcctttttctttccttcattctttccttctttgttttctttcttcctcttttcctcctcaatttcattcagccaacatttattaaccaactaccacatttaaggttctgtgattttggtaaggaaaaagcagatgaagaaggtgaacctctcaggactcacagccaaacagaagaggtaaacatgcgagactttattttgcataccaactcatttactactcataacatctgcattatcgctattattaattctgtcttatagtagaaaaaaactgaggctcagcaaatggaggccacctgcctgaggtcacgcaacttgtacatggcagagaagggattctaactagaaggccaaaagctcttgaccattaggctatatagtctctgtacattcaaattttgcttaacattttactttttatttggaatttcaaacttatctcaaaggttgcagtgactggacaaagtatactatataccctttactgaggttctactgttgtcaatatttacccatttgctttttcacagtttcagtctctctctctctttctctcttcccatcctctagatagacagatagacagataggcaggtagatggatagatggatggataggtggatatgtgaatagatgggtgggtggacagatggaggaagggagatagatagataagataggtgattaatagattattggtaggtaataggttagatagataagtgatagattagatagatggtagatttagatagatagaagatagatagatagatagatagatagatagatagatagatagataaatagatagatagatagatttgttgctgaaccacttcagagtaagttacatatatcaaggccttttaactctaactacttcagtgtatatttcctaagaataagaatattcttttacatacccacagtcatcaacttcagttaatttaatgttgatacaatatattatctaatccatattctgttttccaattttgtcagttggccaaccgtgtcttgtggaggagcatatttttctgcagtacaagatccaatccaggctcacatgcacatttaattgtcacgtactctagcctcctttaagctgaagcaagtccttagcattgccctgtcttttaacgcacagaatactcttgagaaatacagtcctttttttttaaatttttaaataaaatattcctcatttaagatttcctggtatttcttcatttagattcacatttgcattcccagcaaggataactatacaagtgacgatatacatacatattttgtttcatttatttttgtaggctttttaatcaccctgaaatactttggtgggtattttttctgattatataagtaatgtataaaatttgtctacaataataattgctccagaaaactctaagaaagaaagaactacctttactcccatcacccttagagaatcattgtaaacattttggtaatcatttcttacacacatatacccacatatacagataatttttaaagaataagatatcatacatactgtttttgttaaccacaaactgtcttattggcaaatctacatacatacacatacacgctcacacacatgtgtctacacaattcaacacacatgtataagggcttttcagtcctggtttgtcttacagaaatagagccatatccttatgcatttctgcctattccttctctcaccttacaatgcatcatgaatatcgctgccttggagcacttggaacatgaagccaggccagtgtgcggtgtaaaagtatgataagggctgaggagtcttgtctgcgatgtgcaggttaataggagtcataacatctgaatgggagagaaccctggatgtcggcctctttgttgattcacattcaagaggtgaaggagcagcacctagagaagggccaagggccatgacttgcccaacaataaccccaggaacaataataggaagaaaaacatgcaatatggacaagcgcttgcaatgcccaagtgtccatcttagaggatctcatctatggggtccaagctttaaaacatctttgacataaagctgtgtcttgcttgcagttgatgacatggcacagattacctggcagtggttttcttagtgtggtgtcatagatttagcaatatccagtccgtgtttttcacaggtcacatgacaatctattaaacacagatgtgccggccattttctaggtaccattctggtatgggggacacagcaattaaatagaacagaagcggtccctgccctcaaggaagcagcatgctagtgatagagagaagcagataataagaaaatgcatgagaatcttacggagatgatgggcgacatgaataggacactgctggagaggggcttaggtgggggctgctggggatggggtggtcctcaaggaggggacactggagtcagttagcaaggaaaataatgattattaatgcctgtacctggctgtacctcctatttggacagcaccctatgtacatcccctcaccctaatgacactgacacacaataccccaccctgtgccccctgggtgcccccaccctggtcctcagccctgcatgtgccttccgcaggactcctgcagccatgggttgctaggcactgcccaggacagggtggggatgctgagatttaaagcatcattagagaaagttcatctattgaatttccagtgcagcctgtctgacctccagggcacgatactagctaatggatcccagtgcagagctaaaaataatgcatttgggcaacaagcaggcctggcttttccccagtgaccaaaggtgcctgcgttagctccggcacatggagagcaaccttgctcagccaacagcctgatagttgccctgagcttgggctcccgtcagcactaaactttctctgtgctgaacctactattgattttgcaggctccaagtccttgagagtgtgaagttctttggcaacagccctaagtttttagggtatctacaggatgcattactgctttcgggtggcatccctccctaaacagcaggacagcagaagagagttttctatttgttcttgtcatggctgaggggctttggaagaaactctggaaggtctttatcctcaagagccatttggtggttctcagatgaaagaaaattaaagagaacaaagaaattcctggaatccagaagtcccggactccaagccaagctgggtgacattgccctaccgtagcccctttgtggacttggggtccctgctgtaaagcaaggacgctcattccttgaggggctcttctagtgcccgcattccatctgggattcaaagtgcagtttaaatggcatgcttaagagcttgaactctgccactgacaagttcttctttaagcctcagttctttcatctgcaaaatgggggaagccccaggcctaccccagaagattgttttgagtttgaacgcagtcatccatctcaagcatgcaggacgatgcctttgtgtcaactcttcctcctacccaggcagccctagaccagtggttctctgtggggtgactgaaccccctgagaacatctagcaatgtctggagacatttttggttgtcacacctggagcagaggctgctggcatctagtggttagaagttaaggacgctgcttgtacatcctgcgattccaggacagccctcacaacaaagaattatctgaccccaaatgtcaatcatgctgaggttgagaagtcccgccctaggccgagcagacaccacggggtctccagtctcctgtgggaggacgctcattgccatgaaagtgcctggtgtggtgacttagtctggaagaaaaggccactgcctttggcctcagacagactcctgttatgtctttctgtcacttatcttctgagtgatcttggggaagtcaacctctctgagcctcagtgtccttatctcagatatggagatcctaagagtcatattgcatagatgctactcaaagattgaaaaagaaaaggcaggtgacacgcctggcacatattaagtgctcaataattgtcaggtagcactggtaatgggggtcatggcagctgcaatattcactaagctctgctgagagctgagagctgttcaaagcagagagttctccacactgtattggctagtggacttgggtctttatttaatcactgggaggctagacttgcattaggcagctattgctgtgataatgctgcataacaaaacaacctgacatctcagtaacttaacaacagcaagcactggtttctccctcaggggtccctgggttaagtagagcagccctgcctcagtgtgccagttgtgtgggctgggatccagatttgttttgggtttgggttggctctgtgtgtctcattttggtggcaaaaggcagcagcaccttgagaacattcttctcatggtggcttataggagcacaagtggccaggcaaagccctgaaagcacatttggggcctttgtggacctgacacccagtaacatcttgctttacagccatagtctttacagtcataatcctttcatcaaagctatgatttcctcattctcttcacggatatttattgagcacgtactatgctctggggatacagtcatgaaccaactgcgccagaaccccactttcacaaatttatctgtaatagcagagatagaaagtatataagtaaacaaacataaaagcaagttcatttcaaatattgtagatgctatggagaaaaccaagagggtaatgggacgaggagaggattcacagggctagttcatggtcaaccatcatggaagcttctctggggaggtagcatttgagctgagatctaaatgccaagagcttgggaaagagctgtccaagcagaaagaacagcaagtgcaaaggccccagggtatgaacaggctttgcaagtccaaggaacaaaagaacagccaggatgaaggaggatgaagagtaagaagacgaagagaaaacgttaagatgcatgaaataggcagggccaggtcgtccaaggccttggagtctgtgttcagaattttgttttactctcagagcaatatgacactgcagggtattctggtttggggtttaagtagatcactcgagaaaggatgaggcaggtactactctaagtcttattttacaaatgaggaaattcaggcccagagaagctgagtgactggcccaaagccgcacagctgattagtagcagagccaggattcgaactcaggtctgcctgatcaccaagcccacatggcctcagattcccagcaggctcaggcaagtatgggaatatgctgtcatcatagactgatattaagatttacccatagctgcgctgcccagtatgacagctgctaaccatgtgtgactatttaaattagttagaatggaataaaatgaaaatttcagctcctcagtcactctagccacatctcaggtgctcattagtcacatgtggctagtgtctaccacactggacagcacacatatgggacatttccatcatcacagaaagttctatgggaagcacagaatcaaaacctttgactggtaggagctatgccacacattcgttcctaggaaaggttgatggataaaccttttttggcctagaactggccaaaaagatcaggttgttctgaccctctgatttaagctacagataatatcctgttctaataaaagacttttatggaacataagaccatttactgatgagtcagattttacttgagccaaatagggctccatgtgagtgcacttaaatggaaagagaagtttttaagtctcacggaccttgcagctggtctctgcattgatgaaaagtttctggtcaggttcatgaagcacgggatacagtccagtttgagacccaggtgtctggttagcctcggggaagatgtagctctggaaatcagttcttctattcttgttttttctcctgccagatcctatcattcctgtcccactttgacccctctgcctcctgagtagctgggattacaggcatgaatcccatgcccagctaattctttgcatttttagtaaagatgggtttcaccatgttggccaggctggtctcaaactcctgacctcaagtgatctgcacaccttggcctcccaaagtgctgggattacaggtgtgagccaccgcacccggcctgtttttcatttttataagttttttatgtttctcctcttgtcctccttcctgagaggctggtggaaagagtggcaccgatgggtctgggctggtgaagatatccagtaaaattaccccttatatctgagaggatgattttggttaacagacccaaaccgagttaagggggaaaacatctaggggttcctatatctgaactgtaagagatttcctggcttctgggatggctggatccaggggctcaaatgaagtaatcagtatttttatgttatttccgactttccatcacttggcttagcattctccatactgatcacagtctctgacaagttgtcctgtcctaccatggctgcagacagctaccagactgtatctttttttttttttttttgagacagagtctcaccctatctcccaggctggagtgcagtggcatgatcttggctcgctgcaacctccacctcccgggttcaagtgattctcctgcctcagcctcctgagtagctgggactacaggtgagcgctaccacgcctggattttttttttttttttttttttttgtatttttagtagagacagggtttcactatgttggccaggctggtctcaaactcctgaccttaagtgatccacccaccttggcctcccaaagtgctgggattacaggtgtgagccaccgtgcccggcccagatggtatctttacaggtagaaatctagcagaaaagcaaataccttttgtgtggcctggcttgaatcaaaatcctgaggtctcctctgattgctcccgcttaggtccgtcctgtgctaacctctgagccaattgctgtggctaggaatgagaagctctgattggcttaggccatcgtcacatgatttcactcttctggctggaggcggagcttcagccaaacctctacacaggagtggggcaagggaagacccccaaagaaactagggctgtggccacagggagctccatgggatgacagtgggggctcctctcctccacccccttattctttgtcgcctgattgttccctgtcccagcacctcctctccatttctaatgtggcctgggttaggggaatagcccatgtcagccccacccatgaatgggttttccttgatgacattcatccaagcaatggttcccgatctagccgagggcggagaggaatgggagaacggggtactctctgggcgtctcccagcaaggtgctgcccgttggttctcctaggaaggcgttggtcctgcattgtctgtgagaggcctcagcactgctggcgtggccgttaacactctctgtgtgtaggaagcttcagaagaatgactccaaatcagaaaacggatgcaagaagaaaatatcagacatataacgctattgaaacagagcatcgcccgccccaggtgggagtggtgtgcacacactctgtcacagttttccagagctgccataacacagtgccacacactggtgacttaaacaacagatatttacgttctcacagctctggaggccagaagtctggagtcaaggtgtggacagggccacccctcctccgaggcctccagggaacaatcccaggcaacggctgctggcggacaccttgcctcttccagcatctggaacagggcactcttccttggtttgtagaggcatcaccgcattctctgcctgcatcttcacatggccgtcctccctgtgcgtctgcctctgtgttttagggctttaggatctcgagtgccttattaaggagaaagaagacagatggtgcagagggtgacctggggcaggagctgcgggagagaaactgcacgcgtggtgcggtcagatctgattaaggctgtcatcctggaagcctctcaccactctcctcttccaacccccttgtaaacacccttctggggctaatatgttctgtctgcccggccctctacagagtcccatctgccaagcccgaggtttctgcctggccacaggctttcactgtgtccctatttgcaggcactgggctcgttcccctacttgtgggctttcttatttaattctcctgataaacctgtgacactgctctctcccggcatgacaccctccgcctacttctctgaccttgtactgcccaccttctttctctttctagaacaggccacaattattcctacctccaggccctcacgcagtgtaagtgagaggttaagtgaggctcttctggacctggatggttgctttcaaatccagctccaactcctgttcgctgtgagaccttggaccagttatttgatttctctgttctttgatttcctcacctgtaaaatggtttgtgtgaagatgaaaggaatccacacatataaactctgagaacagaaactagtgtacagcagacacttaataagtgttggtcgccaggcgcagtggctcacgcctgtaatcctagcactttggggggccaaggtgggtggatcacctgaggtcaggagttcgagaccagcctgatcaacatggtgaaaccctatctttactaaatacaaaatattagccaggcatggtggtggatgcctgtcgtcccaagtacttgggaggctgagccaggagaatctcttgaacccagaaggcggaggttgcagtgagccaagattgcgccattgcactccagcctgggcaacaagagcaaaactctgtttgaaattaaataaataaataaataaataaataaataaataaataaatgttggtgcctcttattgaatcttttcctggaaccgtcttcccccatatctccggcctaaacgtcacctcacgagagaggtctctgcaccattctcagtcatgttttcttattttatttttattgtagcatttattgctcacaattattttctttttacttgttatcatctattctcactctctaaatgaaatcctggtctctcccactcgtttctgtatctccatgcctagaaacacctagcacatagtaggggcacagaaagtattggttgaaagaaagaatcctggtttcatagatgaggaaaatgaatcctaaagcagtgcaaactctagcacaacacagatgcaagcctgtgttcctcaccacaacatttggatcctacaaggaagcatatcctattgtgagaaagtatgactttctctggtccctactagtctgacccgcaatcctgcctgtctcctcagccaaagtggggcgggcaaccagccatctccccttcctcctccccaagctgggccaggcagctcattagcgctgccaaccccccgcatggacagcagtcctgagccgagaacgacgggagatgtgtccaagtcttggcagcattgtgcattgtcagctggataaagtgtgatttatcacagaacaaatttctgcctggccatttgaattctctttggccatcgtttcaccgggcaagatgtaaaagggaggggaagagcatagacattgtctcagaaatattgcttagccctgacttttctctgcctttttctttttccttctcttccagtgatgtcaaagaagtagctataatgcactttagtaatgagagaactgctgtagtaatgagagagacctccttaaaatgtaaaacttcagctctggccactgcaagggaagggcacattgcacaggagatgccagatgttctctggggtgagaacaggtaccggcaacgagaggaaagggattctaaactaatgtcccaaagtcaggtcctggtgaatgtcctgaaacggtggcccctccaggacaagaagctctgacaggagtcttcccacatcctgggaagcctcctaaatccgggctcagggctctgccaatccctgctttcttctcaattttgccagtgtcctctgcctaaacaggagagaaaatagaataagataaaaaggtgaatgggaggtaaggaagagaggggaagccatgtaaaaggccgtgagagttatagtcaggatcatccacatcccatctcttagcagaatgcatctgtcagcaagtctttgtaacagacaactccagcgtttggttgttcaagatgattgcaatttattcttgcttatgggtttgcaggtaagcggggctcggccggacagctcagcctaaggtgtgagctctgctgggtttggcctgtcgctgccattgggctgtggtcagctccttgttccttgtgtcccattctggggcccacactgagagattgtattaatagctactttggaggaagtagctattaatggtcaagttccaacgactagcagaagtacacatttcctaagtccaagcttggactggtccaagcatggctgtcacttctgttcatattttcctggccaaagccaagtccagcaacaatggggagaggaagtagaccctgtccatgatggaggagaaggcgggcctccctgagtgcagagccagctcagcgtcatggctgagagcagacctctaggggtgactggctgtgtttaaatcctgactgatgactaccagctgtgtgatcacgggcaaggtacatcacctgtccatgccttggttttctcatttgcaatatggatatgataaatataatagtgccctcctgtgtttatggtgtggactcagagagatgacccatgtgagcctcttagaatggtgcctggataactgtggccagtcaacgaatgtttgctgttgttataaagtaagcaatcactgataaaagtccatctcttcctgtgtgtgcatgcatgtgtgtgtgtattcgcgcgtgtgtgcatgtgtgtgtgtgcatgcgtgtgtgcgcatgtgtgttgtgtgcgcatgtgtgtgcatgtgtgtgtgcatgtatgtgtgcatgtgtgtgcatatgtgtgtatgtgtgtgataggtgggtagtgttggcggcactgggtgcgcagttacccctgagttttccctgagcatagggagtgttcagtgacccagatacctgagcacctttccctgccaaggctacacgtggtggttaccttggcaacattctaccccgttgatgctgagaccagctctggccatttaatcctctatagatttgggaggcaaaggagggagaattgcttaagcccattagttggaccaacctgggaaacatagcaagaccccatctcttaaaacaaatgcttttttaattactgggcatggtggtgtgtgcctgtagtcccagccacttggaagcctgagaaaagaggattgcttgagcccaggactttgaagttgtagtgagctatgattgcactaatgcactccagcctggacaacagagcaagaccctgtctctgttgaaaaacacaacaacactgtgtaggccaaatgtgatgggaggccaccagtttgcaagctctgattcattcattcattcttcaacacgtacttattgagcatccactgtgtgtcaggtgttaggtcccaggtatacaacagtaaacaaaacagacaaaaatctccgccatcctagagtttaggttctcctgagggaggacacataaagcgagcaggtaaaatctacagtgcatcaggtgacagtaagcaatctagagagaggaagcaaggaagagggaagggaggttcgggggagttgccatttaaaatggaaatgtcaggttggacatggtagctcacacctgtaatcccagcaatttaggaggccaaggtgggtggattacttgaggccaagggtttgagaccagcctggccaacacggtgaaacctcatctttactaaaaaaacagtacaaaaattaggcgggcatggtagtgcatgcctgtagtcccagctacccgggaggctgaggcaggggaatcacttaaacccgagaggcagaggttgcagtgagccgagatggcgccattgcactccagcctgggtgacagagcaagactctgtctcaaaaaaaaaaaaaaaaagaggaaatgtcagagaaagaatctttgagaagttgacatttgagcaaggcagggattctcagcctcggtgctattgacatctggggtgggttaattctttgttgtgggggactggcctaggcactgtaagatgttgagtaccatcatccctaccctccatcccctagataccggttgcaaatctatcctcccatttatcacaatcaagatgcccagagatgctcaaatgccccctgggggacaaaattgcccagactgagatccaccagattaaagagctgaaggacatgaagaacaaatcaggcagacaagtaggggaggagccttcaggcaaagagaacagcacgtgcaaaggccctgtggcaggtgtgcacctggcatgttcaggaaccagcagggaggccagcagctgggtcgagtgaacagtgtgaaacccacagaagatgcacagggaagaaaaccaggcacatcggagaggaacttgtacatcatttaaggatttttccagagctgaaaaggagatattatttaaacattttccaacaatagccctagattcagaggcaactgttgagaagaggcccctgggctgcaaggactctgtttccaaacaagcccacagtctgaggttccaggaagacatgagtttggaggatgcagaccaacctactgcctacctctaagccctggcatgctttcccggctcacactgttttcccttaaccctacccaccccttggatcagcaatcctcaagttccaggtttgtgtggaccatctgttccctgcctagacttggaaagagacagcctttccgagtggcccctgggggatgggatgaggaaacgtgggcagagccacttgaggagaggttccggactactactggccccttgccacgggcatgccacagttgctggacagtggcctctctcagcacctgcctttcccctgcccacctgcccacaggaatgccaatgactcgaacagccacatggcaggaaggacgacttcagccaaggccataatcctagtatcaacaacatggctgaaacggtccagtcaaatcttgaaccaactctcgttgacatttctcactctacctctccatcttggatgagccgcagccatggcgagcctcggttttctcatctaaaaaataggatcataactgctgtccatagctctagaaaaactgagtatgaaaacaataggcaaagacggaaaaaatgagattaaaaaaaagcaaaacaaaaagaaaacaggatggacaaatagacggcacaaataatatggtagagagaaatccaagtaaaacatccactgtgactcacatgaacgtgctaaaagttccagcaaaagaacaatgagttatagaggaaacattgtaacagaaaaatcattctaagtgtttatttttacaaagcgtctagaacatccaggatacagaaggatccagcaaggctgaaagtaaaagagagaaaaagacaaatcaagcaaataataaccagaagaaacctggtggcctaggaagagtaggcaaaattgattttatggtaaaaaataaagccttaaaaactgttttaaaaaaattgggtttcttttctgttttcatttctttgctggagttcagtggtgcgatctcagctcactgtaacctctgcctcccaggttcaagcgattctcctgcctcagcctcctgagtagctgggattacaggcatgcaccaccatgtctggctagttgttgttttttttgtttttgtttttgttttatttttagtagagacagggtttcaccatgttggccaggctggtctcaaactcctgatctcaagtgatccgcccgcctcagcctcccaaagtgttgggattacagacatgagccaccgtgcccaggcttcttttctgttttcttttttaattttttattttattgtaaattgacagattataattgtatatatttatgcagtagtaagtgatataatgtatgaatataatgtattctttatacagtgattaagtcaagctaagcagcatattcatcatctcaaatacttaactttttgtggtgagaacattcaaaattttctctcagcaattttgaaatgtacaatatgctattattaactatatttatcatatcgtgcaataaaacacttgagctcaaagaaaaagaaagaaaatgacgtgaaagcaccttgcagatgtgaagcgggattgtcactgtgtacgagcatttcattcatattaacggagcaggtccacaaacttgggtgtacaagaaacgtgcatttgattttcttgtatctgaacttcattcaagcacaacctcagtgccctgagatgcacaaaaaccatactaggagcttgatttttgaacataagtttgaaatgttaattagagacccaagtggagacgtggaagaagcaggtggatatccagagacaggagtttaggagttgtcagcacagagatgcacttccaagcatcataactaaatgattaccatcatgagcgggatgtagagggtgcaaggagtagatctcacagtggtacccagagcagcagcagcaacagcatccgcagccgctggttacaaatgcccgtgtgggtccccaccccagacctgctgaatctgagatggacactcagcagtctatgccaacaggccctccctgaggctcgctcaagtctgagaaccagtttggctagatgacgattcaggccaggctcccacaggacatccgtggctgaccggcagatgcctctgccttccccttggaaagtgacccccaggctcttcctaggaggcaggtgcagactcaggaaggtgccaaagcctgagtgataacggaatatggcaactgaccatatgtggctccaccaagcctcacgtgaccccaccgtccctgggtccttacaggcagacactgatttctgggccatggctaccacgcattctgtccgcatagtttagatatcagagtgagtggagttcagtgggcagttttctcaatgggcagctcatccacaatgaaagatgaaaagcagtctgagaaacaaagccgagggactaaaaagactcctgtggggttttggttcctttttgtagatgagtgggctcactttttcatatgatagttctcactgctggccacttaggagatgattaatgcatcctgagatgtccccagacatttatgacaccttcaggaatagcagtgacgatggctctatcatgcacggctacttcatacccttggcattgctcttaattatttatatattcgggagcagccaggtttcctcccaccagagctcagaaaggtaataaatgagaaaagtcaatggtctgtaaattacaacattgactaaagaagtgattactgatataactcttgctcgactgttgtgctaatgccttcccagatccaggacagtgtttacctgctaatgacaagcctgggatggcaactaaaattgccttccttctttaatcagcatgtaaacatttttaaaccactcttgaccatgaatgagaagatccatccatgtgttcccatcccaactgctccctgccactgtccccaactgctccctgccactgtccccagcagatggagcaaattctctcagcccagccctcaccagctgcctctccaaacagaagtgcaagttgaagatgaaaattgagcccagagtagccatccatggttcccggaagctggggaaagagagggtgatcagattataagagttctttattcagcactggatgttatttggccgaggccacagaccccccagaaggggactctgttctttccaagctacatgatctagacagaagacagataagcaaatcagcaattatagcttagtatgctaagtgctatgtgaggggtttccgagtgacttcattaactcagaaatactccactaaactgtatgtgtgtgcatttctccagcaagaattagctttatgtgtattctcaaaagagtgaatgacccaagaaaggttaggaaacactgcctgagcactttctagaaacttttgaattaacttcttgtgtttttgtagcttttggctccatgtcatctcagtctctcactgcatcgtccatcaaccccaagatccttgatgactgtcctgaagcaggcatccccatgaagggaaggccctgctcatccatccctctgtccatctgtctgtgcatcagtgtgtgcttccatccatcagttcatctgtctatccatctgtccagctatctacccatttatccaccagcacttaacctgcccatccatccatctttccatccatccatccgtgcatccacccatctgtctgtccatcagtgtgtgcatctgtccatctgttcagctgtctatcaatctgtcgacctattcacccatttatccaccagccattcacttgtccacccatccattcatgtgtctgtccatcagtgtgtccatccacccatcagttcatctatctatccagctgtctacccatttgtccaccacccattcacctgtccacccatccattcatgtgtctgtccctcagtgtgtgcatgcacccatcagttcttctatctatccagctgtctacccatttgtccaccacccattcacctgtccacccatccattcatgtgtctgtccatcagtgtgtccatccacccatcagttcatctatctatccagctgtctacccatttgtccactacccattcacctgtccacccatccattcatgtgtctgtccatcagtgtgtccatccacccatcagttcatctatctatccagctgtctacccatttgtccaccacccattcacctgtccatccatccgttcatgtgtctgtccatcagtgtgtgcatccacccatcagctcatctgtctattcatctacccagctatctacccatttgtccaccacccattcacctgtccatccatccatctgttcatcctttcctccatctgtccatctgtctatgcatcagtgtgtgcattcatccatctgttcatctgtctatccatctatccttccatccattcatccatgcaatgtccatttcactgagctcctgcttcataagcagctgaggtaaggaacccagaggtgaaaaatgaacacaatgtactttttgccttcaaagatttcttagtttaagaggtgatatggacacatgggaccaatttaaatcacatctgataagcttggctattcaacaggggtcatattgtttctctataacccaacttggtttctattttcagttttcaattcatcggggtggcagaaacagaataccagtctaatttccaggggatttaactattgccaaggccttggggaagggcacatcttgtcttataatcttctgttcacagttcctaggggacattttttaccggtcacagtccgcccaggttacctcttcaatggcccctcattgttgtccacattgccccttcctgcctgcttgagaacacaggtatcattctgctgtttccttgctacactgggaatgccctctgggctggtagatagagtcatatttgaatgaataatctgggaacacaaaagccacatacttgcaacctttatttttttagtctgtgtgtttatttttctttctgctttgtctcatccctttcctgagacagcaatctgccagaaaggggaaaaggaaagggaggcgcatagggaaagggaacataggttggtagtccctaatgtgatctgccattcacataacgaacacgtattatataaataatcccacggggtcatagaagaccacagaaggggtctcataaggaacccctgagctggggtaggtcaggcaaatagggatgggaaggtgctcccaggcacagggaccggccttgccaaagcctggggaccgtgaagaacctgcatcaggcctgcatgtgcatgcaggggagagacctcagaattagtgagaatcatgctggggaggaaggcactacgggccctttgcatccttggaggctggatggggtgggttgtgggtgcagcttactttctgaaaagacataactgcccagggtgtgaaaacctctggtgctcacatcaaattactcagcccacccagatttcagctacagctgcagttctgtacaagttcaagttcactttttgattgcagtctcacctcaatctgctttctgttttctgttccgggtggggcaagccctcaaccagtaggaataagaaatggtagctaaaaatattccctcctcttactcctcaagtggacaattctagatacttttcatgaagcctctgaaaaccgagcccatggtccctgtaacagcctaaaaaatgcaccttcctattgggtttccttctttctctgtcttcctcatctgctccttcacccctgctccctggggtcacctcccaattaaactgagtgcaccaaatccttgtctcaggctctgctttaggagaaaccagaaataagcatttgtgctttgcaagataataggaaaaacaaaaaaaggattgtctccaaggctccatgaacttctcctccatcctttctccctctgtctttgcaggtgtctgagcgctgtgactacatctttgtcaatggcaaagagatcaaaggaaagatggatgcggtggtgaacttcacataccagtacctgagcgcccccctgtgtgtcaccgtgtgggtgccccggctgcccctgcagatcgaggtctctgacacggagctcagccagataaagggctggagggtccccattgtgaccaataagaggtgagcctcggatggggagatgccctagagccaaaacaacaactttatttactgaccttaacactaaaggacccaatgcttaagagatgctggtattgtctcagcagttgaatctccccagggctcccagataacccagccaggcccaaaagctgctaaacagcaggtttgcctcaaacccaggttgtccgcactctacactggggcttatatgaggctgtctcttgaaagtggctctcccaaaatgacacgatggagttaatacatttttttagcatcttggttaccaggtaatttgaagtttggtttattttctccaaaaaaaagtcagtcctttcctgtgctttatgcatatctataagcttgaaatgttctgtgcagatcaaattattggataaaatttaattgtgtttctagtggatgctggaatcattatttgccaaaagcttctaatttttttgggattccggactgtctgtctgtcacatgcaagagtatggggtcttgttttctcagccctgtgacccccggattagcagacattagctaagtgaaggtgttcctgagttcacagcttcctgcctggaatgctccaccccagaccatcagggctctttccctgacagtcccccaggcaccagggcctttctcataagagagagcatttcaagaagagtaagtaggacagtgagatgcggaatccatctctacaaggggaagctgaaggcatttggcccgatgtgggaggaaagctgtgaatctacccagtccttcagattagtctgtggtcatgagtggccaagacaatgagtttgttccacatccctgagggggaagaattaagactccctgggctccaatccaatctctgccactaattagctttgtgagcatgggcaagctacctaacctctctgtgccttagtttcctcatctgttcatgagaataattatgagtttgcctcatagtgttatgaggttaaaagagttcatacatgtggaagcataaaatgggacctgccacatctcaagtgtgtaagacagctctgtccaataggactttctacagtggtgggatgttctagaacccctctgtccaatatggtggtcactagcacaagtagctatggagtgcctggactgtagccagtgtgatgaggttcaattttttatctaatttttatttatttaaattaacattagggctgggtgtggtagttcaggactgtaatcccagcactttgggaggccaaggtgggagaatcacttgaggccatgagttcaagaccagcctgggcaacatagcaagaccccatctctacagaattttttttttttacttagccaagcatgatagtccatgcctgtattcccagctattcaggaggctgaaggaggaggatcacttaagcccaggagttcaaggctgcattgagctaggatggaccactgcactttagcctggacaacagagcaagaccctgtctctaaaaagataataataattcattaattaataaaaattaaaatagccacatgtgtccaatgcctacttatgagacagtgcagacttggtacatattagcccttgtcttttatttttcaataaatgtatttgagaaagagatgcccatcacttagtgttgcctagagataggcttggtgccccttgcatggtcctggcgctcgtgtcttcaatgtggtctccttgaggttgaggtgagcgcctgcctgtctcaagaacgtcttagactcctctccctggatctgagagctctttgtcccttcccacaaggcccactcgtgagagcgaggatgaggacgaggaggagcggcggggccggggctgcgcactgcaataccagcacgccaccgtgcgggtcctcacccagtttgtgtctgagggcgccggtccatggggccagccgaactacctgcttagtcctaactggcagttcgacatcactcacctggtggcagacttcatgaagctggaggaacctcacgtggccaccctccaggacagccgggtcctggttgggcgagaggttgggatgacgaccatccaggtaggaagctgggagtctctgtgtccccagcactgggcatgtgtgcagtgttgagggagagtcaatgggtgggcagatcactgtggccgattccccaacccatgtgtatcatgggaacacaggaagatgagcccaggccagatcttgagtccagctccttccaaacagaatggagaaggtggcagctgcaccctcttagctccccgtgtgacctcattctcaatggctgcctccaccattcccaccacctcccagcacccccatcctacctctgattctccttcttagtccacacttttctaactttttccccctatgccttcttagaaatagccatggtcttctctatgtaccacttctaccagtggcccagggaaaaagcatggattcttctcatttcttccttctttcagtcattctgtcttcctgccatttacttattcaacaaactctctttgaaatcctgctccttctttttcactcaaggaagtgtatagaatggtaaaatttcatgatggggcatgaacagccttttcctcaatccctcaagtcccaccctactgaatccacctttctggaatgtcattcaggatccttacaccatatgtggaaatggttagcacattcccgtcatttcccctggacatctcaagcccaacatttggcttacaagatgaggcagaaagcaatgttttggcagaggatacattgtggtggtggtgggaggagtgaactatttataattcacttttataaatttataattcaattcttcatgagtctgttcaacaggatcaccatgtacagttaaccaggtcgtgcattgtacaagcatacttcatctaaataggaggggtcattcccttttaaagacagaatggattttaatatctattccaattttttaacaggtagaattaaggtgtcctggggaaagggtaactttgattctcacgaaggcatgggatgggccagcatatagagtgaagtagatatgtaactcctttgccctgtattctggacctcaggcctgttgggatggaagaaatattactggtaaaggggataacatctggaaacaggtgtgatggattttccttgtgtcctgccaatcccacaggtgttgtctccactgtctgactccatcctggcagagaagacaataaccgtgctagatgacaaagtatcggtgacagacttggccatccagctcgtggctgggctgtctgtcgccctttaccccaacgcagaaaacagcaaggccgtaacagctgtggtcacagctgaggaggtgctgcggacccccaaacaggtagggggccaaatgccagaggttcagagggagcagggtcagccactgtgcctgcttcagcaaaggggcagggtggagtgagaaatgggggcaggttagcagaaccatgttccacaatggaagccatgtcattgcagacaaagtgctcatgttacccacatagcttttgagcaacacagaccatttaccagcctcctcaccaagtctcttggctgccgttcttacccctgcactcccctctcttctcaagaggagagcaagcacttaaaaccataaatcacatcatgccttttactggcttaaaatgctccaatgacttcccattgcacttagaaagagaccatattcctttgacagcccacatggccccacacaacatagcccctggctatatctctgactttatcttgtgcagccctcagtctctctcatcctatttgaggcacacactccccttgcacttctttaggggttttgcaattgctgttgcttttacctgagacacaccaccctcaccgctgagcatggctctttctcattttcatacccagttatgataccctcttctcataaatgcctttgctcacagcgaatgggtctgaatccgccccatttcttaccacataaagcatgtttctcctccatgggatataagctctacaagagaagccccctgttcatcgctctatccccagtgaccatcacagggccagcatattgtaggtgctcaataaatgttggttgagtgactgaatgactcttagaattgaccatcacagggccagcatatagtaggtgctcaataaatgttggttgagtgactgaatgactcttagaattgggctggaagacaggaaattagaaagagagcagggagagttatccacgtaacacagccaggatgggctcgtctgaccctaacaacctgcatatgggtgtttaccttgtctgcaggactttctgcttctgatgccatcattagaacaatacttatgagaagagtacaaagttaggagccaaaaggcccagatggtatcacagctgtgtccgttaccacctatgtaacctcaggcaagacgcctcacccgtgtctcaatccttaatgagaaagtaacaacacctgtgaagagtccatttgcaaattaaattaggcttaacgatgttgactgctaaaaacagtggctggcacatgccagccagtgttagctcttttcctgggaatggctgctgttattatgatcactattttagtgaaagcacacagagccttggatgctccatcagagcagacagtcttgactcagaacactctgcgtcaaacccagtttcctctggtgacttgcggccacaataggcaggcggtctggggaggaagctcagattaaatccacatcccactatggactgagcaatgctggaggaggtgtcatgtggctgggacaggcgacagggcccaggggttagtagcaggcgttaggatcccctgacatgcactagcaggaacacgatagtgctacaaagcagaggcatgatgatgagaacagagagcagtgatggttaagggagcaggcatgatgacaaagtctaggggcttgtgttcttctaggggggattggaacgttccagccatagtgcaggatttcagtgcagttcaaggactgcaaactcaaatgcctacaggggctgggctggtgttataagcaagcagtgcagactgtgcaaaatccatgtggctgctttgtccagtagtggggtctatgaagagctagagtgatgatgctcagtgctcagagatgtgcccattatctgctgctatgtaacgacggccacacacttagtagctgaaaatggcacgcacttattggctcacagtgcggtgggtgggctcagctgggttcatgcccagagtatcagaaggctgaaatcacagtgttggttgcctgagttcttaccaggatgctctgaggaagaatctgcttctagaattatttgggtggtggcagaatccagatctttgcagttataggactgaggttgccaattcttggcaggttactggctggaatcctctcttagttccacaagtccacctgcattccttctcagtccccaccctaccttcatcggcttcaacactaggaacaatgcatggagtctttctcatgcttccagtctctccaccttccccttctgtcaccagctagagaaatcgctcagcttttaaggactcatgtgatttcactggactcacccagataatccaggaagatcactctatcacctgtgccatgtaacaatataacataatcatgacagcagtcactcatcccatgcccatgttctgggaactggcgcagaacatctttggtgggccattccaggaattctgcctaatgaagagagagttgctacctgattttgccccagagtgtcagcaggagggacctggggtgcatgcaggtcctcatccagcccacagcactggcttcttcaagtcttctttgggggcagatgggccaggaaatcaacatggtgttttctggtttacaaagagcagagtaatactctcacatttgggattagaagaaaaaagagcagaggaaagtgggagagagaaagctgaaagcatgaagctatttgctgagaatggataatgaattagggtggacgattggcattgcaacccccttggcatggggtatggccggccgctccccatctcctgtcgcccatctgtcttcatcagctgacagtaattggtgtcccctagcactgacttagggggatttgtggatgtagttcatctgatttgcagacacgactcttgaaaggatagagctctaaatcatttctgggcatgtgttattttaagtcattcagaatttctcatctttggggaaatgcgctggcttctcctgatgaaacactacattccagcctctctgtaatgagcttatggtagaagttagtctcaatcatgcagcagggctgatggagatggatcttggcaagtcaacggtgttctgaggctttaattccgattgtctgctgttcaggggcttttttatgttaacttctttccccatctagtttgtgaagaaaaattattcaagaggaaatgtcagccacgatgaacttgcacactgttcagtcttttatctcaccccttagagtgtagaaggctggcaccttgttcatgatattttcaactttgaaatagaaaatctgaatggtttttacacctacaaatagagggtagtagcctgcatgttctcccaagccttgtttgctctaaagaaagtaggatcgaaaaatgaaaggagaaatcacttggtatttgtgcatgaggttgaggcattagaaggacttattggattgtgtgattcatcagctgatatggacagaggagacgagggtgagcaccaacatcgctgagccatctcttctgtcttagttttggtctgctcagaagctgagcctgagacaaggattcaggtgcaagtagtttattcaggtggtgaagacaataccagtagagaagtcgggggtgatggaaggaagagaaatgcaaccagtagagtgtattaccaactcagccgccgccaagggcagccggagctcctgtctgctgggcgactgtatgccggtctagaaaggccagaagagttactgcacttgaggggcaagggatctgggataaatataacaacttccatgagtccttcattgagggctgcccacagcatttattaactccttggcacatcttgctgtaggcacaaccacatggattccagaagccagagagtgaccttgggcaaaaaataagttaaaaaaaaaaaaaagcaaagttgatcattgaaagttgagctagcaggagctgaatgggcagccacccaaagagaactccacaccctcctaaaacttcctacacaggctcacccctcagagccagctggtgttggccagggcttaccaacacaagtgatatgacccaatccaactcaacctgccttcacacacagcagaatgtatcagttcatgtccaagcatttggatcttcagctacagctacatgtagatgctcaaacgatgtcatcagaattctttttttaattgctagcattcttccttggtcctgcgggatgtagagtcatcattgctgtgaacactggctgctcccaggctactccaatttttccttctggaattcctaccaaacaagcgttggacattctcattctctcctttatgtctgttcacctgcccttcacagttttatttcttgatatgcctgtggttctatttggggtaacgtgggtggctttgtctcccactgcagtaattctctccttgaacatgtctcatctgctgttcgaaccacccattgagtcactgatttcagtgactgtgtttttcatttctagaaattctacgtggctctttgcaccccttcctgctctgcttccattcgcttcttcttcttttttttttttttttttgagacagagtcttgctctgtcaccccagctggagtgcagtggtgtgatcttggctcactgcaacctcttcctcccaggttcaagcaattctcctgcctcagcctcctgagtagctaggactacaggcacccaccaccatgctctgctaatttttgtattttttgtagagatggggtttcctcatgttggccaggctggtcttgaactcctgacctcaggtgatccgcccacctcggcctcccaaagtgctgggattacaggcataagccaccacatctggcccccatttgctgttattgagacaatttcaactccttttaatgtctctttaattttttaattaaatttttaatttctttttaattttatttcatagactatttttgttggttcgttttatgttatttcataaataacatttattatgaaatttatttattatgaaatgtattattatgaaatgttattatttcataaataacattatttattgttttatttcatagactgttgttttttgttggtttcctttaagttatagcctttggagtcttctatgatctcacatatcagtctgctcaccttcctgtgtaaatgtttaacacaaccactcccggtgcagccttgccacctacaggttgtaacttttctttctttgtatcatgagcacctcttgagccctggttgctcggctttgttttgttctgaaggaggttgtatttgcatttgcacaggtccaacttcaagtgagtttcttttctcccaattcgcataccacagaggtagttatcccacccaagtgtgggcttttggttttgagtggcgacatctccatccagtgctcagagcgcacacaagctttgctgctgtatctctggctcagcaggtaggattttcccatgccccgtccatggagtgggtgctgctacctccctgggctgcaatgacagtgtccgggatggatggggacaaaggtccaggaaggccacgaggtcagacctggtttgctgtgaaaaaggcagggaggaaaggaggcagctacttgactttttcagcagagggtgagtcatcatggtctttgtggggctgataaaatgggctctggcagtggttgttctagggggtccctagcacagtggtcaagagctcagctctaaagccacagcagttccagccctgatcctgcctcttcctaacgatatgactggacatatttcttttttttatttttttaacttttattttcacttcaggggtacctgtgcaggtttgtcatgtagctacacttgtgtcatgggggttggttgtacagattatttcatgacccaggtattaagcctagtacccattagttattattcttgatcctctccctggtcccaccctccaccctccaataggccccagtgtgtgctgttcccctctatctgtccatgtgttctcatcatttagctcccacttagaagtgagaacatgtagtgttgggttttctgtttctgtgtcagtttgctaagaataatggcctctagctccatctggtccctgcaaaggatgggatcttgttctttttatggctgcatagtattccacggtgtgtgtgtaccacattttctttatccagtttatcattaatggtctggagagtttttcctagatgaatggaggaggctgaaatatgcaattctaagcacaaagtggagagcctgtatccactgggcacttgctgtggatcaggtgccatttaggttgactttgtgtcttcgctattgtgactccatgtctttgctattgtgaatagtgctgcgatgaacatatgcgtgcatgtgagcacagttcttaacctctctttgggcaggaagcataacccaacctactttgtggaagaggagaaaatgcgttctgtaataactgcgaacaacacctgacccacagcgagtgcccagtggatatggactgtctgttttatgattaggattgcacatttcaccctcctctattcatgggagttcccactcttggaagcagaatagaagtacccatggctaagtcaagaataaggccttctgtgggattatgtttgctgtgggcacacaaaggggagaggatgtcattattgccctggggaggaggcgagacagcaggaaaccttgtgctcatgagaatctgccagtcacataggcatgggtgtgagtggcatttctaggccagtagcttcccctttttttggaatattattcagccataaaaagaatgaaatattgccatttgcagcaacatggatgatcctggaagacattactttgagtaaaataagccaggcacataaagtcaatttttttttaccagtccccacaatggcaaatagtttttacatagctgttgggtcactgacagaagtatagtgagtctgcaaaataaactcagccccttcacactggccctttgcttcctctttcactctgctacccatgcagagcaagggcagcacaattgaaccgggcccaccagccaatgccatgtactgtgtcccacacatcactgccgcccaactacagccaagcaaagcatctgcaatggctcaacagggtcaaccttaaagggcaaaatgctcttgttttcttgtttctcaggcaaagcttaattcactgggggcagtgcagggagaagaggggaggttcctttctgatgtcattggttctgacagtgtttcctgcccatcaacctttgtcatcaggctggatacagacaacagctgtatccattcatcatacttaggccactaatcacagagtgtgtgacaaaatgaccagggcctgccctagaagccagtcattgtctgtgaacatgcaccggctgactgattcaagcaatacctgtgtggataaagccacccggagcctcatctcacttagggatttttgttttgccatttgtttgttctgggtaaggattatgagggcactgttagtcacatccccatttgttcttgtttaaattaaggtggtttctctgcccctgatagaaaacctgtatgatttctccccagatgcatgagctactgggtctggatttgaggtcctgctccctgtttcattgggcgtcctcctaggagggggtttctaagggaaaaggcatcccccaggtggtcttctaactgcctgtgtccctgcaggaggctgtattcagcacgtggctgcagttcagtgatggctctgtgacgcccctggacatctacgacaccaaggacttctccctggcagccacctcccaggacgaggctgtcgtgtcagtcccccagccccgctctcccaggtggcccgttgtggtggccgaaggggaaggccagggcccactgatccgagtggacatgacgatcgccgaggcctgccagaaatctaaacgcaagagcatcctggctgtgggcgtcggcaacgtcagggtcaagttcggacagaacgatgctgactccagccccggcggggactatgaggaagatgagatcaagaaccacgccagcgaccgccggcagaagggccagcaccatgagcgcacaggccaagatgggcacctctatggcagctctcccgtggagcgtgaggaaggggctctccgaagagccactaccacggccaggtccctgctggacaacaaagtggtgaagaacagtcgggcagacgggggcaggctggcaggagaggggcagctgcagaacatccccattgacttcaccaacttccctgcccacgtggacctccccaaggccgggagtgggctggaggaaaacgacctggtgcagactccgcggggcctgagtgatctggagatagggatgtacgccctcctgggggtgttctgcctggccatcctcgtcttcctgatcaactgcgccacctttgccctgaagtacaggcacaagcaagtgcccctggaaggtcaggcctccatgacccactctcacgactgggtgtggcttggcaatgaggccgaactcctggagagcatgggggatgcgccgccgccccaggacgagcacaccaccatcatagaccgcggaccgggggcctgcgaggagagcaaccatctcctgctcaatggtggctcccacaagcacgtgcagagccagattcacaggtcagccgactccggggggcggcagggcagagaacagaagcaggaccccctgcactcgcccacctccaagaggaagaaggtgaaatttaccacctttaccaccatccccccggacgacagctgccccacggtgaactccatcgtcagcagcaatgatgaggacatcaaatgggtgtgtcaagacgtggctgtgggtgcccccaaggaacttagaaactatctggagaaactcaaagataaggcttaggcccctctagccaaagggccctgcccagatgccttccttgtactggaaactggcccaagtggggcagaaggcgttgtcagtggggttaagaagggacggtcccagggtccatgctagaccagttggaaagttttgaagtcaggaaaagacgtttttgtatcaagggatttttagcagttaatggtggtggatttttaaaggtcaggggaataaagtctggggcatggggagtgcagaccaagttactgaactgcacaggcaaaattaggaaggttattttatgagtcaaaacatactacagacaagctaccaaaaattatttgttaaaaaatgcaacaagacaaataaaaagagaaataatcatctgtttatatttctaataaaggagcaaaatataaaaataggacctgctaagagacattttccattctaattcacgattcacttttccaaggacagccttcaactgtcaccacacagctgggggggagtcatttcttaacaagggatgcctcttgggatagaactagggagttttaaatctttacttgatcatcttttattttcttttccactttttccttttttctctctctctgtgtcctagacttccattgcatttatatttaatgtttatttctgagaatcaagcagtatatttttcctaaatgaaacataaattatattcctattcattagataggttcctaggaacaatgccaattaatccattgtttaagtagtaacttgaatgtttttctatatccctccagctttgttgatagtggcgggttttgtacaattggagggagccctcagagccttctgggggaggagaggaactgtccttaatccatcaccactaccatagggcaaagccagcaggtgtggccctgtgaggggctgtacagacgggatgtggccaggagaacagagccccacctggaccacctgacccctcgggattccacccctgtcatcgtggggatgttcctatatgggagaaagttgggttaaatcaaaaaagaggccacgcccaggtgtaatcagagccaacctggtgggcttggtctatcacaagacataactgatgctgaacatgaacaaagataaaaactgtttggagggtttttgagttgtttttcttatgttgttgggtggggtataccagcataaactctaaagataaaatctatgttagattgtcaatcaactgtgtttttgaacagcataattgtgtagcagcacattgcaaaaatgcattcatccaaagcgacacatgtggcaacgtagaccacgccagtgaaataagccccttcgtgatcacctgactccagttctccgtgtgctccattggctgcggctgcaggaggaagatgcctgacagccctcatgctctccgcaggggggcgctcacaaagatgccaggggtgtttattgtgtttatttttttaattactaaaatcagtagctaagaaagggtccttgaagcctcctaacctgggttggacctttgaaaaatatatttgtagcacatattatagatggaaagaagaagatatttatttatacctgtgatgccaattgtcattaaaaggcttttcatggcttgacaagtcagtgtcttgtggggtgtgttttgtttcacttaattgctatttcccaccccaaaatatacaaccccagaagaattaaacccttaggctaaagggaagacaatatatttgccaatctttaaaaaaaaaaactttttcccttttggtttcttgactgatccacagtgattcctaatacggagggctttcattcatagatccaccgtcatccacaccagtgctcaaagtcagcaagcaggagggcgttcattcatagactcaccatcatccacaccagtcctcaaagtcagcaagcaggagggcgttcattcatacactcaccatcatccacaccagtgctcaaagtcagcaagcaggagggcgttcattcatacactcaccatcatccacaccagtgctcaaagtcagcaagcaggagggcgttcattcatagactcaccatcatccacaccagtgctcaaactcagcaagcaggagggcgttcattcatacactcaccatcatccacaccagtgctcaaagtcagcaagcaggagggcgttcattcatagactcaccatcatccacaccagtgctcaaagtcagcaagcaggagggcgttcattcatagactcaccatcatccacaccagtgctcaaagtcagcaagcaggagggcgttcattcatacactcaccatcatccacaccagtgctcaaagtcagcaagcaggagggcgttcattcatacactcaccatcatccacaccagtgcccaaagttagagagcaggagggccttcattcatagacccaccatcttccacaccagcgttcagagtcagtgaggagaagggtgttcattcatagatccaccgtcatccacaccagtgctcaaagtcagcaagcaggagggctttcattcataagatccaccgtcatccacaccagtatccaaaatcaatgagcaggagggtgttcattcactgatccaccgtcatccgcaccagtacccaaaatcagtgagcaggagagcttgatgacacacagattgccaggccctgtcgccagaggttctgatttaataggacaaaggcagggctcccgaatttgcctttttcacaacttccagggctatgccagatgccaacattgccagtccgagccccagctttgcaaactaccaatgtccttaacagaagaagagaaaccctaggagcaggtgagaaactgtgaaatctctcctctggggaaaaagtttacttttgccttgacagttttgcatttattgttattgttgtttgtttgaggtttgggtgagattgttattattgattggttggggaaagaaaattttttggtagaagctaaggtatttttttaaaataataactttatcgagacatcattcacatgccataaaactgatccacttaaagtgtacaacttaatgttttttgtttgtttgttttttgagatggagtttcgctcttgttgcccaggctggagtgcaatggcatgatctcgg

SEQ ID NO: 623 - DNA, 834941 bp, Homo sapiens
  source 1..834941: mol_type = genomic DNA
catagatcgcatgacggtttgcatcataatggcgtcttcagttgtgttctttagacatgacattctatatttgcctaggagacacacaggatttttcttcccttttgtaaagcaatgagctctttctgaatgatcttgaaaacacacggctccttccctctctgtttcccccacttttgggtagagctgtgacttgggagaaacacttctgtattagaagagtggtgagagggagcataaatggagttggtcaactctgggtccagaagacatcgtgggtggagaggactcgaaacctcagtgccactctgccccatcgaggccaagtcagattggaagccccattttgccagtgtctgaattcttaagcgatgctagaaatctagatttctaaggtgaaatcatcaaagttttgaatgttggctcaattttctccattctgcaaccagtttcattgtcttttacaaaacttatgactggctgggttccgtggctcacacctgtaatcccagcactttgggaggccgaggtgggaggattgcttgagcccaggagttcaagatcagcctgggcaacatagcaagacccccatatctacaaaaagtacaaaaattcactgagtgtggtggcatgttcctgtagtcccagctactcgggaggctgaggttgggaggatcacttgagcactcaggaggcagaggttttagtgagctgagattgtgccactgcgctccagcctgggcaacaagacagagcaagaccctgtctcaaagcaaaaacaaacaaacaaaaaaacccatgactatctgaaattattttgtttgctgtttattccccctacccaaatagatataagtaaggttttggagagtgcatgtgcatttgctgtatgtgtgactctgtctctagtgctcacagctattcctgctacagagtagagtagctgctcagtaaatactggctgaataaatgattgacctatcaatcacttgctattgtttgcatgaatataaggattccatgcatcttcttgtttcgtagaattgtcttggggctgcagttgataaaggaatctacaatcaactttttaacccagtccagagttgttgtatgtacactcgagacccaaaggaaggacagagaattttcctcacctcagcccaaaaggaggctggaatgcatgcttgcctgccacagtttccacttacttaccaccatcagtcagcaggcttttaggagagaattgcacgtgtgatttatttgcaaatcctttcaggtcctggaggagagatacttggtacacaatgcactttgtcatcacgtgtcaacatcccctcaatgcagggagcagcactacacgatgtaaaggtggaactggattgtgctgggatccttcaatcagcatttcatttagagctgcagcatttgcagagccatttgcaattgatgccagccccttggagggggtcagcgtgtagaagacaaaggacagccataaagccactgaatgcaaactttatatttacagtcagtaagtttataaatatatattacattcttacaatctacagtacattctacacgcagatggatttggaagcgggcagcggctgcagtattcaacagaacatgacacaggtaagaatggaaagaaatatgaggacgttactgaaagcaaaggattctcattgaaaaggggtgacagcttaatcacccaaccaaacaaggtaggtaagcttgcggacaggagcaggtgacttactggctgcagaaacctcagtctcaagagcaccacagttgcaggggagagggctaaggttgggagggtaaactggtgaaatttacacacacatgatctaaagagaattcaattctatggagaggaagaaggagtaaagacacacactcaaaattacagagatgagatggagaggaagcagggagaagataggttcaaaggaggagagagatacagagacagacacacagagagactggaaaacagacaactgaagagcagagagagagagaaaatgaccagagggaaaaatagaagatcaattcaacagcacggcctcttctgcccaccacccgctgcccccgaccatcttttgcaggatcctatctggctggcaatcacccaacacaccattctctaccttggagtgagcgtgagatgaggcaggaattctctgatgtatccttgcccccatcttcataggcttcataagtgaagggattcagggatatccagagtcatggctggtcttaagcaatgctgaacctttcggggctgactgcaggaccaagtgcttgcaaacctgcatcttcaccacatgcactgatgccccttatcccttcgcacctccaagatgaagaaggtttctgtgctgtccggtgtgtgtgaggctgggcttcctgctggatccaccactttcacacccagaacccccccaactccacacgccctgcacgttccacacaggcaccccgatttgtctcaacagcctcgaggccacatctttggacaggagatctgccatgaacagtgaaagacccatcccaagtggccctgttttctttctagtaaagcaagggaatgtatatcccctggtatggaattcaccgtgactaccgcccatgcctagagaccagcctcttcaaagacggacggcgtgggacatatgcccaggttgcggggggagcttctctacagaatgtcacttgggagttgacacaaaacccagggggagaaaaaagacccagcaaatactacaaactgccctctccctcccccacccacaggtgaccaacggctttggggaggatggcaatgcagtggaggaatagaaatggatacattgtgaacttgatatgaatcaaaagagcgtggttctttgaacctgattcaaattctatgcccagtatccttagtttacaaataaagaagtaccctgaagggctcagaggatttgcgtccatgtgtttgtccttggcatgtagttacaaaggtatttgtggcctgttagcccacatgttccctttcagtccttgtcagccacttccttggcctgtccatgatctgagacagctctggcccagcctttgagagacaatgactcacaatcatgcctcccacagctgacggcggcactggactgcctgtgatcgcgctcacagcaagatgtgctgctccagtttcgatgacacgcttcctcccattgatccatggatgcgatccatggatgctccacctgagttgtacttttcttccatagtctgcaatattgaatattggagccatgtggattttacaatatccaaattgctttgattcgagagagagaggctgttctttcctggacgctctcagacgctcagtgattcagaactcgtttttgtttcaagtcttaaaaatcttgccatgcatgataaacctcttaagcaagacactgtactctggaatgtgtgcgtcgatgcggactccaggcctcgccgccgagccggggtcattggctgaggctgtatggatagtgtcatccttattttgtcctgctgctttgtttctcttccgggggcaccgttgctacacatcctggaattaaaggctgaaaggtgagtgagaaccaatgtctgtgtgtgtctggcttacacattttcatgtaacctctccatgtagttgtgcagctctttgcagtccccagggtccagatcctggcagacccacttaatgtcatcctcgctactcatcacgatggagttcctggtggggtactcgtcgtctgaggagacggcggtgaaggtggtaaattttacccttttcctttttgaggtaggggatgttgggggctcacttttctgatctttcccatcaatgatgatgggtcccaaaggtttgaacagctgcccattgatgcttttttgggagtttgtgctgaggagatatttactttcctcgaaatccatgcccctgtcaatggcagtgatttgctcatcttgcgaggaggcaaagttgatgtgattctccaacagctctgtccggttgcttaacccaacccagtcatgagagtgactcatcccttcctgctcctcgaagggaacctgtttgtgtctgtattttaatgcaaaggtcacacagtttatcaagaagaccaaaatggccaaacagaagactcccaacaaagcatacatcccaatttctaagtcgctcagccctttggatgcctgcataaggtcattcccatccatttccccattgcttctggggaggtccacctgggctgggaagctggtgaggtcgctggggatggtctgcaagtggctgttgtcatctaaaaggctttcctggcctttcttcttctgcaggatggacctgtctgtcgtggtgccccgtccctccatgagtcccatagaagaactgccatagtactgtccttcctgactcccccattcctgcgagggttttttgggccttctgtcactgacattgttttccatgtgaacccctgcccctgtgtgtctgctgtcactggtgttggggttagcatcgttttggccaaatttaactttgatgtttgccgttccaacagctaacacactcttccgcttggatttctggcaggattcactaataaccatttccaccttgaccagggtgccttgtccttctgtttccgcagcaatgataggccacttgaatttggggtcttggtggatggagactaccttctcatccaaagatgtggccatcaaggagaagtctttcccatcgtaaatatccaagggcgtgactgagccatcactgaactggacccagcaactgatggctgcttcctatggagaaaaatatgtaagttaatcaaatgggccaaaaagctcattgagccccaagtcttagtacagtagacacacaacggcaaaactattgctacaagaacaaagacaaacctttcaaacagtgtagaaataagcgataagaagtaccaagagtataaaagaaaatgaattctcacaaagatgcaaaaaagcaaaataaaacaacaacaaaatgacaaaacagggccagtattaaacaatccgtaagaagatttgctttttttttttttctcctgtaggtgttgttataaaaggaagatgggcccttgggctgttcagaatcaacttctgaacaataataaattgcacgacaaaggaaattactggttagtggaatcatttacaagtgttacacattcaaatgaaaaatatttattacattatttttaagttgtaatactgagtctccactgattactggcaatacagataaaagcctctgatctagatgaggtcccactgcagggctgcaggctgtggttttgccagccctgccttttctgggtctgcaggagtggatctgtcctggcctcaggccatagtcttggcttggagggaggagttaagcctgacagcaggagagggagaagcatcttgattggagagtcttcatctcttcctccacccaacccaactggaggaaactggaagaccaaaaagcagccagagcttgttttcactttgttgatttagaccaactttctttgcaaatagtttgaccaggcagatcattggagataacctccaatttcatgccagcctttaattttagtgaagatgacattatgcttgacagcagtggcagatccattgcttcctccctccctccctccctctcagagaacctgctccgccccaagcccgagatgatgaacagcactaggtggcccatgaccctgcccgctgggccacagcaacagctgattgaaatgagacagctgctgccattagagccatcaatctcagcaatgctgagccagccagcattactctctctctctcgaacttgaaaccagaaagacaagactgacaaagttatgcttgggaagatgtgtagtgggggcacatataaaattggggaatgaagccctctgatggactatgtataagcaaatgtttgggcatggcatttatccataggaagacaataatgaattagaccaaaataaaaacacaggtgagagagagagtgggcatgaaagtgctgaccttccctttcctccaaggtcttgcagctgggttctgtgagatccctataatcctcataacacatcctttgttatttaagcttttgcttgagtggatttttttttctcttatgacctactggcccctgaccatgacagaagtaattttacacagttgttgtttagtctttggaagtaagaagaaagtctcctcaaatgtggctggtggcctctgctctttccttcagctcagccaagaaatacttattctgttagacactggcttggactacctgctaagcggataaccttgccaaggcacagtgcaaaagctactggacatgacactgacttaccaggttctctcaatcggccatgaaatctgagcagagcattcaaacgcacaacggagttcttgaaactaccactgtcagagccaagttgcaggcagggagtaagagccctgcaaaccaaccatggagcaaatctcagggtagcgtgtttagctctgcatgtcaggaacggattagccttctggccttcttctagctgcatcttatcccttccttaacgcctagctggtggtccgctgatgttatcacccacaaagacagagaaaagcctcaggttatttcttcattgctatctgtaacttgcctctcggctggcatccttccttgagaaaaggaggtttgctttggccaagaattcgattctgttattgggatcaaccactttcaagtgttttctaacccaaaactctgcaaacaaagactgtagtataaggactaggagattagctcatgcctgagaggggagcattatgtgacaggtgcaggctgggaaaatgggaaggctctttgtgccccttagcaagtccagtgtggcactcctgcctcctctgaacatggccacagccgcagctggtgcatgaaggcagggaaggcctggtacctcaccctgccgaggaagagtgcgcagaaaaggctcctgatccagaagggaagcagtcagaacaatgtcccatatgggccggagggattccagctgccccacatgaggatgatcccttttcatggggcaaaagaactaatgacctgcaaccaccatgttttgttattaagcaagcttcacccaaattcctatgttctaagaaataatgtttatccacctctaatgagggagaacttactacattcaaaggtcccctataacagtcccctttgtaagccattgtatccacatacaaacacatgcatcacacacatacacacaacacacatacacatatacatgcacacaggcacctatacaacacaagcatacacacaacagaaaatacacaagacacacatgcatacggacacacataaagcaaaaacatatatgacacagacccacaacacacacacatatgcacacatacaaacaacaaatagacacatgcaatgcatacatacaacacacgatacattcacaacacacatatatacatgcatacaggtgcctatacaacacaagcacacatgcaacacacaacacaaaacaagcaacacaaaatactgacacaagacacacacatgcatacacagacacacaaaaacaacatatatgtacacaacacatagacacacaacacacatatacatatgcacacaacacacaaaacacactctattagctcacactggttccaaataaagtaaaagaaaattgtgactgacatctccatgaattctctgtttctgccttgagctgaacaatgaatggtctggaagcgatctcccgccacaggctccccactcagcaggtctgtcaccctccgctccagcaggaccttggcatcaggctgtgcacctgctctgagcctgcacgtgccctcatgccctcatggaagcaggaagcgtgtggagagcacaggtgaccacctgcatgcacttgcactatggtggatgaggggtgggcctttcctccagggctcctgccccttaatggcttctcatttttcacatgttgcaatccttatgtatatatgtatttatttttttcatctctgcatgggggagctgggaaacatgaggcagaggagtcacctgcttcagaagagccctttgcagatggagaaacaaacgcccgatatatgatcccactctattgtgcgacccgcctggcgtggtgcctgcctggtgtgtgatccacttggtgagggaccctgctgaagtgtgtctcaagccctcctccatacctgttttggcctctgcagaagttcctgagccactgcagtggcaaagatggccctgttgcttcctgggctgagctgcaaggagagtgacagccctgtcaccagctgcaccccgaggtctgtgatggtcaccttctcgtccagcacagtgatggtcttttcagcgaggatggtgtctgacagaggagacaggatctggagggcagaagcgacatgacaaggaaaggctttctgtggtccaggcaatgcctccagtcacaggaggaagtgccagtgtgcaggcagcggcagggcaacatgtgagccagaatgaatgagaacaggcctttcccactcacaccaccttctgaatcatatgtattgcttgagaaaatgtaatgcattttttgcataaagcaaggtggtgtcaaggagtgggcaggtagggcttggccctctccccacaccccacacatcagctccgtttcccaccatgctccatcctggacaggaggaactgacgttttcattcgactattagctttatgattcttctacagcacagtgtgtattttgtttaaaattatttattttacttaaatgatttgtttttttcaaaagccttcctatcaccagtgaatgacgggttgggtgtactggttacatattgatagctttcgctcttgcacataaaaaccaatgtgcaactagaaggcggatcctgctggtccatctcaatcacgcgtgtcactggaggccacactgtacactttgggaaacgcagcgcatgatgcctgttgatgaggaatatcgttgggcatattctgataaacgtaggttctgaatgtctacgcctgatgcccacaacccaaagcctcatttctcctctggacacctggaatgacctggaaaatgaggcttatgtgcaatttagaccctgaacaggaaatcctgcttttgaggaacgtctgtggaatcacttcttcctcctctcacccttcgcccaaatgataaacagctgtcttagactcctcacagccccgtataacaaccttccttctagaagagatgggcttcatcctccattctcctgctttctcgacctctttctcttttcaagtttttggtgatatttatgatgtaggtcaagacagcagttttcccaggaccctttgagaccaggaatcaaagctccatacttctacccgaatgccaccttcactttctggtccgattgggacaatttaaatggtggcgagcatgagaggtgtgtccccagaagaaagtggacaagtgaatttatgactcaggaggacacagtgagaaaaaagagaaaagaaccaaggctcgcaggagtagaggcctcaccaaaataatgttcatgtttaatgtgtgggaagctggcccacttcctcttccctgacacctggtttcagaacggtatggcttttcccctttgcacttaaattatcacttaagggaagatgttaataccaaattctcatctcgctgtgagtttctgggcatcagtatcagtttagcctatagatttatggtagggattcaggtctttcaacttcttagtcaattgtggaggttgcaagctctcatctatgagacagatatgttttgtctgacataaatcatattttaaggtagaattaatgaccatcatttagagagccagaagattgcatataaaaacagacttccagcttttctggaaaattgcaacatatggctgcagtagacttgcgtttcttcttggcagcttttggctctgagtaagagcttgccccttttccacaggcaccaccactccctgttgtctctctaacactcagaggaaaatcagctgctgtctgtctttcagcacacacccagcctactctcctcactgatggtagcttctcagcctttagagatcattagagcatgcgactcctggtctacggcccaaacccatttattttcctccttggataaaatgaagtgttagatataccagccaattttccagaatggatatgttttaaatcttccacgatccaatctagtctcagttataatgattcctcatgcacagctgttttagaaacctcacagattgcctgataagacaatcgcattgcctgcagatggggcagctgctgagtaatacactcttcctttggctacaatgtacactatttgggtgatggctacactaacaaggcagacacgcaatatgtccaggtaacaaagctgcacttgcaccccttacatgtacacagaaagaaaacaatctcttgctttgttctcagctgggaggtaaatgaccaaacccttacaagcctcccagaacactgttttgttaaagtgtttcaaaacccaagtgttgccactggtcctctccgtcacccgctccccagcagaaggggcccacgagacatatggaggcacaatcacttcacttcgtcctttagcacatttctgagttgttcaggttctcatcaggcccgcggctgtgactcggtaggggcggccacaatatcctgaagccgtgggaaggtttaggtgaccatgctcagtggcggaaagtggctcagcaggaagttgctggccgtgcctgtgattcagatcaggtaagctcacctcaaaagcttgtttaccaagatggtaacgcctaccatggcttgggcaaaatcatgtgtttcaagcgtgagccaccatgggagccagcccagagtttctcccctataagtaatatgtgaggaattttgagattctcatcacatcattacatggcttgcattgtggttttgtctgagatggggtctagctccatcatccaggttggagtgtagtggcacgatctcagatcgctgcaacctctgcttcccaggcccgagcgatccttgcacctcagcctcccgagtagctgggaccacaggcatgcaccaccacactcgggtaattttttgtatttttggtagagatggggtttcgccatgttacccaggctaatcgcaaactactgagctcatgacctgcccgcctcggcctcccaaagtgctgggattataagcgtgaaccaccacacccagccaaaatcgcttgtattgcttactccacaatttctttgaatttacccatcctaaaaatagataccattcccagcaatgacaaacagctggtttctcctctaggtagagcagaggtgggaagacagagagatcttgatttggggatttttttttttttttttacctgaatggtggtcatcccaagctcctgccccatcaggatctgtccgccttgcagcttggcgatcctgggctcctccacctgcatgaagtcatttatcagctccgtgatgtccacttgccagtctgagcccagcaggtgggccaggtgtcccccagggccggccgcctcagccacaaactgcgtcaggacccgcaccatggcgtgctggtactgcagggtgcagccgcggcccctccgctcatcatcctcctcctcttcactgtccccggcaggcctgtgaaagaagcagtgcagtttgcagacagttacttgttggtcctctgtaaggggccgtgtgtggagcctggtgggggctgcagaggtaggtaggccatgagacttcaaggagtttatagccagacatgcagaggtgaacttcagatactaaccactgctctggcatgagcactgacccatcagcatggccggtgcagccagcagagtttaaagtgttcacagtggcccctcacctcctggtgaggggtttactactttgtgtaaacctctccctttgagtgtgggctggacctagtttctttcatccaatgaaaaagttatggcaaaagtgattggatggtcactttcctggctagacttgaaaagcctgtgacttctgtcttgcttgtgttttctttccttggttctttgcagttgctcactctgatgaagtgaggtgcatgctgtgagccaagctgtagagatttccacccagctagaagctgagagtgacctctggccagcaccagtgaggaactgagactagccagcaaccgcacgagtgagcctgcatgtagatccttccccacatgagccttgagatgggaccccagccccactgacacttggactgcagcctgtaagagaccctgctcagaagacccagctcagccatgcctggattccagatccacagaaactgtttgataatacgtgttgttctttctctttttgtgacagggtcttgctctgtcacccaggctggagtgcagtggtgcaatttcagctcactgcagcctcgaactgctggactcaagcaatccttccactccagcctcctgaatagcttggactactgtgcaagccaccatgcctggctaatttttaaaattttatgtagagatgtggtcttgctgtgttgcccaggctcaaactcctgagcttaagccatctgcctgcctcggcctcccaaagtgctgggactacaggcatgagccaccatgcctggccagcatgttgttcttttaaaccacattaactttggggataagttttaaaccactaaggtttgggataagccactacgttagacagaatggatagctaacatgacaaggctagggatgagtggtgtggctctgtaacccagcacacaaagcaggtgaatatgtaacccaaggtgaggccaaatgtgataagaaaggcagagagggccaggatgcttggaaggagacagatgtcagctgctccctcaacatctggtcccttctgtgcagtttgccctttgatggcaccttctcggtctccatcagaacagcagctgttccctctcacactcactccactgccatgtctgaaccaggcagctgtgacagcgtgtgggatgcactgcagtgagactcagccaggtctttggggaatcttcccctacagttttttccctccgcagcgccaacggtcattctctaatccacaccctcaactcaataccagaaaccccagagactgagaaagaatcattgctgaagccagctcccaactgtccctgagacccacagccttcgtccttgaagcatcccctctcccaggggccatgggaccaaaggaatgagcttgcaaggaagggaatataagttctccctcagataagccccaattctccaccccctgctgagtacacagattccaggaatatttccttgtctcataatgcatatacttttagcaatcaacatgtccctaatacatgaattcttatacacggtttctctgagatgacaaagtctgtgaatgaagagcctgagctcctaccactctctttacatggtactcatgtggttgcctgacggtagatggtggagactcctgggactctaccaagcaccatcggggtaatgtaccagacactcagtggacaagcctcagacctcatttcaccaaggcagagagctcagagcttctggactggagcgcagagaggcagttcaggtcaggttgaccctgtcagatgtccttccagggaacatctgctgcctcctcctttccagcatcaattttcccttctcctagaatttgttcattcgttcagccttggtgcacctcttcctctagctcctctggctctaggtggggagtccagccagccactcagtgtgtttgagggccttggctacagtaactagataagggaggccacaaaatcccagtgaggataagacttaaattcaggactttgctggaactagtgggaaggagaggaggcactttctgctggagttgcagagaagagaggatgaaagcctggaacctcccgaaaaacgctgataaagaatgaagccaacacagagcaaatccaagctgagcggtggagggaggcttggtccttagggtaccacatgcatcctcagacccagtcatgcccaaatttaccaccccgtacacttcctccttagcctgccatggagtttcagggacatacccacctcctgctggagacgatgggcactctccaacccttgatctgattgagctcggtgtcggagacctcgatctgcagcggaagccggggcacccacaccgtcatctccagggggctgctcaggtgctggtaggtgaagttcaccaccacgttgaccttgcctttcatttctttcccattgacaaagacgtagtcacatctgtcagaaacctgtgaagaggtgagagagaaaaggggagggaaaggtgagctttcatcccgttgcatggcccaaggaggaggaaagggaagtgccctggctggtggaggtgcttccctttcctccccttactatgggggaggaggtcctggtatggagcagacattgggtgttgcttttgagtaataatagcagacgctgttatgaaaggtgctctctgagtacccaggcttcctggggtccctgtggctaggttggtggactcctccccaggggctgcgtgtgttgccgacagctcctgccacatcttccgtagaagactgcccttaggtgagtggagctgtgtccctcagagttacccgggagttatgtcctgctcaccccgcttctctgcccagtgactacctggtggggtgagaagcccaggctgtttgcctcaaggagggacccatgcacagcacagctcattcttaagagctcctcaaggagctggctgtgctgcacctggacctgaccttgcttagcccctcttcttccccttctactgtcttcactcccatgcgggtgtatcctgagaacgtcctcaacagggcatgtgcagaccactttcccctgcaggcacggggtggattctgaggcccgtcctgcagagttccctagaggggctcgacgaggcacaggggtggattctgaggcctgtcctgcagaattccctagaggggctcgatgggacttcacagaagttgcccaccatgcgagctagctcaatgatgcacctcctgctggttttccaaaatgtgtcctgtcttgctgctcactccctcattctgcctccagagatcattccccaaataaagcacctgttctcaagtgcacgtcacaggctccgcttttcagggaatccaaacatgcggattcctttcatcctcagaacaaccacaacgctaggcaccactgccattcccacattccagatgaggaagccggcaggagtgggggagcctgcctatgttcctctaccaggaagggcagagccaggatttagccccagaagtctggctccagagctcaggctgccaacttctacctggtgcaagagggctcctccatgccagcgctgatgggaagaagcaagttcaatgtaaggattttgttctcttgtcttgtctcctagctttcctgggggaaggcaatgagtcctttagttttcatcctaaacaagaattgggacatgtcttcgggagagtgtgggagactaaataatagctccgaaaggtatccacatcctcatccttggtatctataaacgttaccttacttgtcaaaaggtatgtgaccaaattaaggatcttttcccctcccagctttactggcaaataagtacttggcaggtacaactgcatcactctaggctgtacatctacaacatgatgttttgatctacatgtgtactgtgaaataattacaagttagctcacatatccatcacctcacatagtcacgcgcgcgcgtgtgtgtgtgtgtgtgtgtgtgtgtgtgttgtggtgaggacatttcttaaaattcgtatatatttagggcgtccacatggagttttgtcacatggatatagtgcacagtggtgaagcctgggcttttagtgtaaacatcacccaaataatgtacattgtacctcttaagtaatttctcatccctcaacctccccctaacctccaacccttctgaacatccagtgtctattattccacactctttgtccatgtgtccactgtatttagctcccacttataagtaagaataagtggtgtttgactttctggctttgagttgattcacttcagataatgacctctaggttctactcatgttgctacaaaagaggtgatttcattcttccttatggctgaaaaatatttcattgtatatttatatattgtatatttattgtattatatatacatactatatacaacatataatatataatacaaatttgtatcatatatacaaacttatatatacaatgtatattgtatatttatatatagcattatatacattgtatataaatttgaaatatatatttatgtatattgtatataaatgttatgaaaaggtaacgtgtgtataacatgagtgcaggtattttttcaatgtaatgatttttcttttctttgggtagatacctggtagtgagagtgctggatagaattttagttctttgagaattctccatactgttttccataattaattttccatactatgttatattcccatcaatagtgtataagtgtgataacattgaagaccccctgtctttgcaaatcctaagtctaccatacagtattattaactagagtagccatgctatacattagggccccatcatgtattcagcagcataactgaaactttctatctttgaccatcctctctccatgtcacccacttcccagctcctggaaacccccattcaactttgtttctgtgagttggacttttcccgacgtataagcaacgtcatgtaggatctgccgtttcgcgtctggtctagtgcacttagcgtcatgtcctccaggttcatccatgttgttggaaatgctaagatttttttctttgttaaggctgaatagtattccaccgtatatatacaccacattttctttatccattcatccactgagagacacttaggttgtttccaaatcttggctgttatcagtcattaaattaagggtcttgagatagatagggagagcatcctagattacttgggtgggccctaagtggagttgactgtccttataagagggaggcagggagagatttgactgcagcgggagaagaaggtcctgtgaccacagaaacaagacgctggaagatggaggcagaggcccaggaaggaaggaggcaactctgggtgctggaaaacgcgaggaagcagattccccactagagcctctggagggaggacaggcctaccgacaccttgatgtcggcccagtggagctgatttcagactttcggccttcagaactggaagagaatacatgggtgtccaccatctcacaaagctgctgggtttgtggtgtgatggtttgttattgcagctgcagaaaacaaattccaggagggggagaatgacacaccgcagagccccggggtgtcctccatgaccgggtgtcctccctgaccggggtgtcctccctgaccggggtgtcctccctgaccgggtgtcctccatgaccggggtgtcctccctgaccggggtgtcctccatgaccgggtgtcctccatgaccggggtgtcctccatgaccgggtgtcctccatgaccggggtgtcctctatgaccgggtgtcctccatgaccggggtgtcctccctgaccgggtgtcctccctgaccggggtgtcctccctgaccgggtgtcctccatgaccggggtgtcctccctgaccgggtgtcctccctgaccgggtgtcctccctgaccggggtgtcctccatgaccgggtgtcctccatgaccgggtgtcctccatgaccggggtgtcctctatgactgggtgtcctccctgaccggggtgtcctctatgaccgggtgtcctccatgaccgggtgtcctccctgaccggggtgtcctctatgaccgggtgtcctccatgaccggggtgtcctccatgaccggggtgtcctctatgaccgggtgtcctccctgactggggtgtcctctatgaccgggtgtcctccatgaccgggtgtcctccatgaccggggtgtcctccatgaccgggtgtcctccatgaccgggatgtcctccatgaccgggtgtcctctatgaccgggtgtcctccctgaccgggtgtcctccctgaccgggtgtcctccatgaccggggtgtcctccatgaccgggtgtcctccatgaccggggtgtcctccatgaccgggatgtcctccatgaccgggtgtcctccctgaccggggtgtcctctatgaccgggtgtcctccctgaccgggtgtcctccctgaccgggtgtcctccatgaccggggtgtcctccatgaccgggtgtcctccatgaccggggtgtcctccatgaccgggtgtcctccctgaccgggtgtcctccatgaccgggatgtcctccatgaccgggtgtcctccatgaccgggtgtcctctatgaccgggtgtcctccctgaccgggtgtcctccatgaccgggatgtcctccatgaccgggtgtcctccatgaccgggtgtcctccctgaccgggatgtcctccatgaccggggtgtcctctatgaccgggatgtcctccatgaccgggtgtcctccctgaccgggatgtcctccatgaccggggtgtcctctatgaccgggatgtcctccatgaccggggtgtcctccatgaccggggtgtcctctatgaccgggtgtcctctatgaccgggtgtcctccctgaccgggtgtcctccatgaccgggatgtcctccatgaccgggtgtcctctatgaccgggtgtcctctatgaccgggtgtcctccctgaccgggtgtcctccatgaccgggatgtcctccatgaccgggtgtcctctatgaccgggtgtcctccatgaccgggtgtcctccctgaccgggatgtcctccatgaccggggtgtcctctatgaccgggatgtcctccatgaccgggtgtcctccctgaccgggatgtcctccatgaccggggtgtcctccatgaccggggtgtcctctatgaccgggtgtcctccatgaccgggtgtcctccatgaccgggtgtcctctatgaccgggtgtcctccatgaccgggtgtcctccatgaccgggtgtcctccctgactgaggtgtcttccctgaccggggtgtcctccctgaccggggtgtcctccctgacgggggccttgctggttaagcttagagggggatgtaaggggctaggacccctgcttgttgagcccctaacacgtgtcagggttggaggctgaacgcgcttcctgctcatctcacctagtgttcacagccaccccagcaggcactgttattgtcctcatttcatgggtgaggaaccagagcccggagatagaacttttcaccaggacacagggggcagggaaggggcgtagaccagattcagcccaagtgggcgcctgtggcctcctgctccaggacagctgtctctcctgcctgagggctctcttgcagtctgcctttttagaggataaaaacctccttttagcacttaaaggggtgtgaggaaaagcacagcagaaatgacttggctgttcaaacattgtaaagagcatttcctatgcaggcccctttcaccttcacgatgaggcagtcaatgtatgagagcagccgctatgagcttccgtctccagggtgatcgatggcgctgaggagaaacgtgggcccaggtccggttaagagtgggtggtgcttgtgtcttcagtatctgccaccaacaaaagtccttaaatctgattgaaaagctgaatggcacatgctccagtggctttattatcatctgtggcctggccacagttctccttgcttcaggggccagggtgtctttaatatgaggcttttcctctctcaagtgttccatttctaactcaggctgaatcctcataggtgagctgacttctcaaaagaaagaaaggggctgggcgcaggctcacacctttaatcccagcacttggggaggccaaggaggaggatcacctgaggtcaggagttcgagaccagcctggccaacatggcaaaaccccatctctactaaaaatataaaaaaaattagccaggcatggtggcatgcacctgtagtcctagctattcagaaggctgaggcaggagaattgcttgaacccgggaggtggaagttgcagtgagccaagattgtgccactgcactccagcctaggtgacagagtgagaccctgtctgaaaaaaaaagaaaagaaaagaaaagaaaacgggttgcagaatagagaaaattgagccaacattcaaaactttgatgatttcaacttagaaatttagatttctagcatcgcttgagaattcagacactggcaaaatggggcctccaatctgacttggccctgatggggcagagtggcactgaggtttccagtccttcccaccccacagtgtctttttggccccagagttgaccagctttatttatggtctacctcatcactcttctaatagagaaatgtttctctcgggtcatgtctccacccaaaagtggagaaaacagaaggggagggagccgtgtgtttccaagacaattcggaaagggtacattgctttatgaaagggaagaaaattcctgtgcgtctcctaggcaaatatagaatgtcattgtctaatgaacacaactgaagatgccattatgatattccgtcaggctggtctctgaagaccttacttatgctcacctgggctctgggaatcttacctcagtttacctgggctctggggaccttacttccgttcacttgggctctggagaccctacctaagttcccctgggctctggggacccttcctaaactcacatggtctctggggaccttatataggctcacaagggctctgaggaccttacctatcctcacctgggctctggggacccttcctaagctcacatggtctctggggaccttatataagctcacatgggctctgaggaccttacctatcctctcctgggctctggggaccttacctatgctcagctgggctctggagaccttacctatgctcacctgggctctggagaccttacctatgctcacctgggctctggggactttacctaagctcatctcagctctggagagcttacctatcctcacctgggctctggagaccctacctatcctcacttgggctctggggtccttacctaccctcacctgggctctgaggaccttacctatctcacctggactctggagatcttacctaaactcaaataggctcttgggacccaggttcctgagcctaggtgagcttaagaagacacaagcctagtcccccatgagtggacctggccccaactccatcctggtctggagagacaatctgagatgtgttcctccaacagctggatggagcagaacttcttccagcattctgacattcatccttgccttcatagctctgttcattgcattagattgttagacattccaaactccccctctgggagatgaactggagaaatgtaatggtctaggtgagccggcaagatctgtcattacttctcgttaaaatatgactaactgtacatgtcatataatttattaactaccacattacaatgctgatggtttgaagggatgatctattaaaactcttgaacccctttcataatccatttccagccagtcacactgttccgttatagggatatagttaatatttctgactctggtgtgcataatccggcacttatgtgaatttaatgccatttccttcttttctgtttaaatgctgtatgaatttaaatcttatttaaatatcaccaacattcttggttaaatttatgttctaatatttctctctttccttttttttttttttttgttcaagagctacagctacagttgttgaaattctgtctttttttcccctcaaactttgcagaagtagacatcctacaggaatgcttgcatccaattctcaagttaggtagcacctttttgtgcttagtctctgtcttggattaaaaatgtggatcacctgaggtcaggagttcgcgaccagcccggccaacatggtgaaacctgtctctattaaaaatacaaaaaaattagccaggcttggtggcggcgcctgtaatcccagctacttgggaggctgaggaaggagaatcgcttgaactcaggaggcggaggttgcagtgagctgagactcgcgccattttactccagcctgggcaacaagagcgaaactatgtctcaaaaaagaaagataacattaataatagtggtaacaataatagtagtggctaatattcattgtttgctacatgcaaggtactgtactgaatgtcaataacttcttccacttaatcctcacaacatatctattagattggtacccttacccccatttgccagataagaacattgaagctcagtgtcctatagccatgaggggcctgccacactgggctaatcagagaagaactttagctcattatactaggcttatttattggaaaacaactttccctaactcaggtatatttgttaatgaacaacacacccttttctgtcaagagataagcaagttttaaatggacgcactggaggacacactggacacagttccaaatggatgccatgcaggacatgctggaccagtttcaaatggatttactagactggaagaggatgtgcagggacatgccacagatgggcttcgggtcagcagggatgctccatgtacagagggaaaaacaggcaacttgagcctattgtgggctgaatttggtcccctccctaaattctgtttgcagatgacatgattgtatatctagaaaaccccatcgtctcagcccaaaatctccttaagctgataagcaacttcagcaaagtctcaggatacaaaatcaatgtacaaaaatcacaagcattcttatacaccaataacagacaaacagagagccaaatcatgagtgaactcccattcacaattgcttcaaagagaataaaatacctaggaatccaacttacaagggatgtgaaggatctcttcaaggagaactacaaaccactgctcaatgaaataaaagaggatgcaaacaaatggaagaacatcccatgctcatgggtaggaagaatcaatatcgtgaaaatggccatactgcccaaggtcatttatagattcaatgtcatctccatcaagctaccaatgactttcttcgcagaattggaaaaaactactttaaagttcatatggaaccaaaaaagagcccgcatcaccaagtcaatcctaagccaaaagaatgaagctggaggcatcacactacctgacttcaaactatactacaaggctacagtaaccaaaacagcatgtactggtaccaaaacagagatatagaccaatggaacagaacagagccctcagaaatgccgcatatctacaactatctgatctttgacaaacctgataaaaacaagcaatggggaaaggattccctatttaataaatggtgctgggaaaactggctagccatatgtagaaagctgaaactggatcccttccttacaccttatacaaaaattaattcaagatggattaaagacttaaatgttagacctaaaaccataaaaaccctagaagaaaacctaggctttaccattcaggacataggcatgggcaaggacttcatgtctaaaacaccaaaagcaatggcagcaaaagccaaaattgacaaatggaatctaattaaactcaagaacttctgcacagcaaaagaaactaccatcagagtgaacaggcaacctacagaatgggagaaagtttttgcaatctacccatctgacaaagggctaatatccagaatctacaatgaactcaaacaaatttacaagaaaaaatcaaacaaccccatgaaaaagtgggcaaaggatatgaacagacacttctcagaagaaaacatttatgcagccaaaagacacatgaaaaaatgctcaccatcactggccatcagagaaatgcaaatcaaaaccacaatgcgataccatcttacacccgttagaatggtgatcattaaaaagtcaagaaacaacaggtgctggagaggatgtggagaaataggaacacttttacactgttggtgggactgtaaactagttcaaccattgtggaagtcagtgtggtgattcctcagggatctagagctagaaataccatttgacccagccatcctattactgggtatatacccaaaggattataaatcatgctgctataaagacacatgcatacgtatgtttatagcggcactattcacaatagcaaagacttggaaccaagccaaatgtccaacaatgatagactggattaagaaaatgtggcacatatacaccatggaatactatgcagccataaaaaaggatgagttcatgtccttcgtagggacatggatgaaactggaaaccaccattctcagcaaactatcgcaaggacaaaaaaccaaacaccgcatgttctcactcataggtgggaattgaacaatgagaacacatggacacaggaaggggaacatcacacaccagggcctgtcgtggggtcgggggaggggggaaggatagcattaggagatatatctaatgctaaatgaagagttaatgggtgcagcccaccaacatggcgcatgtatacatatgtaactaacctgcatgttgtgcacatgtaccctaaaacttaaagtataataataataaaatttaaaaaaaaaggatgaatagataaaaatgtcttcacgtggaaaaaaaattcaaatgaatctgactgtatttggaggcagggtctttataggggtgcttaagtaaaaatgaggtcactaacataggcccctaacaccacaatatgcctgctggtttttttttttttttttttttgagacggagtctcactctgtcacccaggctggagtggagtgaagtggtgcgatcttggctcactgcaacctctgcctcccaggttcaagcagttctcctgcctcagcctcccaagtaggaactacaggtgagcatcaccacaaccggctaatttttgtatttttagtagagatggggttttgccatgttggccaggctgatctcaaactcctgacctcaggtgatctgcctgcctaggcctcccaaagtgctgggattataggtgtgagccactgtgcctggcctggtttccttttaagaagaagagatcggggcatcagggcacacagggtagagagacaccagggatgcacaggggaacggtcatgggagaacacagtgagaagcagctgcccccaggccagggagaaaccaaacccgcacacacctaatctctgacttccagcatctgcaactgtgagaaaatgaagctctgttgtgtaagccacctgctccttggtattttttttgatgggaaccctaggaaactgcaatcaactgtgcagataaatacagtcagccattcagtccctagagcctgctttcctattccaggaggaagttgccagcctgcatggagaggaggctagctgggaacccaggggagagccagctcctggtgggggcttcatagatcagaggtgttaaagctgccatcgaggacaactgtctacctggcagccttcccaggtatgcacatgcagtgagttgtttgattgtgacagtaacccagcaaggtaggcattattacaatccccactgtgcagatgagaaactgaggcgcgatgagattaggtgacttattaaagttcacacagctaggatgccttggatctgggattggaatccaggccggtctgggtcccgagtcggccgtcatatgcctcacatgccacagtgggatcgtgaggtctctggggagcagaggctgagacagaaggtccattaggccgtgatatctgtgaaggaggaagggaaggacccaggatggcagcgggagctcttggatcaagaggaagacccaacaacatttctgccaactcaccggaggggtctggagcaaagactgggtgttcagggaggagccccactttggtgaaagtggccagacccttgaaccaccatctttgtcaatagctggggctatctgaaaaagagcgggactcagctcaaaacacagggaccccaaggagttaagcgctgggggctgcctgctaccagcactccttgaggctgagtgacagtgctttctggaagaaagtctgagtctctttccccgtcagccacagtgggcctcttagttatgacatggaacagggatattctggagtttttggagtcatctataccagaagattccatatatagtccatattctatagcctattttcttctaaaatcagaaattcaaattcccaggaagctctgttatttttaaatgaaaacagaacatttttacacaacctcaaatttccactttcagtcctttcctgggtcagaggaaataatgcattcggtgaatgttctcttttctttgtcctcaaaaccgtccatgtggcctgggtcataagatctcagttgtcttctcacagtcactgatgagcagtctgataggaaatcattttaataacaagccacccaagccgctcttgccacgtgccaggtgctggtcctggccagggtttctctgcccctgccctgtccacatttggggctggagagttctttgctgtaggaggctatccagggcagtgtaggctgctgagcagcacccctggcctccacctccagatgccagtagcatccctctctccagcggtgacgaccaacagtgtctccggacattgctaaagaacccctgggcggcaagagcacccccggttgagaaccagtattctcagccctgtttgtaaatgtatttgtttaagccccatgacacagcttttatgactctctgttagacagatgaggggactctctaaatgaatgcacattctctgtatgtttctttttctttcttaaaaaaacaaacatatttatgaacatttacatcgcctatatccatagaagaaacttaggaatgagtaactcaaagagatgactaaaatttgagtatatgtagcatcttccacaaagaacaataattttatagagaaataacaggagaagggaaatggccttaggcctccaatggttgagaaactacagaaaggtaaatatatgggggaaactcatggagaaatgtttgtttgcagattttttctgtgtcaactctgggctaatcatagtctagagttatctccagtaaaggagagtttatattgtccatttacgtagaaaaggagagggtagacagaacttttcctccctttgtttcttattaatcacgtttaactcaacataattcttatgtcaaaaacacatatttttgggtaacattctggttcccttcaagctgaaagcttgtattcacaaacaaaaactgcatacgcagaagtgtttaattttaataaagtccagggaatcaattctttctttcatggattacacctttggtgttgtatctggaaagtcatcaccaaacacgatgatatctagaatttctcctatgttatcttctaggaattttatcattttgcatttttacatttagttctgtggcccactttaagttagtttttgtgaggacacaacccagaagaataagatcagaggactgacgtgactcaagttcaagactgcctggaaaaccgtaatagccaagacaatgtggcattgctgaaggaataggtaaattgatgaataagacagaaaagagagctcagaaacagacctgcataaatgtggccaactgatcgttgacaaaggagtaaaggcaactcaatgaaaccaaagtctttgacagccttttcagtaagtggtgctggaacaactgggcaccaaaattcgtaagaatgatagtgatgatgatgatgagatgatcacagagcttgcattctcatgtattttgctttttcaaaccatgcagtgacaaatgtcctcgtgcctacctactcgggcacagatgcctttttttctagggtctctaccaagaaatgagtcttacagtaagataaggcagtattttaattccactaactccactgtccttcacaacagccctgtgaggttggtgttattacatctccatttcttctagataaagaaccttgagactctgggaggtgaacgtatgtggtagactgcattttccaaagatggccacaacagtctctcctgcctgctcacgtcctcgccaaagtgaccttattacatctccactggagaggtggagtctaatgcccttgccttgaatctgggctggccttagtgagttgcttgtgttgaggttcagaaaccaacatctcaaaatatgttcccttgacatgctgaactgaataagcagcctcaaggtctctctgaccttccaaccatcaccctcctaccctctcttaatcctctgtctcccttaaagcacaggataaagttctctgaggttcccttttctgcctaaaatctggaccccacaggaagaaaacaatggcctctggtgccttctctgagtttttatccactgaattcatattgcaggaagaaagatggaaatctgtcaacacagccggatagacttttgtcacaaagcatttcctgctgtgcaggccctacagactttgccccaggccactgcccattcctcaagcccattgaatttctctaaaaatcatttactacccctctaaaatcatccacattctcccatcttcctttcccctaagaagaggggtatataactgtctgtacaccttattgcgtcaggttggggtaacaactctgtgattttctctccatgcacactgattaatttttatgccatttctcctattaacctgccatttttgagttgattttttagcaaaacttcagagggcaaaggagaagctttcctttggccctctgcactcagccaacagaatttgacagaagtctgagctttctggtgccaggtcacaaaaaaacctcccacctatgctcctggaacactagcccttcagatgccccctcacagaagccagcctctgtgtcatgggaagcccaggccagactgaggagccacatgtggacccttcagcccaccaacagcaactgctgttcacacgggtggccgtgttgaacatcagcacagttccacctccagacggctctatgcagtctgcaggaaaatgaaggaacacaggaattctcagcagatgcaggtcaagaacaccttcttccatgttcagtcccaccttggcagaaatctgcaacatcctggaaaggacagatgttgcattccattaaaagtgggagcgaaacccactttatttttttttattttttttatttttatttttattttttgagacggagtctcgctctgtcgcccaggctggagtgcagtggcaggatctcggctcactgcaagctccgcctcccgggttcacgccattctcctgcctcagcctcccaagtagctgggactacaggtgcccgccactacgcccggctaattttttgtatttttagtagagacggggccactttattttttatttaattttattatctttttttttgggacagagtctcgctctgtcacccaggctggagtgcagtggcacgatcttggctcactgcaacctccacctctccggttcaagcaattctcctgcctcagcctcctgagtatgtggaattgcaggcacctaccaccacccctggctaattttttgtatttttagtagagacagggtttcaccatgttagccaggctggtaactcctgacctcaggtgatccacctgccttggccttcccaagtgctgggattacaggtgtgagccaccgtgcatggccaaacccactttaattaggtcattgaaggtcaaggtgaccccagcaagttgcagaagacttggagagcgtctgagaggctgacgggttggctccaggccatgcctcatggtgatctgaggtcagttcagagaatctccaccgtgggtttttatgtctgactgatgcagtgcagtcagctgaggatggcagtgaatgtgcagaacttatctttctgtctttccgaggacaaagttactgtaaaaaatcagccagcccaattctatcttccagcaatgcttgacatataataaggcctcaataatttttttctggagtgaatgaaagtattgcccatgtcttacagatgaggcagctgaggctaagtgacttggataagccatcttgctggttccgtagaggtctcctgatgtaaaaagcctcattagttaagaaaactatcatctaagactcccttggccagtaactttcttttatgcaaagagaaaaggtcaatttacaactaaacctaaatgaaatggaattcaaatggtcagggtcaaatcctggggggaggcactgaggaaaggacagctgtctgggggtcggtggcagggactgaagctgagcagcaccaggcggtggcagggattgaagctctgcagtgccagtcaaggcagggatcgaagctctgtggcaccagttgatggcagggtctaagctttgcagcgctaggcggtggcagggatctaagctctgcagtgcagtcggcggcagagattgaagctctgtggcaccagttgatggcaggggtctaagctttgcagtgccagttaatggcagggatctaagctctgtggtgccagtcggtggcaggatctaagctctgcagtgcccatggcccattggttcatcctggccgagcctccaacaaacagccccgtgcagcttctttgcctcgagcatttgtcgatttgccaattcctgtagtataaacgctcgtgatttcatgccgccaacccaaagtcactgaatgcagagctgggaagagatgtgccaccatggcttttggtagctggtatgaccagctcagtggtctccagttactggagtccccaccattccctcttgtcttgccaccagcacttgaatttgcagcccctggagatgtgagcaccaagcaagaaaagaatcaacaaccccagctggctccaaatccagcattccaggttaaaacactatctacaagaggaaactgaaactcctcacagtcagagctacactctacgtttcccgaggttgcttagttactaagctgcagatctcgggtttggaggcaggctttctggcggaggctttctcactccaaggtagttgcttgtttcattacctgatgctgttttttattttttctacctaggctgtgacagttcatttatcatatattccagggacaatggcatttgtactgatagtggaatcgtagaaaataggaggaaaaacactgacagcaaccgaggtcctttgacgtatttcggactataaataaaaacaattagatgcaaacaatatttttgaaaatatagagaaaccaccagtcttttggactccatgattcataatcccccgcttctctgtgtagatgatcaaatttgtgattcaaagctgctgtttttttttttttttctctctctctctcttcatggaatggaatgaaaatggaaacaagccaggtctgtgacagcctagacacttggggagtgagatggagaaggtggcagagatgacccttgcctgggtattttttagtccatttccctctgtgctgttggtacctttctaatccccaaggagcacaaaggaaagtaaacgaggctgcattcatgaatcaggccagtgaactggcaaatgagtcttgcgtacgcagagactcactcttctctttctgagcctgctggaaaaacacccttacctttaatcacacacatacacatgcacacacgtgtacacacttacacatgcacacacatgcattcacatatgtacgcatgcacacaagcacatgcagacacatgcatacacacacaatgcacacatgcacgcacactcgcacactggcatatgcacatacacacatgcaggcacatgcatacacatgtactcacacaatgcacacacacacacttgcatatgcacgcacacacgcacacacacaacacacacacacatgcacacacatacacacatgtatggataaaaatatagataaagaggaaaaactggaaacctcaaaaaaatctctaaatggactgatgtttcttctgctaccaggtgttgaattttgtttctccttttgctaaaactttctctaagcctaatactccttggaaacaaaacccacaatccactctgctgaagatctttttcttttctttgggatcataaaatattctcgaccctgaaccagctgcaaaagtgaagatgaagttaatacatgcttcatatttggcccaaatgtccactttcctgtttacagcccttgaagcttttgcagaatccaggctatgctcttgggaagatagaggctgcattgcccagcacatttagggtaaccagaagcagagtgtggcagcacaggggaacaacaattattgaattttgttttgtagaaatgagacacaggaggcatacatatcagcacatttacgaaagtaaacatcgtggaaggcagttattgtctctgagctccaaatccacccttccatgctctgttttgtgaccctacaaaatcagcatatgtttgatttaccagctgttttcttgtaggctcttccagtgagggaaattagaaggaggcctccaggctggaggaagaggagggatttgctccttcatctcttcttcctgggctccttgtcttcttgctgttcccatgagcattaggacagtaatgcttcaccccacagcatcagttccttcccacagcagcaactggatccagttcacagtgtctccagcacttgcagaaccaggctcatttcactccctcatggacaataccatcagccagcccatgcccccacctcggaggcctggcttccacgcccagatttggaggagccagcaacagctgagcagcaagctctccttggagggagccccatccagacacacagggcatccataagcttccaagttgggataattccaacctactctttgttccttcagcagccgggatgatggctgctttatgcatcaggttccagagtgtcacccaggcctctgctttccctcctgacctcgtgatctgcccacctcagcctcctaaagtgctgggattacaggcgtgagccaccacgcctggcctaggtaaccatctttatgctaaaatatctccgtacaaaatcacaagcattcctatacaccaacaacagacaaacagagagccaaatcatgagtgaactcccattcacaattgcttcaaagagaataaaatacccaggaatccaacttacaagggaggtgaaggacctcttcaaggagaactacaaaccactgctcaaggaaataaaagaggatacaaacaaatggaagaacattccatgctcgtgggtaggaataatcaatatcttgaaaatggccatactgcccaaggtaatttacagattcaatgccatccccatcaagctaccaatgcctttcttcacagaattggaaaaaactactttaaagttcatatggaaccaaaaaagagcctgcatcgccaagtcaatcctaagccaaaagaacaaagctggaggcatcccactacctgacttcaaactatactacaaggctacagtaaccaaaacagcatggtactggtaccaaaacagagatatagaccaatggaacagaacagagccctcagaaataacgccgcatatctacaactatctgatctttgacaaacctgacaaaaacaagcaatggggaaaggattccctatttaataaatggtgctgggaaaactggctagccatatgtagaaagctgaaactggatcccttctttacaccttatacaaaaatcaattcaagatggattaaagacttaaatgttagacctaaaaccataaaaaccctagaagaaagcctaggctttaccattcaggacataggcatgggcaaggacttcatgtctaaaacaccaaaagcaatggcaaccaaagccaaaattgacaaatgggatctaattaaactcaagagcttctgcacagcaaaagaaactaccatcagagtaaacaggcaacctacaaaatgggagaaaattttcacaacctactcatctgacaaagggctaatatccagaatctacaatgaactcaaacaaatttacaagaaaaaaacaaacaaccccatcaaaaagtgggcgaaggacatggacagacacttctcaaaagaagacatttatgcagccaaaaaacacatgaaaaaatgctcatcatcactggccatcagagaaatgcaaatcaaaaccacaatgagataccatcttacaccagttagaatggcaatcattaaaaagtcaggaaacaacaggtgctgaagaggatgtggagaaataggaacagttttacactgttggtgggactgtaaactagttcaaccattgtggaagtcagtgtggcgattcctcagggatctagaactggaaatactatttgacccagccatcccattactgggtatatacccaaaggactataaatcatgctgctataaagacacatgcacacgtatgtttattgcagcattattcacgatagcaaagacttggaaccaacccaaatgtccaacaatgatagactggattaagaaaatgtggcacatatacaccatggaatactatgcagccataaaaaaggatgagttcatgtcctttgtagggacatggatgaaattggaaatcatcattctcagtaaactatcgtaagaacaaaaaaccaaacaccgcatattctcactcacaggtgggaattgaacaatgagaacacatggacaaaggaaggggaacatcacactctggggaccgttgtggggtggggggaggggggagggatagcattgggagatatacctaatgctagatgacgagttagtgggtgcagcgcaccagcatggcacatgtatacatatgtaactaacctgcacaatgtgcacatgtaccctaatacttaaagtataataataataaaaaaaaagaaaaaaaaaagaaaaaaacaaacaaccccatcaaaaagtggccgaaggacatgaacagacaatcctcaaaggaagacatttatgcagccaaaaaacacatgaaaaaattctcaccatcactggccatcagagaaatgcaaatcaaaaccacaatgagataccatctcacaccagttaggatggcaatcattaaaaagtcaggaaacgacaggtgctggagaggatgtggagaaataggaacagttttacactgttggtgggactgtaaactagttcaaccattgtggaagtcagtgtggcgattcctcagggatctagaactagaaataccatttgacccagccatcccattactgggtatatacccaaaggactataaatcatgctgctataaagacacatgcacatgtatgtttattgtggcactattcacgatagcaaagacttggaaccaacccgaatgtccaacaatgatagactggattaagaaaatgtggcacatatacaccatggaatactatgcagccataaaaaatgatgagttcatgtcctttgtagggacatggatgaaattggaaatcatcattctcagtaaactatcgtaagaacaaaaaaccaaacaccgcatattctcactcacaggtgggaattgaacaatgagaacacatggacaaaggaaggggaacatcacactctggggcctgttgtgggagggcggaggggggagggatagcattgggagatatacctaatgctagatgacgagttagtgggtgcagcgcatcagcatggcacatgtatacatatgtaactaacctgcacattgtgcacatgtaccctaaaacttaaagtataataataataaaataaaaaataaaaataaaaataaatgcaatccctatcaaaaaaaagttaaaaaataaaaaaatagaatatctctgtacaaatgactgatgcagattctgtctcttgattatactctgatgaatacaatggaaactgccattagcaggtgcagtcaccatacctgaaagacgtttgtgggcttgggagaaggttgagaatgaccaggcacagatctcctcccactttcctccccttcttgggcagattggaggagggcaggctctgcctccttaagtgtggtatggtcgtgtggcgtgctctggccaatgacgtgggagtagaagcgatgggtgtcacctctgattggaaacacttaagagccagtgcacactcttcttgtctccttctcctgcccaggaggcccatgatgtaggtgcctcaatatgaaggccatctgggatgctgagccgtcactgcatggggaatgcctgccttggacagtcaccactgctgtctttgcctgaacaatagaggcatgttgtggaaggatgctgagattctggtgctgtttgttacctcagcatcccctaactgatcctgactaattgagatggcaggcaagaccttagccgttttgtttatctactgtatcatctagaacagtgcttggcatatagtaggcacacaagaaagaggtgatgaatgaatggataaaagtgagaattcatgtgcaagagctctaataggaaagatgaaatggcaccaaatttctgaaaccataacaagagaaaaacaaacagaaagtttctgaaaccagtggttctcagtcctatcagatatgatatctccaatgctaaatgaatgttttaaagctccccttttagaacactgaaatggaattcacagataatgtcacgtacatacaaggtaattttattaagattaatataatgctctaactggatatcaaatcaagtaaaatgcacttgtaatttaatgatatatatttcaacatgccgtttgagcatgaccacgtgagaaaacatctcttcacagtcattgtaaatgatgcagattgaatgcaggttgacacttagtagctgctgaagacattttccagtgtggggaagaactctctataaagttataacaaagacaaaatattccctgattaaccctgagtttacatttgtgaaaaattcatggttctgcatattaaactacagtgcagataactacagctttcccctctagtttgatgggaaatttacaagttgtgaatgacacagagcagtttttttgagacagtctcactctgtcacccaggctgaagtgcagtggcacaatcatagttcactgaagccttgacctcctgggctcaagcaatacccccacctcatcctcctgagtagctgggactacaggtgtgcaccaccacacctggctaattttttttttttttttatttgtagagatggagtttcaccatgttgcccaggctggtctggaactcatggactcaagtgatcctcctgcctcagcctcccaaagtgctagcattacaggtgtgagccactatacccgtccagaacacaggacaattctttgtcacaagagcctgtcctggacattgcagggcatttagtacttctgacttctgaccatgaaatgcaagaatatgccttgatccttgcaaaaaataatcactcctgaaaatgtgccagacacttacatggtgtggggacagttatgtccctactgagatctgtggctctaaatagaatattctatccctgaacgtccttacatcacacacagaccttccacccatcttagtccacagagggcagtgagccatcacatcgtggccactggcttctccatgttcaccgtgtggcacctagaaaacttcctgaaagttttattttcctcctgattttggcaggtggggccgagagaggctgcctgctttattttctgacctggtttcttggttgcattcctgggtttgggaagatgactcagatctcaaagtcctgggtagtagacgacatacttgcagacgatgtccctggtcctgtttagcttgtggctgggctgtaatgttcagcaggagggagatgactcggctcaggtgaatcctccccaaaggctgtggctggctcaggtgccagggaatgtaatgagccacttggttcattcagactcttctatctcctctgccaattctggggaagcactccctggctcttatatagacacactcagatgcatgcggtatttcccaaacttcagcagtgctcaatctacatgcagaattactgccatacccacacatcgtcttgagttctcaatattttgattaattgtttgaagactttattatgaaaaatgttaaccaaagagaaagataaattgtacagtgcctactcatatacccaatgcctcgcttccgtaagtgacattctgctgtgtttgctctatcgcatatctgtccacttcccagctctctattcatcttcttttctgattcatttccaaggaagttgcaaacatctgtttacccctcgatgctctagactgcatgctattaactagacttcaataatcaatttcttgttttatgtaaaaaacacaactttgtactattaccagagatggaaaactactatcaccgaacatgaacacaattaagtccttttaaatagggatggaaaaagcacaatagcgttagaagacaccaataggatgtgttcagagcttctgcgggaggaagagaccccaggcccgaatggccgtgtgagtttttccttctagataaaggtgaggcattgctaggctctggatctggatgtcctgggttaacattgttccagctccttcactctctggctgtgtgaccttggacaagtcacttaacctctctgtgccttggttgtctcctctgcaaaatggggatggtgatcatggtaccaacttcattgggtggtctgaagagtaaatgagttaatatagataaactccttagacttttgcctgcatgtagcaaacatccaattcatgcagtcaccctctgatatggtttggctgtgtccacaccatatctcaacttgaattgtatctcccaggattcctgcatgttgtgggagggacccagtgggaggtaacggaatcacgggggctggtctttcctgtgctagtctcgtgatagtgaataaatctcacgagatctgatgggtttatccggtgtttctgcttttgcttcctcctcatttttctcttgctgccaccacgtgagaagtgcctttcgcctcccgccatgattctgaggcctccctagccatggggacctgtaagtccaatgaaacctctttttgttccccgttttgggtatgtctttatcagcagcgtgaaaacggactaatacaccctctccctaccagcgggtgtagtctgatgaggtctatgcggcagcgttgggtggcagccatggaggaatgctgttgaaatgtcccttctgtcctcaggggccttcagaagccacctggtcagtgtccgagcatggccaaggtgcagggtggctgctgggactccatgcaaggctcctctatgggcaacctctgcggcagcatttcctgcttggctgcccaaggattcccagtgcttcctgcagtcaggcacttcctgcccggttctccctccttcccatcctcctttcccagggaccagacctgcatcgcatcctgaagctcagcctgcctactccttctccatcttttctttatccttcacaactgcagtcctcaattaatctctggtgcacttaactctgtctgcttcctgaagatgctcatagattctgaggattccccatgtgctgtgatgtgagagttaggggcgagggaggaaaacagccagctccactacctgtctaccctccctcccgaccattgagaaagttccctgttagagattcattcctttggaccatgaagccttttgattcctattaaccttgagtgagtcacgcttaagccttttaaaaaattttctgagtttttgtttgtgaaatataacatatataccaatgaacatgagatatataaatgcgttgtatgaataattagaaagcaaactatattccagcaagcgaaaacataacacactgccccagaagcacccacaatccacgagtaagcacctccctccccctgaggtgcataagtaaggagaggaggggcagaggagctgccaggggaaggaccaaggatgtgctctataggtcagccccctggctctgcctctccttgttggcagagatcagcctgagggccgcgccgcacaccacaggcccatgaccctccatcggagtcaccgggcgctggctgaacaagcaccttcagtgagctctggattacaacacagctatgaaaagaagccagccggtgctctccctacccatatggagagattgccaggcagattccaaagtggaaaagtcagaggcaatacaggagggcctgtgtgcccagctcccactgtgaaaaccaacccagctgatggggattcttctctattgctttgtaggtcgtcgctgccctcagcctccagatgcagcccccctgccaccttcaggacccctggctctcccctggactcagtagcgaaagggtttatgtgctcggagggagaccttcaggaatctgtgcatagaatgccatagtgcagaggaaagtaagactatgcagttgtatttgacttaaaacctccggaaagataaatagggaagcaacaaaacctacagggaacaggggaggaagagggatggggctgcaagccaggggatgcctgcagccaccaggagatggggggaggcagggaggatcctttcccagagcctctggaaggagtatggccctgcctacaccttgatttggatttctggcctctgaaactgtgagagaacaactgtctgctgtggaaagtaacctaggtttgtgggaattcgttacagcagccccagaaaatggaacagctgctaagtgagactcctcagccaggccagagaatgtgcattctgacggactgcttctcatttgcactgatcactgtgagtgtctgatgggtgggcatccggcgcccagagaaggagttgctctattatcctggcactccataaagaacaggtagaaataagcgcttcttaccaagatgaaatccacccatcatttctgaatggctcagttttgatttcatctcccaaggtgggtgataactgattatgaaaaccttcctccctctcagtctctcaacaaaagcctagctttgccggttgctttgagctggagggttctttgcttaatatctagcaatgctagacagtaatctttactaggctaacaggaatgctgtccaaaacgtgcatttcgaacacaacctcatgccatattttcagtccagcattacatatttaatgcgtgtatccagtaagggtaccatccctggtggcacggaggtcttgaccagcagtcaggggtcccttggcactcttcatcatgatgcccgtgttttgctgctggtggaggggcgtgacagtgtcagggctagaaaagtctgctgtatctctgacatcattcctggctccgtagcctctttacctggttttccacccctcttggagattcatgctagtcaatatccttttaataaattgaataagttcaatttctgcgtaaatcagccagagttgctctctgttgcttgcaaatgaggattctaacagtgacaaagattgggtatattagtgaggcctgcctggatgcattctggggtgaatgtatgaaaagttgggaaggacaggcagaatcctcaggctttgagcccatgtaggaaccagggtttacacccgtgctgtccaaggtagtagctgctagtcacatgtggctctataatttcaaattaattaaaattaagtggccgggcacggtggctcacgcctgtaatcccagcactttgggaggccaaggcggacggatcatctgaggtcgggagttcgagaccatcctgaccaacatggagaaaccccgtctctactaaaaatataaaaaattagccgggtatggtggcacatgcctgtaattccagctactcaggaggctgaggcaggagaatcacttgaacctgggaggcagaggttgcggtgagccaagatcatgccgttgcactccagcctggccaacaaaagcaaaactccgtctcaaagaaaaaaattaagtaagattaaagatttacttcctctgttgcaccagctacactaggagactaggagtgctcagaagccacagtggctgggggctgacatattggtctgcacaggttcagaacatccctgtcatcacagaaggtcttggtgaacagtgctagcttagagaataaaagaaaaacctctcttccttgtgacctaaggaagccctgaacctcttcttgctgtgagtgtgaagggagaagccactttgattctactgtgtgaagtgtcccatagtcccaaggtcttgcaatctttgtgctattgctattgagggcagatgctgtaatgatgtattaattgacatagttttcttttttcttctgagccaaatgtttttacttctactctaaaggtcttctttctgaaaccagcccaacttttctcccagagagtatcatggaactgaactttcaagatcatggcatctggacatcgagaaaacagaaccctcatctggccacctgctgctttttgaccaattcccatataaaccgctaacttcagtcagttggagggatggatttgagatttgccttctgtctctcaggtgatgtcaccagcaataaagccttcttccctggcaatactcaatgtctcagtgattggctttctgtccagggggcagatggacctaggctgaacccctggtgttcaacaacactcccatttcaaatagttagcgattcactcactcttttaataaaaacctcccaagaaccaactatgagccaggattacatctgggctctggagatacaggaggaaacaaaatggaaacaaaaatatctgccttcatcgagcttacacactgggggaaaaatgacaatcagtaataagatacattaaaaagacatattagcaacaggtgctaaggagaaaaataaagcagtgaagggtgctaaagtgttctagggtggagagtttgtagctgtagacccgtcggccagcgaaaaccccattgaaaatgtgtcctttgagaccagaaaggagacaggaagaaagcaaagtaagtatcaggggcagagataagagtcatctccttctcggtgggaaagggccgggctgggtggtctctgtagaaggagagcaatacatggcctggggcattcttggctctgacattccaaagacattgatcttgacagaagaccaggggcccacttgcagcaagagtttccagcaggtagatgagattgagactctcccagctgggtaggggatggaatggacagtaagggcttcagcaggaggagacctctgaccaccacccaagcaagctctgggaagtgcctggagaccattcattttccctgctgtgagggccaaggaactgtccttttctggcctcaggtacagacatccctcagcaacagacagtccaacatcagttgtccatgcatagaaggtacacctgcctgatacctggggcttcacccagcattgcatacactcttggccagggatctttggatgggaattatttgttccctgttcccagcggacatatggcaatgtctggggacatttccattgttacagtggggagggggatgttattagcatctggttagtaaggacagtgatgctgctaaacattctataatgcacaggacacccccaccacaaacaattatccagcctccatggtgtcaagtttgagaaacagttggaaactccttccttccttccctccttccctccttccctccttccctccttcctccctccctcccttttcttttctcatctcttctcttctccttcccttcctccttttattactgtaaaaaaacttttaatttatccttatttaactttttatcgcatacagctaagtgtacaaatcatgaacgtgcagctcaatgacatttcatgaagcaaacaaacttacttcatgcagacccacttcaacaaccagaacactgtcatcctgccagaagcccctcgcatgcccctgcagccactactctggctcttatcctctaagtaaactctaacctgctttctaatgtcgccacctcgttttccctgctgttgacctttggagtaaatggaatcacaccagatgtacgtgttttcctagttccttttacttaatggaatgtttgtgagattggtcgcattgttgtgtgtggttgtattttgttccttcttgttgctggatagcattccattgcgtgaatataccacaatttatttgttcattttgctatttctggacatctgggtgtttccagcttctggctatgactgataatgctgccatgaaccatcctgtacgtattttttgatgaagacacttaggtatttctgtagagtatatacctaggcgtggaaagggtcacagagctcgtatacatcctcttttattttcactcaagctgctttatttctgcaaaagtgcccagagcattcttttaaaacatgaacttatcacataactaccagtgacatctcatgtcgctatccagacatggtctaaaaacacaccaattgttttccattgctttaggataagacatcaaattcttagcaggacccacaagcatgatctggctcctgctgggatctttgagctcagccaacacgattatcctcctggacgatgcaattcaccttccttagttccctgaacttggaaggatgggagagtgtctctatcaagaccccaggatgtgatgaaatctttgggatggaggtcgggtctaggggaactagaaggctgtggatatgagagaggcactgcttgttcaggtgcaggcatcggggactcagtggaattggctataaatctcttactaaagagggctggcgtcagggcatattcctgtgttattaaataatgatactcggagtatatgaagcaggaagtatgtgtcctgccatgatgaagatatattttcagatgcagaataaaaaaggacagggattgtgagtcagggctaggtggacactgggatcccccaggcacactgggcagtcacgacaagtaagccctgctcctacgccagtggaagccagggcctgtaaagcatacgtcacaaactccaggcagaggtgactcatggatctcacctggatgagtgtctgccactttctggctggactggctgcagaggtcaacgcagggagctctcagggggcatgtggtggtggccacatctccccttggctggatacagccttcttgaggacatggaggggccctcacaaaggggacaaagggagcagtactggacacaggcattattcagaaaccaagggacacactcttttgtgtttggctgaattcaggataaaaatgcctccgcaggccatctgcagagaaattcccccactgcctctttgcaggcaccccgtgagactcctgcctccagccagggcctcctccagaggaagaccttacccagagaagtctagggtttgtctccatctatggagctgagaagcttcacctggggagtccaaggtgctcaactggcaggtgagtggaagagaggctggttaaggtgggaagacctgagggaacatggtgagaccttatggcatggcacatagagggaaatgatacgtggtcacatccactactattcttctcagggaaagacaacagctggccagtcctagtcatttattagagagaaaggcacattaacactgcaaatctaaatctgtatgcccagtggagaatgatagtaataaaagcaaacgtttagaaagaccctgggaagaaaatgtaaagacaagccacagattgggaaacaatagttgcaaacacatatctgattaaaaaaaactagtatagaaaacatacaaaaattcttaaaactcaacaataagataacccaattaaacaataggcaaagatttgaacagacatcttaccaaagaatatatacagatggcaaataagcatatggaaagatgctcaatgttgtatatatcaccagggaatttcaaattaaaacaacaatgagatgtgattatattcctagtagaacagctacaatccaaaatactgacaacacaaaatgctgctgaggatatggagcaacaggaactcgtattcactgctggtaggaatgcaaagtgtacagccactttggaagacagtttggtagtttcttacgaaattaaacatatcttgccattcaaccaagcaactgtcctccttggcatttacccaaatgagctgaaaatttccgcaaaaaaaaaaaaaaaaaaaaaaaaaaaaatctgtacgtgaatgtttagagcagcttcattcataattgccaaaaattggaagcaaccaagatatcctttagtaggtgaatggataaataaaccgtggtgtgctatataatggaacattattaattgataaaaggaaatgaattgttaaaccaagaaaagacatagaggaaccttaaatacatattaccaagtgtaagaagccagtctgaaatggctatattctgtattctatattagattctgtatatattctgtatgacattctggaagaggtaaaactatagaaacattaaactgatagctggttgctaggggttcagggggaggaggggggaggaatgaatagatggagaagaggggatttctagggcagtgaaaatattctgcattatattataatggtaaatgcatgtcattacgtatcaatcaagaccctagactgtacaacacaaagtgaaccctaatttgagctttggtaaataaaaaaggaccagttcaggtctgccccaaaagctgacatttatatagtatttactattttccacacactaatctaagtgttttccacatatcggcttacttaattttcaagacagcccaataaggaaagcattattatcatgaccttaagaaatggcccaaggtcaaagctgggacccagcctttctcctggggctgcacttttagacatcgtatgaccctgccctgggtattctaactcaaaaagaccatttggctctgaaatgatgatgtgtgatctcagactctattgcagtggaaggaagtatactaataacaaagactacatgtctccttttaaggatttttttctttaattcacaaagctttgtcatattttacgaatgtttcatatttgcttttaaagtctgaatacctcactggagactttgttttccattgttaattactatttgtcataaaaatggggagttggtatcaactcatggctaaaatgaagttgaacagcaggaagcatgtgtggtgacacgtcagcccctcctttcctggctagagctccccagctcccaccctgaaagtcactgttgctactggtattttgtgcatctgcccagagagagtctatgcatataccagcacttaaccatgtattttcctcttcttttaaaacataatggccaccttggtatgttctgtgcttttcccctaaaaatacagctcagaaatattgcaaaattcttctcaataagtttcaggattctaacattctgaagtcgaaccttcaaaaccatacttttgacaatgatagttagataaatggaaaatggataccaatttttctttagacataagagatggagatggaaaaggtggtgctttgagttattatgaaacatccctcacagctggggtaggaagctgccacagggcagcctctgcccagctctgcggtacatggtctcaggcagcacctggtgaccaggatgcatccctcgtcagccccagcactcccttggagccaggacagtgtgtccatctttcactgtgtgtgccttctgctgtgctagactccagggatggcaccaagacagctccagtttccattaaaatggcacattttctacaatgcctacatttagtgatcaacccgtgggacttttagagggcactgaatgaaacaatgctacttccaattaacatcaaagcaaaacgtacctggcactgctgttttgatatcaaaaaaagatctttagtgaaatgcccttagattaatggccatgaaatgaattgaattcattgaatgtcctggccattccaggcaagagtccaagtctaacagagtgtgttgcctttgctgtaagagtgttggatgtggcagggtgctgtagctcatatcagagggcatctctcaggccctggagggaagaacttcaaggaaagcacagcgtatctatttcggctgctcagctactcacatgcagctcatgtgttctttctccaacagagggccttctacagggcagatttgatgctctgacaaatggagtgcacttagaaaggcttacctgcccccggaacagccttctcaagagaggggcaatgacatctacgctgcccttgccttttaagcattttccattggctgtttcatgagaggaggtggataccatgactaagagaatgctgctgagaccacagaaatgacagaaagaacttcagcttataaagtcaaaacttggaaatggttttgactttttaaaatctttttatagatttaggggaatgcatgcagttggatttaggagtacacgtagatatactgtgtagtgctaagtcggtgctattagtgcacatatcacccaaatagagtacatatcaaaaacacacccacactcagacgttagccacggcactattcataatagcaaagttacagaatcaacctgggtgtccaccagtgaataacgggattagaaatctagtgcgtatggaccacagaatactactccaccataaaaaagaatgaaatcgtatctttttcagcaacacggatggaactagaggccattatcctaactaaggaaatggtgtttcttgaccaggctttatacaaagagacttagttgccaaacctgaaggtgctaaaattaggagcaacctgaaagcctgaaaaaggtaatttgcatcaataatattaatccaaattcagcactaactagagctacaaacaagactacacagggttagtgtagtttcttcatccaacaaatgtctgatgagcacctcaggggagtcaggcgctgtccttggttctggagatacagccatgaatggtagggatgaagtttctgatttcaagaagctgaagaaagcttagtcagggaaacagatgtaaattcaactagtggtgggctctaagaaaaataaaatagggcaacaaactgcaaaggtatgaggcagggggtgctggcaggaggggaaggagacagtggagagaggtgatattttcactgagacctgaatcttaagtcacgtgtcaactgtgaaaaacctaggctaagggtatgtaggaagaggaaaaataaagggcaagagcagagaaataataaaaaaaagacactatggctggagccaaagtgaaagagagaggaagttggaggggcttgatcacatgaatcctggaccattatggtgaggaggttgtatattattagaagcactgcataagaccattagggtgttttgtgcatgagagtgaaatggcttgatttacatttttaagaagccactacacctacatggtgaggtacagtctatgggggcaagagcgaaagacatcagcagatgctaacattagagggtcaaagtctgagaaggaacaggatgcttgcatggtgtcagattaataccatcatcaagtgatccaagctaatctcaccaataattagtcatattggtgccacatctcaacatcacacagggatgttcttactgggaaagtgtaagtccagtctaatcatgagaaagcacaagatagacccaaactgcgaggcattccaaaatctacctggccatactcttcaaaagcacgaaggttatgaaaaattagaaaaagttgaggggctgtcctaaattggagacttagaagacacaactactaaatgcattgtggggtcctggattggatcctcaaacaaaaaaggatattaagtgaaaaaccagcctgtggtttagttaatagtatagatagataagtacaatattcatataattctcctggctttaacaattgcatgattgttacataaattgtcaacattaggaagattgaggtgaaaggtacacataaacggtctgtacagttttttcaaattattttttaatttacacacagtgcagttcatttttttttgtttcggtatttgttttacaactttctattagtttagaattgtttcccggtaaaatgctaaagagtaaaataaaaatgctgataaaaaacaataaggcttctgtggtaggcagaataacggctccccaaagatgctcacatcctcatccttggaacctgttaatatgctaggtaggttacatggccaaggagaagtaaggctgctgagggaattaaagtttactaatcagctgattttattttattattttattttatttatttgttttttttgaggcagagtcttggtctgtggcccaggctggagtgcaatggcacaatctcggctcactgcaacctccacctcctgagttcaagcgattctcctgcctcagcctcccaagtagctgggattacaggtgtgcaccaccatgcctggctaatttttgtatttttagtagagacagggttttaacatgttggccaggctggtctcaaactcctgacctcaggtgacccacccccatttagcctcccaaagtgctgggattacaggcatgagccactgcacctggcccactagtcagctgattttaaaatagggagattagcctaaattatccaggtggaacccagggtccttaaagttagaaaggggcaaaagagtcatttgggaaagaagatacgaagatggatgcagagtaggagtgaataattttgagaaggactcaacccactgttgctggatttgaagatggagaatggggcccccgagcccaggaatgcagagggactcttgaaattcaaagcggtgaggaagcacattctctccaagacccagagaaggaaaatgcagtcaaaggaaaccaatacagtactacactacaccccggccaccacagcacacagacacagaaaatatgtggagggataaagatgatcaaaagccatggtaagcatccaggacacatttatgttggtggtttggacattggacgaggtgtagagataaaatagtttgatatttttagaggtggagtcaacaaaaactgcagctagactggatattgagggtgagagaaagggagggctccagagtgagcctttggcttttggctttaggaagtgggtggatgaaaatgggcaggttgagggagacgagatggatggcaggctcatggaagcccgccgattctggccctgttcttccgaggcagccctagaatgcagtcactcatctccatggcttccaccactgctgcagagcgatgctgggtgacccgccagtgtgactccatgtggctgtccctaagtttagatggctttagtttaattgtgtcctcactgtaaatttagcatgtgggccacacggcctactgcccttgcagagctcaccttccttccttccagagctgaatgtgtactgctcatctctgggcatattgtgcacaccagacataccagatgctgtgggggaaagcaaagtgggtgacatagaaggaaagtaaagtggcttaacagagtttttctgctctagctgggtaaagaggacacactggaaatgtcttcagagtaacattcaacgcttacaacctggtactaccatcagttttggcacctgtgaatttgctgctagacaccatgagctcctcaaaaggagggactcgcctgatttatctctgtatctccaggacttggtatatggcattcaatagaggatcaatagatatctattgaatgatcaagtcaaaccccaagagggtaaaaactgaggcatcagaagctcgattccagaaaattgttccaatcatgctccctgtgaaattggaagtggaagattctattctcctctgtgcttcgtaagacatgaattccttctcatcaaaatttacttgataatggagtatatgaaataataaatgtaccctacattttcttttgtagtgagaattatgcaaaataggttttatcagaatttctgagtttaaatgccttacttatttgacatgaaatactgaagttaacataaaactcataacacatcacaccaaagaaacattgatgacaaactggttatggtgaatgatttccaggaaagtacggagtatttaagattggtcgccttgcataaaaaacttgaaagaccctgaaatcttacagcttacatataagaaagatacttggtagatttttctcaaatctgaggataatcataaaatatatgtaacattaaaaatatggagttataaagcagaaaggaacttttctaaactatcaataataaaaaataaatttttgttgactatgctaacataaaaaatgagctatctttcagttatttcatgaataaagcagttataaaatcatggccatgactgttcaaagccaatttagaaaaaggtattacataggtggttcaagctgttacttaataaagacattgtgttatattttatatattttatgatgcttatagaattttccagcttttgacagtttgtaattagttgttgatttttttttcaacctaaatattcggtaattccgtgtacataattttgtgtttattttcttagacacgtgcccccaggtcaactgtagaagcttcaactcccaaagaacctgggtctgcctccaccacatcctgcagtttctggggatgctactctcctcctctctgttctgtctatgtggggtctccagggtccatcccaagccaactcaggaaatgatccttcagtgattttcgcaaaggatactgtgatggttgactttatgtgtcaacttgactgggttaagggatgccagattcctggtaaaacattatttctgggtgtgtctgtgagggtgtttctggcacaaattaatttgaagcagtggactgagtaaaccagattcatcctccccagtgcggatgggcctcatccagtctgttgggagactggatagaacacaaagatggaggaaaagcttctctctctctctctccttttactgggaaatccatcactgtctccccttgaacagtgcccctcctgattctcaggcctttggattcagaatgcgagttacaccttcagcttccctgttcttgggcctttgggtttggactggaactccaccaccggctttccaggtctccagctgcagaaggaggatcatgggacttctcagcctccataactgtgtgagccaattcctataataaatctccccatctgtctatctatgtgcagccgactggttctgcttctctggagaaccccaactaatacaggtagcctcatggtgagttttccacaaattgttaaactttctgcagatttacagggttacagggagggctccgtggctcccatgtggcctcacaacctctctttctccacttctgcctcctccctcaaaatgacaagcccagagctctcttcatctaatgaagactaatctcacccacatccaggacccccaagactcaccttgaacgtagaggtacttctatttcccaaaataggaagctgtaccttaatacatttatgtgcataaatgttaattgtgcaactcagtgaatctttatatctgtgcagcccagtatcgtctatgagatcaaaacatggaacatttgagctctcctaaaatctctctagttgcttacttccatccttcccccatccaagttaaccattattttggttcctctcaccataggtcagttttgctcatcctagaacttcacatagaagaaactgtgccacctattagcttttgtttctggcttcattgctcaacttctggcctgtgagatgtatccaggctcttgccttcagtgtagttcactcttctgtgttgctgggtagtatttcattgaatgggcacagaatgtgtttgttcacctattgatggagaatttgagtcatttccagctctgggctattatgaatgaatttgcggtgaacatccttgtacataacttttggtgagtatatgccctcattttttggaaactgcttggtctttgggaagacctatgcatcatccccagaactttcaagagctccccctccctctgagccaacaaactcagtttccactctaagaggaattctggtgcaagctattaatgtaattacatttccccacctcattacaattaagcgactgcctctgtaactaatcctaagaggaagacctgaagagatggcatatttaccttagggataaagcccattctggcaaggctggaggggggatgtctggcttttattattgatgtttcatgctcttctgcaagtctgcggaggtgatgatgcaaatacactcagaaataatgtgacatgttcctggaagtgtgttcatttccagaggaattatgtactttaatatttgaaacattgagaccatctattaaacacacttctgagatgctatctcctaatagaaattgtgtgtgatcagaaaggagaagttgaggagacattctggattccctccaccctttcagaatttcaccagaattggttcagcagttctaagctattttgatgtaagacacaattcccctagcttgaatcttcttaatcgtcctgtgattaagaaaaaatttccaaccctgtgtagactaacacttttgtacaatacaataaaaatatgtttaggtgatgtgacgatgtcgaattactatgagttttttttttttttttttttttgagacagggtctcgctctgtcacccaggctagagtgcagtgacacaatcacagctcactgcagcctcaacctgctgggctcaagcttcctgtgtagctgggactacaggtgtgtacaaacatgtttggtcaatttttcttttcttttttcttttttttttggtataaacggggttttgctatgttgcctaggctggccttgaacatctggactcaagcgatccgctcgccttggcctcccaaagcgcactgtgaacatttctaaatactcactcttgactctgtacctgctgcattgagcaccagtcatgcggagcctgcaaacctgggctcatacacagagcatacattgaagagcactgtgatgtggccactttcttggtcagagatttcctcttgaaacagagtaaacagggtgttcctttcttttcctaattttcctgcaagtttatatagcacatggtcaggctggagaacattcccggggggccagctatgcccaacctgagcacccctctttttgagataaggggcacttggggattgcatgtgctcagatgcttctctgcctgtaagttttcccaacacactttccttttgttcaatgtgtcgcttaaggtacatgtctttaaaattagccaagggaaaatgtacagggaacttaaatccacttatgttaatatctataaatccctctatatttatatctatggatccatattcatatcttatctgtggcttctgtctcagaagcattacacagccaattaaaaatgttttggtggctctgtcaccttgcagctatcactttcattctcttgcctcagtttctctctctttttttttttttttagcaataatcctgtttgcattttttggccccttcaacctttctcccagcatgaagtacatataagggagagaaacatcgagagcagtgttacagtgggtgtcttctatcttagtttaattagctcagataacatctcatatacactaacccactcatggctgtgaacatcccatctgcattggagggatctggctaattgaagagcaaaaatatgcctgtgccatcagggtggggggtgaatggtatgggaataaacagtaacatacatacgcgtttggcaggggcttatgttacgtatggaattagcattccttaaattaatgcagggttctgctttaatacattttccaggagtcagataaaatggggtagtaatgcgatggctttcttgtatattgctagcatagaattgatcagttaactaggaactttcctccttgttattagcatcaggcaattacaaacaagggcccagttctccatgaagggacatgtcatcattgctaacagctctgacactggcacgctgagatgcccagaggggtaaagagcagcacgtcttcagtgatgttgggcatgtgatgccctgcagttggggacaatcagctgagagacaaggacgcagtctgaactaccttgtttgcttcagagaaacctttagagggaaaacattttgtgccaaggaatgacagacctgcccaccactcatgcagtctgagagcgagagagcgggattcatcaacggattgaacacactggcttcaaggctgtcctatcacactgacactacatgtgccaaagcacacattttcttgattgagtttttgtttttttcaatcactcatagccaaaggacactcttcctcctcacgttgtgatcttttagagaaagactaacgcacattgtggaacattgcgcaaacaaacatttgatacctctttgtgacaaatgcctctttggccccaaatccacacaactccagagcagctgaggctaatttcattatagtggctgggactcaattaacagtcagatgtgagtaggcttggcaaccgcccctcgcttccggcaggtccagaaggtttcccaagagccaaattttgttctttgttcatatatgaacgaaagcaaacaagcccaatgcacaagaaaatctgccatttaaaagtcaatgtgaacagcccactctctgggcattcgctaaatacaggggcctttaaaaaacacgtctccatttgtcacccaggtttttggacaggttgaatggagtaggccacataaacactacttctacaccgagaaagaaggagcacattcaacaaaaccatgacgagtatttgcctagattgcagcacctaagtttccaaatgtgagatgcctgtctgaccgaggagcagaggacagtggttgacactttgcacccgatgcctcttgtctcccgtctcacactcccggattcaccttctaactgcactggttactgccagggccagcggcctgcagacgaggccggcactcacctctgcggcctcaagtatttcttgctacgccctgaggcttctgtgcagctgtcacatgggtgcctgggggaagctgcctagaccgtgaccaactgtcctacgttacccaggcatgaagagtttcccgggatgtgaggctttcagtggtaaaatcatgtcagttctggacaaaccgggacagttggtctccctcttgctcagctagagggctgcatgtacaaacttggaaggtagagagttcacaactctaggcaaccctggagtaggggagacaagagctagtgaatggtcactgcccattttcgtggcttgggcagacaattcttttccttttttcccaaatatttttattttagattcagggctgtattagtccatttctacattgctataaagaacaacctgagactgggtaatttataaagaaaagaggtttaattgactcacagttccacatggctggggaggcctcaggaaacttacaatcctggtggaaggtgaagaggaagcaaggtggcatcttacacggtggcaggagcgagagagtgactggggaagggccccacttttaaaccacaagatctcatgagaactcactcattaacatgaaaacagcttggggaaaaccacccccatgatccaattacctcccaccaggtccctcccttgacatgtggggcttacaattcaagatgagatttaggtggggacacagaggcaaaccataccaacgggatacatgtgcttgtttgttacatgggtatattgcatgtggtagggcttctagtgtacccatgactcaaacggtgaacgctgtacccaataggtaacttttcaaccctcaccccctcccatcctgcccccacccttgggagtctccagtgtttattagctccatttttatgttcatgtgtgcccattgtttagctccaacttatacatgagatcatgcagtattttattttctgcttcctagttcacttaggatgatggcttccagctgcatccatgttgctgcaaaggacatgatttcatcgtttttcatggctgcatagtattctctggcatatacgcaccacattttcttttcttttttctactttactttcagatgcaggggatacatgtacggggtttctacttgggtatattgcatgatgctgaggtttgggatacaaatgatcccatcactcaagtactgagcatggtacccaaaagttagtttttcaacctttgcctcccttcctccttctcctccctagtagtcccctgtgtctattgttgacatctttaattccatgagtacccaatgtttagctcccccttataagtgagaacatgaaatatttggctttctgattcactgatagttcacttaggataatggcttccagctgcatccacattgctgcaaaggacatgatgatttcattcttttttatagctgcatagtattccatggtatatgtaccatgttttctttatccaatccactgttgatgggcacgttggttgatcccatgtctgctgttgtgaatagtgctgcaataaacatgagagtgcatatgtcatgttggtggaatgatttgttttccttcagatatatgcccagtgatgggattgttgggttgaatggtagttctgggttaagttctttgagaaatctccatactgttttccacagtggctgaactaattaacattcctaccaacagtgtataagagttccctttttgcacagcctcgccagctctgttgtttcttgactttttaatactagccatattctgactggtgagagatgaaatctcattgtggctttgacttgcatttctctgatgatgagctatgtggggcatcttttcatgttcttgttggccgctcgtatgtcttctgctgagaagtgcctgttcatgaatgcaactctaaagtgagctttttatgcctcctcaggtcctcagcaggatcaggtccctgttccctacagcattattgattaacacatcctcatatttgcttctctcattccctgatttattctccctagcccaacctattctttgtgattattttccacgataaagtacctgcatgcaagctcaaaaatcaaagctctgctctgtgtgtgtgtgtgtgtgtgtgtgtgtgtgtgtgtgtgtttatttatgcagtggaaactagaaagacatttgctgaggtatttattgaccactggggtgttcactgtgatgtgtccctggaacccctctctaggaagggaggatggattccttcaacctccaggagttctgctggagggtgacaccctgcaggcagcatgctagggatggcctcagctgaagaaaaccaccccacccaaggtcccatctccttctggggatgcccgtggagatagagaggttcagcctcctcatcccagctcagggaggctctgaagagacccccccgcccgccacaggacttgcggaatccttgctcctggtgactgcatggcctcgacttccccctgcatcccatcctgactctgcccctcccttctgctgtggaggaacccaagcgcactctggaatgaatgccctagtgctaaccaccgtccgcggtctgctgcctgagaggacccacctgccacgttctagaacgttcttgacacttgagatacaacagataaaacaaaaagtctttttccaatggaacttacattctgggaagggagacagacaataaccagagaccaacaggttcagagcatagcgtcaggcagtgggacacactattgagaaaggagaagtggatttggggcagtgagaggagagacagggtggtcaggggaggctttgaaatgccatgacctagagaagaattagcacgtctagatcaggagtacaacggtgcatattacagaaattagctggaaaacatacctatggattataccaatgcatgcttcgatgctgaccaaaaataagattatgtagtagcttagcccaccaagtgtggttctcacccattgggattgtctggggagctttaaaaatgccagttctcaggtcccattcccagaggttctgattcaaccgggcagtggtgggaccgaggcatcagcactgtaagttaccaaggtgtttttctgtgcccccaggctaacatcagcgacccaaacactcatttgggagacctactggcaagatcatggcatgcagatcaaaaagggtactaatgaaaatcctgaaaaccaagtatgttttcacatgtaattagatatgcacagtcatatgcattacatgtatgtatgcataagtatgtatgcacacacacacagaaacagggcacttaagggagcattttggactccagtgcattttcctgattttggggtccaaagatgactgttgttggagaaaacaaacaaccacatacaagaaattatccggccaggtatagtagctcacgcttgtaatcccagcactttgggaggccaaggtgggcggattgcttgaggccaggcgtttgagaccagcctggccaacatggggaaaccccatctgtataacaattacaaaagttagctgagcatggtggtgcatgcctgtaatcccagctacataggaggctgaggcaggagaatcgcttgaacgcaggaggtggaggttgcagtgagccaagatcgtggccactgcactccagcttgggtgacagagtgagactctgtctaaaaaaagaaagaaagaaagaaagaaattatcctaaaagttttactatcaggtatgagaatccagcatgctcaagattgttgagtaaagcataaagaaagctatgataatgggagcaccaggtgatacagatgatgtcacacttaaataccatcacactcgacttttctgaacttcagtaaaacctgttagaccccagtaattcagtcaaataattaaattcccactgaaagcatacaatatgtgctcttggagacattaattgaaaaaaattaaaagcaaatatttccttaatattttccaaacttttataggagaccacagggtaaacttttagataggcttgacttgaaggacttttaaacctaaccctcctaaactgatgaaaacaagactgcagagattcactgggacaaagtaattatctctatttacaaaagagtgaattctaagttttatcctccacctcactgtttttttatttgcaataagtaatttataaggcatttttacaggaaagacaatttggtgcagttgattgctctagacattttttctttaaatatgcttgcagtaacctgtttgttcaaaaggagactctgtaatatctatctatctatctaccaacctacctatctatctgtctatcatcacaaattcctaaatacataaggaagatcttgttttgaggaaacaagaatatggtccttaggccttgcagaatatttaaattatgagcaatcatttctctggtaagttcaaagcaacaatttctatttcaaagacaaataagggttttgttgtaaacaaacaaaaaaataggccatttgggaatgtaagtaggatttacttgtgaacacttgagatctactctcttagcaaatttcaagtatataacacattattaactatggtcatcatgctgcacattaggtctccagaaggtatttgttttaaagctataagtttgtaccctttgactccaatccctgcatttcactcaccctggcaactggccttttactctcagtgtgtatgcattcaacttataactgtgagctgatggaaatcttaattattaatagcttgattatagtaattgttttataatgtacaggtatatcagcacaccacgttgtacaccttaactatgtacacctttcattcttcaatcagacttcaatgaacctgggaaaaaagtagcatttaattgaccctggattagcaggcttaggctgtggtggccatggggatatggagatgaggagtcccttggagagagcttgctgcagagagggtagctgactccacttcactccagttgccgtcacgttggatttgactcagcattcagaatgttcatgcagagatggctctctcctctgatgtctgaatgtggcaggtgctgcctgagtgtgcctcctccaagctcagtctttgctcccagagttctcttctgggttcctgagacatcctcaggctgtgctgcagtcgggggttcctccctaatccttcttgcttcctgctgtcctttcccaggcagcagatctgcatctattttttttctaaaattgtgataagaacacctaacatgagatctaccctcaacaaatttttaagcacagaataagtcttgttaattgtaggcacaggctgtagcaaatgtctaggacttgttcatgttgcataacaagaactatacacctggtgaacagcaattccccatcttctgagatcaaatgtccatcagtagatgaatggaccagcaaaatatggtccacacgtataatcaaatattattcagccttaaaaaagtaggaactattggcatttgcagcaatgcagatgaacctggagagcaccatgcagacctgcttcttgatctgaagcctcccttccctttatcctgctcttccccctttatgttcccagtaaatcaattaaacatggaggtctgtcttggtatctgcttattggaagacctgaggatagatatgggctaggtctgattatgatggtggtggtggacatctgttgcttttgtctttcttgcgtttatcccagttattttttcagacattctgctttccactatttagcccaggaatttggtgtgtggtgggcccccagtccctgcataggcacttggctcaggcctcacttagtgaagtacctcatttccttgtacgcgccaattaggtcaggaatgggcaacttaggccaatataaattatatcctggctattttatgaagtagtgaaaataaggaaatgctctttcctccggagttggtacactggtagaatgcacgcttggagctactgaagaccatctctgccacctcatggggagggagcccacctgagcaagaagctggcatgtagggaagcagagttaagagatgaagatatatatatatatccccagcaatacctgaagctcataggaacccatagagtattgtgttgtgtgtgtgtgttgtatgtgtgtgtgtgttgtgtgtctgtgtgttgtgtgtgtgtgtgtgtctgtgtgtgtgtgtctgtgtctgtgtgtgtgtctgtgtgtgtgtgtctgtgtgtctgtgtgtgtgtctgtgtgtgtgcgtgtaaactagtttgatagtttgaattgggtttttgtcacttgtaaaggaaagtgttctcaaaacccaaattacaaatgacacaattacatcaggcactggactttctttatccacttttggatatgtttgttttctttaaggacatggttacagacaaacagcatggaactgtggagggatgtgattgattgttgtcccctgctcactttgtggctcagggctggctcttcttctttcttatgtcaatatcctcagctcaagagaagttttattcattgacctcgatgggggtggaaatgatttagagctcctatttctgtcaggcatttttccaaggatcttgtatatattatcttacagaggccagttgactagtgtgtgaaataatttatattattctccccatttaataattaaaaaactgaagatccaagagaacaatttgtccaatgtgattcagaaagtaattgatggagtccagtttcaacagacagactgggtttgaggcctggtgctgtcacttgttagaggggtggtgtggggcactaggcaaagacctaagtgattcctcttgtggccatgtctttacttctccttcttctcctaaaatagatctcatcccaggtgatatctattggcacatgtcacaagcaaggtcaatcatcatggtgcatgtcataggcaaggccaatcatcatgcccagcatcagtgactggtctaaggtgtgccccaaacccacactggaccaattagagtcctcacgtgatatattatttcaaacttaagtctctatttcctcttccttgttgctggggacaggtggaggaaatcaatggaattgcgtgtggtcataccccctatgatatggaaaagtctgttgaatgtgggaggcagccctgtgggcagagacagagagtatgtcaagatggagaggttgggaagaaccactgaggcatctggagttgggtttgtgcatcaggtaaccccagagacaaacttcagatctcctctgcctgcagtttggatatataaaccaacatattcccttttttctgtttctcgaagtcaagagttttgagtgacatgggaatgatggtcatgacctcatgggaatcactgattaagggatgactcctctagagttagactcctctagagctagttacattgttacccaggtaacatgtcagagctcacaggattgactccaggaaggtggcatttcagggaggcactgttggggagatcatctctgctcccctgatatcaaggttagcaatcgctggcacaagtgggtgatgcataagtgcataaggttttatctgagcataaaggcctttgctcagcgtgacagctttatagattagtaaattgtgttgtatcagtttcttgcagcttctgtaacaaggcactataagctgtgtgccttagaacaaatagtttttttttgctccacagttgtgaaggtctagaattatggaattaggatgttagcagggttggttccttctgagaaagtgagggagaatcttttccatgcatctcttctgtcttcgggtggtttgctggcaatctttggtgttccttggctgatagaccgtatcagctcagtctctgctttcatttcacatggtattctcattgtgtgggtgtctgtctctctacacagcattctcttttataaagacactagccatattggattaagggcccaccttattgcagtaattaactaactatatctgcaatgaacctattctcaaatatggtcacattctaaagtacctgtgattaggactttaaaatacgaattttgggggacataattcaactcataacagatggcacattacaaaactccctcagagtacctaagagccaggaaatgtcaggagcaatttttattaagttcatacttggcaccactttttataattttgaagtaattttagaattaaagaggagttgaaaatatagaacagagagttcctatataacctctactcagctccacccaaattgattgaataatttacagacattattcaaatgctgttaattgacacactcattccgttactgttccaggatccaatctgagattgcccaagtgtctttacgtgtcagagctccttattcaccttcaatctggggctgttcctcagtctttccctacctttcttgaccttaccagtttggtcagttattttgtagaatgttcctcagtttggatagtccagtgctttctcaggattaaattgaggttaggcatttttgggaagagtaccacagaggtgatttgcctttttcagtacatcatatcagaaggtacattggcactactttaacaacactatttgaaagcttatggcttctatttaactaaaacaaattatcaccatcatcataatcatcatcaccatcacaatcaccatcatcatcactccatcagtaccatcatcactgccatcatcatcaacatcaccatcattaatatcatcatccccatcaccaccaccattaccatcatcaccacctccaccatcatcaccatcatcaccatcaccatcatcaccatcaccatcatcaccatcatcatcacatcaataccatcatcattatcaccaccaccatcatcattatcatcaccaccaccatcattactatcatcatcaccaccatcatcaccatcatcatcaccataccaccaccatcatcatcatcatcgccaccatcatcaccatcattatcatcatcaccatcaacagcatcatcagcatcatcagcatcaccatcacaattaccatcatcacaccatcaacaccatcatcccatcatcgccgtcatcattaccactatcaccatcatcattactatcatcaccaccatcaccaccaccatcatcaccatcatcatcaccatcactatcattgtcatcactatcacaatcaccatcatcatcaccaccatcatcacaatcaccatcatcatcaccatcatcatcatcaccatcacaatcatcattgtcaacattatcaccaccatcaacatcactatcaccatcactaccatcatcactatcactatcaccatcaccatcatcatcatcatgtgctatgcaaattacttcatagtcactaactcaataaatgccctgaaaatcttacactacaggtactattactacccccattattaagggagaaactgagggtcagggaggctaagtcacttgcttaaggtcacactggtggtaagcggttaaattagaacttgaatgccagtcttagtgaataaaaatttcatccttcacccctctttgagtctgatgttcagtgctgtgctgcatgtttccagctttctataatcccttacaggtggtagtggctctgtgataccttctagacagtaggaaatggcttatcatccatttcctgggaatgtttagcttttctgatttattctttgccccttcctgcttcattcttcatccttggaatgtagatctgtggctggaggcatgatggctatcttgcaaccatgaggcaacagacatgagcaagaaaaccaacctgctaaagatggtgctgcagagattaaaaatggcctggctccctacaaacattgctgagcagccacaatagccctggactccttgtcatgagcaaataagaggttttttttttcttttaatgctattattgtcaggtattctgggaagtatgttattttcatccatgtgtggtgcttactgaggcttaaacacaaataaagctctcttctgcttaaggttcgaaagtttaaaatttttcttttctaaaattttagtttaatttggggatcacaaattcatacaactatagagggcaaataacataaataaatgagttaaatatgatctagaaggtaccctcccagggtaaagaagggcaactgttagatcaccttaccattgccttgcagaaaaaaagggctcagtgctgccaggcattccattttctaagagaaatgatgaaatctatttttaatgtaaattttaaagtagtaatttcagatttttaaatgttggccactatccaaaaccttgaagacctaacacaatgtatgtattggctagatatgacccaaggaccttcaatttgcaaagtctgcaattgcaaaatcatgtttatttattttagggatatagactaaagaaaatattgcaagaaagatggctaggaccaggcatggtggctcatgcctgcaatctcagcactttgggaggctgaggcaggaggatcacctgaggtcaggagtttgagaccagcctggccaatatggtgaagaaaccccgtctctactaaaaatacaaaaattagccgggtgtggtggcaggcacctgtaattgcagctattcaggaggctgaggctggagaattgcttgaacccgggaggcaaaggttgcaatgagccaagatcatgccactgcactccagcccaggcgacagagcaagactcctttttagaaagaaagctggctagaacttttttgatctttgaactggtaataaaaacaaacagcaaaaacaagctgacaaataggatttcctcacattgccatcattcatcaatgtggatgctggaaaccatgaaacatggtgacaggaagctggtttgcccatgctctgcagcatctttaattgtagcacccaccctgtgatcctgccttcattctgatgacaaatgactacccacagactcaaccttgacatcctgactttcagctctggaagcagcagcctcgtcaaactatttcaggacaagcacattaaaatcttcccttcccccagctttgaaatcgtgtttgcaaaattacgtgaggcgcacagggagtaggagtgatgaatcccaatttacagataggaaaacagagaggggagaaaagtcaaccctctcaagtcttaaaggaggaagtttggtgttgccccagagcaagtgatgggctgcctgactctcaaaattctttctttccagtagagagcaaaacatttccagtagtctctgacttcaaagaaagtgtgtgtgttgagagatttgaatggtttttcagttgctgtcacatgcagtggtgatttacaaaatattcaactctcagtacagcatgggcatcaaccagttgaaatgacggcctaaccaatcagacaccagccacaaaccctctgttcagcagcaccagtgcaatcctgctgaacatcaaccttgctcatagggtcacagggactcccagtggagtcaggacagcagcagagaaagggatctttttacccaaccaattccactggccactaatagaaaacaccaagcaaaagtacatttcaaatcttgtgtctgctgtggatctggtgcctggtcaaataagcagttgactactctgttgtctttacacacctattttattacctgttgatgtctgcagataaacatacatcatcatcataataattattattattgagacaggacgttgctctgttgcccaggcaagagtgcagtagtgtgatcacagatctctgcagctttgacctcttgagctcaattaattcttctgcactcaaatgatcctcccaccacagactcctgagtagctgggactacaggcatgtgccaccatgtccagctaatttttgtatttttttttttgtagagacagtgttttaccatgttgcccaggctggtcttgaactcctgggctcaagctatcctccctcctcggcctcccaaagtgttgggattacaggcataaaccaccacttccagtcagaaacacgcatttttaaatcatccttgaacttttccttctttttcattttttttaagatattgttcacatatggtaaaattcaacagtcttatgcatatactttgatgcatttgggtaattatacacaattctgtgaatgccgcagtcaattgtatggtgtactaaaatttatcaagggagattttaggcgctgttaccacacacacacacacacacacacacacacggtaactatgtgagaagaggaatatgttaatttgcttgattgtagtaattattccactatgtacatgtgtatcaaactatcatgttgcacaccttaaagatatacaatagaaagatatgagacggtctccccccagaaacgtttccccatgcacttctgagcttggtcccctccccaatccctgaccacaggcaactactcgtttgctgtcatggtagttttattcttttctagcatttcatataaatagaattttacagtatagagtcttttgtgtttgacttctttcacattgcatagtgtttctgagattcaccgggcatggtggctcctgcctgtaatcccaacactttgggaggctgagacgggcggatcacgtaagatcaggagttcgagaccagcctggccaacatggtgaaatcctgtctctgctaaaaatacaaaaattagacaggcatggtggaaggtgcttgtaatctcggctactagggaggatgaggcaggagaatcgcttgaacgctggtggtggaggttgctgtgagccgagattgtgccactgcactccagcctgggagacaagaacaaaactctgtctcaaaaaaaaaaaaaaaatttctgtgattcacccatattgttgaaggtatcaatagttctttccttctgatcgcgaggaagcattcatttgtaagcccgtgtcagaacttgtttaactgtccctcagttattggacatttgagtttcttccaggttttggtcattgggaataatattaaaggccctgcattttggcttggttttagcactgcacacactatagatgatcctgaagatcttaagttgcatcattcatatatagaaatagagaagtggaaaaaagctttgctttctgcgaactcaacattggcattgctagaactcttgctaccacaagaaagttgatgtcctcagcttgtgtgatccttctcaagttcaatggtcagcctggtcagatgggaaattattcattcatccaagagatgtttactgagcactttttatgtcaggccctgttttagactttggggacacaattgtgaattagaccatgtgtctaatgctgtggctgtccatgtgtttgtgatcacatggagattataagttaaaataaaaggtgaaacagcagatacataaagtgaaaaaatagatgaacaagattgtttttggtgttctgtatatgatggaaaaactcaaactgtgtaacatgatgatgagcagtgctttatttagatttggtggtccaggaaggttccttgggggagtgccagtaggaacgaaacgtcagagcttagtgaactaagttggcgagaacctgtagactttactgaatttgaccgagcatgacccagaataagtgattaaaaagtaggcctaatgcaggaacagaaaaccaaatactgcaagttttcagctctaagtaggagctaagcattgggtacacacatggacacaaagttagaaatgacagacactggggaatgctagagcagggagggaggaagggggagcaaagtttgaaaaactaactttggggtactatgctcagtacctgggtgatgggatcattcgtaccctaaacctcagtatcatgcaatatacacatgcaataaacctgcacatgtacccccggaatctataataaaagttaaaattactaaaaaaaccccaaaactctaatactttatatatttataaagtattagataatatataacaatattaaatatatatataaatatatatatttttaaaaaatagactgatattggcctgcattctagactttcaaaacaagtacccatttgatggaaaagacaaggctgttaaaaaataaaaaggttggccataaataatgaatcacatattcccttccatgtgagtataccgtatctataaagaaaatcccgtccaactggtcacagatttgtgcaagacccttggaaggtgcagcgaactttctgcccctatcgtacgttgatgaccatcatctgcatgtatgtcttctaactcagctgaaagcaaccctgattctctggataagatgaataagatcatatcccccaaagaaataaaaacagaaattagagataatgaatgcatggacagtcacagcattagatctcatttatatgcacccttgtcatctatgggctggctttatatcctttatatcctttgattactgtgtgttctgtctgcttgttaagctgtttcaagcatttatgaagatctgatatagtagacttgtgattctaattatatgtttagaaaattatgattaagtctataatcaacacttaaaactaatctttaaaatttgttaaattcagcagttttaaacttatttgttgcgtgactaacacatcattgtttagagaaatgttcactgtttaacgactggtaagttggacaagagacaaaatacaggtagtcgtggggactgcttttcaaaaccaatgatgtcatcaggaaattatctctgtccaagcctttgttgttctctggtcatagatattctcaagcaggcaggccccttttggtggaagatggctaccagcagctctaggtacttttcccaaagcatccactaattttccagatggagtcccattggaaccccttgggtgacatgaccatccctcaactactcattgtggtctacgtaggaaaaaaatctctcaaactgtgttttcctctgctctaatcaaaacaagcatcaacacagaagatgttgtttttcccaccccccaagcagcagacaccagcagggtaacctctaattcagttctgacactgtctacccaaagatagcatcagatcccacaggttgagggctcagtcccataagactgtcctctccttcccaccagtggcaagtctggtcctctagaacttctgattgactggcttcgacttggggtttccaccatcccctctttgggtttgattaacttgctagagtggctcacaaaactcagggaaacacttacttacatttaccgggatattataaaggatattgcaaaggatacagacaaagagacatatagggtgaagcatgggggagggggcatggagctttcatgctttcccaggatgccaccctccagaaatctccacgtgttctgtgaccaggaagctccctgagcccaggcctcagaagcttcacgatatcagcattccttctcccagcatatgcggcaggactgtctctgaatgagggtcttttgacccataatcaagtagagtcctgcctctggctggtgaaaaatcggcagcagagagattctgtttcctgaagcctaatatatccaacattaaaacgaaagactgtaacaaaagctatgggagtgatgagcctgaacttgtagataaaaaccaatacatgtatgggaaactgaagaggagtggccaggcagagtcaataatcctatatttacataaactgcagaaaaagagaaaggaatgccatttttgggttctgagttctgggtagcacagtatacctgcagatgggaaaccttttactgaattcctaagctttggccttgttcttgcttttctcctgaaggtcgatacaatttgagaactcaaattgtgcccttcagagtgaggtgagcaggtctgctagaggaccacaatgaccctgctcactcttgaactcccagaggaaattccctggaccattcttggaccatctaattgggagctgagcagctgccttgatttattatttaacatttttcttgcgggacccttatctgctcaaatagcgtatcagtgacctgagggctgagatgttacatcctcccccacttctagccctgtggtttagcttcagattctcaattaatgaagtaaggtagggagaaacaaaaaagaagggtgggatctaggatgaaggttaagccccaaaccgctagaccaagcagaacatggaaaatatacacaaggaattatgtgcttgtcactctgtggtagaggtaagttaatggttccaataaatcatgtctcccagtatccagacccttgtgcatttccttcctatgttaactctgggtgtaatgtcaaaatgatttctaacttgctttggtcaatctgacatcagcaagcatcataagaacagaggcttggtaagtgcttgttctttaggaatctaggtgccatgtgttgaagcccaagctagtcatgtggttaaagctcagggagaagaactcagacacccacccgacagccctagcttagacagccctagcttacggctagacatggtgaggaggcacctgggaccatccagccctagctgggcttccaaatgactgtggttacttgagtcatcccacatgagaccagcccaaattgccaaatcatccctctctcttgacctatctattgagcttatctatcatctatctatctatctatctagcgacctacctactgacctacgtatcattcatctaacatctatctaaccaactctatctatccagctctatctacctaactacctgtcattcacctatcatctatctatccagctctctattgattatctatctatgtatatatctatcattcatctatcatctatctaccattcacctattatctatcctgctctatctatctatctatctatctatctacctatcatctaatctatctaaagtgatcgttcttttaagtcactttggggtagtttttcatgcagtaatatgtgtatatatacacacacatatttatatatatgtacatgtgcttctatatatggaaacatatatgaactattatattaattattttatgtattcatagactaagacagtatacatatgtataaacacacataattaaaagaaaagttataaaaagtaagacttccttttaccacacatgatgcctcatagtagtttctattcctttccttttcatttcattgtgttctctctcttgcttcttctgtttctcttactaactctgattaataacctaccaagcttgtttcacaacttactactggattgttactcccagcttgaaaatccctgccctagagtacaggttttttacttggcgggtggggggttcagggatgcgtttcaaggggcagttcctccagtttctacacagtttctgtgagcatgggcaggtgcatttgctaggagaggccacggacttctgtcagatgtgaagaactaaccacagctccgtgcactctgcctgggtatggcatccgtgatcgcaacatcacaagctgtcaggcgatgatcccaaatctctgtctcctgccaagatcttctgcctgagctctgggctcagtgccaacagcctaccagacatttccatctggatgtccccaaggcaccctaaagacattcgtttccaaatcttttccatttttgtgttaccgacaccctctgccaaaaacccagctttttcagtcactttccaagtcagaaggctgtgaagtcatccttccccctccccagctttattaaagtctcattaacaaataaaaattgtatctatttatggtgtgcccaggggtgtccaagagagagaatacagtcatgggttcttagccagtaaagccccttcctcatctctcttttccacttatcactagagacagaaactaaaaaccatggcttcaagcgactaaaagcctaaaacaaaacaaaactgagccacaacaacaaaataaggtgggtacaccatgatgttttggtatgcatatacgttgtgaaatgattacataagctaattagcataaccatcacctcccatactgatcttttttttttttctctcgtagcgagaacttttaagatcaactctgtcagtggtgttccagtctatcatgttattattaactgcagtcatcgtactgaacctctccagaacgtattagtcctgcataactaaaactctctcccctttcattcctggtatctcctcaccactcaacacatcaaggcagtcacccaaattgtgttgatcccactgattctacctgctagatatctttcacatccttttttctgatctagcctttctgcaattttcctgcttgtaattctctcatctctttcccaaattgtcactagagcttccctactggttttctggtatgtaatttcaattgtcagatccatttctaccatggccaccaaagtagtctttgaaaattatgtgttatgacatcacatcaacccttaatgtcacccaaatataatccacacacactacacagtaacaaataatagaaactcctttgcctgggtgagaggtgcttcgtaatctggtcacacattacctgtccagactcaacacacactgtcattttcagcaatatttccctcagcatactatgttcccatatgtttgcacacatttcctgcaatgctcttaccctgcttacccagctggcaaactgctacatatcctccagatctcagcctatgtttgaccttttctgggactaataacaacaggttacggtgacgagcatttgctgggcgcaacacactcttccaaaggcttcacatgggttaacttgagccacacaacagtcctttaagaggtactgctgttatcttcattctacagaggggaaactgaggctcagaggaatgaagaaactggccaaaggtcacacggtgaacgcgtgggcattgcaaagattcaaacctagcaatttggctctggaatccactttgttaaaaaaagaaaactcacgtgaaaatgatttcaaacctactgaagagtagcaagaataatgcaaagaaaagaatacctggaggcacttgacccagattcaactgccattttgcccatttgccttatttttaaaattattctctctctctgtatgagagaatatgtgtgtgtgtatatatatacacatatatatttacgtatatgtatacacatatacacatgtgtatgtatatatacatatgtttatgtatatatacatatgtgcatatgtatatatatacatgtgcatatgtatatatatacatatgtgtatatgtatatatatacatatatattttttctgaacaatttgagagtaaattacatatatcatggccttttgcccttagaggatacgtgagcataaaaatcctcttatgtaagtacacactcttgcatgaccaagaataagtatattctttcataactactgcagtatagttattaaattcggtgaacacttcatttaaatgtatccattcctccatccagtttccaatgctgtcaactaacctatcatgtctttatagtttttttctccctccagtacaagacccagccttggattgggtgctgtgttagacaacgtattcgtgttagacattgtattagtgttaggtactgtattcttctagggcatcatatcctcaggtgcaaggtgtctatttgaccttcagtcatttcgttactcttgatcacctggtcaaggtgttggctgctatgtccactctgtagttgctatttattttttcttgtaagcagcaagctttttgtgggacacacttaagcccacaggaactcctgctacaccagatttcctattccccaccttgggtttagcatgaactgacgaatctggcctaaaccaactttcgtgtgatggcttcaaaatcaggacattccatgtccagtactttctccgtgttggccatgggcacctgcagagcccatgcgcttaaacaggatgccatggtttccttccttctcccaggtaggcttagacaccctcacctacatctccaggctaccataatagtaatgggctgttttgccattgttttgtctacctccttctccatgaagcctatgagcttattgagggcaagcaccccatttttttctctttgtatccatggcacctatgaggagcttgtcctaaaattggtgctcagtatttgcttttgactaagataaaatctatagccccatgtgggtggcagaataatggcccccaaagaggtctacgtccaaattgctggaaccggtaaatatgtcaccttacatggcagaggggactctgtagatgtgattaagggttttaaaatggggaggttatcctggtttatctgggtagcccaatgtcatcacaagggtccttaaaagaaggaggcaggaggtcagagaaaacggagtaggctgtgttgttggttttcatgggaggtgccatgagccaaagtaagtgaagagcctctggaagctgggaaaggttagggacagagctctccctaagctccccctgcaaaggaccacagccctgccagtgccttgatttattccccataggacccatgtttggacttctgacttccagatctctaagatgataactttgtgcatttttaaaaaagccagcctgtgtgtggttatttgttacagcagcaataggaattgaacacaccgacttcagtgggaaattttctccccatcccctcctccacagctgcatgccagggctggtaaggtgacagaggcttcctggcaggccaggggacacccctcaccccgcccccaccctccccaagaggacatccctgagggtttctagctctccaaattgtcttgcagaacatcaggcatctgcctaaacagccccggatggcgctggctcctttcttgtaggaagggaggtgttctccagcgtgggtctcctcagctttgacaaaaagggacttttttttaatgaaaaatgctgcccctcatatgccccatggaatactatgcagccataagaaagaatgagttcatgtcccttgcagggacatagatgaagctggaaaccatcattctcagcaaactaatacaggaatagaaaaccaaacaccgcacgttctcactcacaagtgggagttgaacaatgagaacacatggacacagggaggggaacgtcacacaccagggcctgttggggggtggggggcaaggggagggagagcacaagaacaaatatgtaatgcattcggggcttaaaacctagatgacgggttgataggtgcagcacaccaccatggcgcaggtacacttacgtaaaaaacctgcacgttctgcacgtgtatcccagaacttaaagttaaaaaaaatgctgcccctgaaaagtagagctcaaggctttctgtccctgaaacaaaagcaggaacatgcataccccacatttttatgactgcttgggactgaagttagaaaacaactcatcggacagtcagacattgctggaggagtcaggagacgtgtttctattctgtccgtctccagtgtgtgcggcacctctcagggcactggggaccgtgtagatttgctgactttgataataaaacaaaagggagaagagaagagtaaaacagggtaaaagaagagatctgggcaataacggtagggctccagccccgcttttcaatcctgcctcactcactccaagaacagcttgagctgcccaacactggggggctgggagccaaccacagtgggtggtcacctcattctggtgtctggctatgggggcagatagacagcggaaatagaaaaggagtgagaccaagctcctgtgtgtcctgaacactcctcctgtagctaactaccggcttctccggtgtgtaagactttcatgcttactggtttttctttctgggaatagcccagtgctctttgtctgaaacctaatgtatgcccagcaacagaggggaacaatgactgacgtattcattgcatttcgtcagatgtaaattacagatggcagcaggcagaagctgcgcctcctgcagagaagggtcatcgtgtcccagaggacagcacaggccaggggcaagcccacatatgtgggtgctggggctcactcccggcaatctgggaaggcctaagaacaaaaggtatattacaaagccatctactgcagcatctatttgatcccaggggagccccatccagagtgtgctgggtggaggagaagtcactccagcttcccaggaccccgtgggtgggagctcctagaacagcgacgaacagggggctgacgacaatgccgacggccaacactcactggggactctgttatgccagtcattttgcatagtgctttacaaatcatctttataatgtatttgtgtttttattacttttcataaaaataactaagtatgttataatgatttatggtttattacttgtacattatttcatgtagtcttcagaaaataccctgaagtgaggtgattttactagccccatttcacagaagaggagactgaggcttagcagggtgaaggaaacctgcagaggccacccaggtgaccagcaggaggggcagaattcaaagccaggtggtctgatcccagagcttgtgctcctgaccctgggcttctccaattgagagccacagacactgaagatgtggcaggttcagtcacagagaggctggcaggctacgccttcagccaagtcttcacttctttcgttcagtgtcccagagccttccctgcttctcttctcactgtccccgtgacagggtcagctgtggccccggactaaagtgatctagaggtggggtttggcctgccaggggtccctgggctcaccctgtctcctgtccgccccaaccccagagtgccagctggtgttctctcccctggctggtggtggccaggcctgccctgttcccctgccctgagtggctgccggcttgtatctgtcccctggaggatcccagaagcccagggctgctctcatggatgtggtcacgtcactacccggggtttgcagagcacgcatctaattttccgacttcacgaggcacatccaccaagaagctgcaatctccccaagagaagactatcgaagcctttgtcctaatgcagggcatggactatgttgacaaattagtgaacacagcctgcctctgccacagcgatccagaggtgttaatagtggagtagctctggtgtccagcaacatgactcaggcggggttattcgcctaggttatttcattaaagacattggagagaagtgagccaggactcccttcaactgctggtgatatttgttggggttgccttattctgggttagatacccagtgagcatgatcaactgaaggggacgtgaggtgcagagagggggctgggagcggctgaccctcggtgtctccgacaccatcacacccgtcttgtctccctgacatgcctcagttccaacctgccatcgtcatgcgacgctcaccacacccaggggtgacatgcggctgaaaggcacccatatggtcacggcgcgtgtaatattatggaatatttctctactaattgacaagtaggcacagccctccatctccccaaggactccatccacctcctcagcttcttcagactctttcttgggattcgctagaccttctcattacccggcagctaaaaggaagagcagagggctttccagatgttgccccccgtcttctgtctgcttctcttctgatttttctgtgctcttctggttcctctgcgaatatttgtatattacctggacgaatccacatgccattcataatacttagttaatgtggaccacgtgattcaacctttttttttttttttttgagacagtcttgctctgttgtccaggctggagtgcagtggtgcaatcttggctcactgcaacctctccctcctgggttcaaacgattctcctgcctcagcctcccaagtagctgggactacaggcgcccgccatcatgcccagctaatttttgtaattttggcggagatggggtttcaccatgttggccagatggtctcgatctcttgacctcatgatctgatctacccccgccttggcctcccaaagtgctgggattacagcatgattatggccttcaatgtagttttaaatcaactcacctaaaacaagcaaccaagaggctctatggccaggctgaaaagttttctccagactccatcacactgggtaatgggggtgttgtcacagagcatttctccacatctctgctaacctaaaaattctcccagcctgggttttaacaaagcagagccccaggtccatctcatctccaatttgtcttgtaatcagtgtcaggggagggaagacaggagcagctggcttgttatctcactactgctcatcaccttcctgctcagcaactcagcagcataaaatgctgctcgaaaatcccccagatttgacctgacatgagcctgggctcctgtctggaggctttttaataatgagcagtttgcctgggctgagggccatttccataatctccacccgcccctgcaggcattttgctcactagatggggagagaggtctcccaggtggagggaatttggagcaatctcaaggaagagtctgtgggcctgggtgtaggcttgttttgctcttctgtaatttagagattatttcctggatgcctgacattgttggtcatttgccctcacgttcgtttctctcccttcccctgctccgctctgaatcccaggctctgcaaaccgtttcccgggcttccttgtcaactggtgtcctggtagtttcagccaacaggaggcactggtgagagaggggagatgccagggtatctttctccctctttctttctgtgctttgggcagtgtctcttaggagctgagtccttcccatccctccagctcccacccggcacttcctgccaactcttccgagctctggcaacaccacctcctccctttgtctttgcagcctgggcagtcgtatttgcttcctgctatgactatctctaggttttctcaggctcccctctttgtccttccagcccatcaacactggctcacatcctaaatcccaaccctcgagtcctttgctgtcgtttctgttgtcctgactggactttgctccacacacctattttgtgtgcagccctgtgccagacactgggaggaaaggagtcagccgcgatagaatgcagtagccgcaagtcagagagctatgcctgtggttcttcggggagttgctgctcaccaaatgcagaatttaaatgtggtgttggctcacggcatacaaaggttgaaaacgatggaatgagagattgcgggcctaaatagatgggaataaatgctctgaaggttttgccgtttcccctgtaatgccgggtctcggtgtttgggtcatcgtgaaatgtcagaacactccaggctgtgccgtgaagaatggaaggagagcagtacatactaattatttctacctacagcgtttctgtgcctctcttaacgattttcacaagctgatctcatgaggcattttcatactccaaaacaaatataaaatattccacctcaaaattatataagtgacttttgagaactccaaaatcaggagggtggcttttcatagaaccccaagctcagtggtttggggtgcctccagcagtagggccaggggctcaggtgtgcatcagtgacagaagcagaagcatcaggcggacgtgattgcaatggcttgctggggtggcggttctgcagctttttccatgtgtcctggatgactctgctctcatttcggctgggaatcatttcccggctctggaaagtttctccagaagcgcactgatcaggagcgtgggacacctagatggaaggagatgacacagcgtggctgaggcttttgtccattccaggcaaaaccattcacgacattccttcagttcctggttcctctttcattttcaaaatcttctctggaaatcacaattactcttatttaaaatttgtgacacaggcgtttcatcatcttttctttggtagctgagaacagcttgatagatggatggtggtcccacagacctcatttggagatgctctgaagatccagtgaaggggagtgaatgtgaggtggtgcatttgtgggatgacagctcagtgggacacagctcagagggaggtgaggagagagcatcaggagaagaaccaggtagcagacacaagagggctgtgcactctactcacgtcagagtgctgccttcattctcatttttagaaaccacagaaaatatgcttacatttccccagttttgcaactcagggagctaggatgagaggatattgatgtattcattaactcaacaaatatggactgcttagcacccattgcgatacaaggcttctagaactgtataaaaatcccctgctttcggggaatgtgtctttgacatccagcatcctgaggtcatttaatgagtgtttggcgattgagtacaaatcataaatttgtaaataagatgtaatattttaaaacttaataacgatgatacttatattccaaggatggatcatattgtttgtgattgttccctgtgatatctatatctggttcagtaacagatggttggtcccctaagccatttttctcaaccacttggttccttttcttattatatcttttttattttttaaattagaactttctgactccttagagatggcagctagagtctgttggttctcacagttctagaagcttgaaatgtccacagacccagagcatttgccctggcttttagttgccaattgctttctgagaattatgcaattgctgttgatttctctgtgcacgccactgaaaagacactttctcagtatgttttagatcatgtttacacttttctggcattacaggatcaagatcaggaaacatactgttgactaaaaaataaagaacagaacgtgaagtcagccagcatttctgtttcatagatgtgctgtgcacaaacgagagatgcttggtataaagcacacacatcaatgattccttacatttgtaaaacaaaacatttgcaagaatgcacagatgccagtaattggtttcccacatagaatgccatctgataaaggaactcactaataccatattgcactttctctgcaagcatctctggcattcaatttgcacctgactttccaagcttctccaggttggtgcgatctgtacccattttatgctacagggagtacatgcatcttgatggtgattatggagtgattttattttctttacctttaaccacaatgttagttttgtataaaaagcattatttttgcttactagagaggtactttttttgaaatgttgtgaatattgtcatgactttatgctggtttaataaaatccaattttcagagagtcattatcattcttcctactcattctggcttaggcattttgtgttgctataactgaaggctacagattgggtaatttataaagaaaagacatttatgtctcacagttcttgaggctgggaagcccaatattaaggtgctgtcatctagcaagggccttcatgctgcatcttcctacagcagggggcagacggccaaaggccaagagcaggtgggagagtaagagacaggaagggctggatgcatccttttatcaggagcccattcccattataaccaacccactcccaagatagctaacacatgtacatgcctatgataacccactccacaaataaccaaaccactgctgagataactaacccactcctgtgatacccaacacactcccaatataatgaatccactcccccagtaaccaacccactcccaagataactgacatactcccaatataatgaatccactcccaagataatcaacccactctcatgataactaacccatccccaagataagtagcccactcctgtgataacaaactcccaaaataaccaaaccactcccgtgataactgacccacttctgacataactaacccacttccatgatacccaacccactcccaatataatgaacatactcccacgataaccaactcactccaaagaaaaataacacactcccaatataaaccaacctattcccaagataaccaacccactctcacgataactaactcatccccaagataactaacccactcccaaaataaccaaaccactcccatgataaccctctcctgaagtaactaactcagtcctgtgatacccaacccacttccaataaaatgaacatactcccatgataaccaactcactcccaagataaataacccactcccaatataataaacctactcccaagataaccaacccactctcatgagaactaactcactgttgagataactaacccattcccatgataactagtcaattcctgagatagctagttcactcccatgataaccaatccactcccaagatagctattccgctcccaacataaataacccacttttgtggtacccaacctactccccagataaataacaccctcccaatggagtgaatccactcccaaaagtaaccagcccactctcataataactaactcactcctgtgataccgaatccactcacgagataaataacactcccgagacaactatcacactcctgtgataacccactccctcaataaccaaatcacttccatgataactaacccactcccaagataacaaactcactcccatgataactcactctcaagataactagcccactctcaagataactaacccacttttgtgataagccacttctgagatattaacttactcctgagataaataacccactcctgagatcattaacacactccccaaataactaacccactcctgtgataactaacccactcctatgataacgagcccactcctgagataactcattcactctcatgataatcaacccactcttgagataatgagcccacccctacaataattaatcaacttctccaataactagcccactcctaaaataactagcccactccagagataactatcccacttctatgatagctaacccacccttgagataactcactcactcccatcataactagcctactcccaagataactaacccactcctgagatatctaacccattctggagataatggcattagtccacttgtgagggcagggccctcatgacctaatcacctcttaaaggtcccacatgtcaacattggtgcattggctatcaagtctccgactcataaactctgggggacacattcaaactagagcacatcctattattttcaatgcttgatcatcatacttgcagattcacctgcctcagtacattcctatttacatttgacatctgtccactctttatgttcacatcatcattatggacataaaactgacattactatcttagttactagtttttcatttcagttaacctgtgtgaagccattgatctatttttatgaattgaaaatatgatgtaaacacaatggaagcaacagacactgcaaactttacaaatgcaaatgaaacacaaattatataaaattccattagctgataataattttagcctgataactgaatgctggctgaaaacaaaaccacagaccatctggtctttgtaatgcctacataactttaaaatagtaatgattattaagaacataatgtggcttctttgataatcgtaattaatcttatctttcaaatttatgacatatataatttcattgctttttcctctgcagctgtcaatccacttgctagaatgctagatattctctattagggagtgaaggcccaattaggggagtgaatgttttagcatggcatgctggtggaggtattgttcagtttggatggagagatagaatttgtcagaggggtggagatgagatgcgagataaagtagggcaacatcatgaagcacctggtgctgacagaggggtaggtgaggtttatattttagagaaagattaccatatggagagtggtttgggaagggtaccattcagagaccaaaaagttacgtagggagttgtagaaactgaagtgagagatgacggtagcagggcttagaagaatggtgataaaggtggagaggagaggactgctctaagatgcataaggaaactgaatacacatgtacattagacctaatggctgactctgtgtttgcacacacgtgtgcatgctttgcaggggagaggaggcaaaatggataagagggagaaatcaagaaggactcctttttcctgaaatggaaaacacaagtgcatgagcaggtttttgagaaaaaaaaaataatgcatttgcttttagacatcttgagtttaagttatctgtgtgataccaagttggaatgtggcacagacaactggaactcagaacataaaagtggtttggaatttcttattaggtaatcatctgttggcatagaagtatatccaggcattgattgaatctatgcaaacgtacaaaatccctcagggcatcctgagaaatgaagaggcagaggatggaggcctaaaggatatctgtcttcaagtgttgccagaggaagagcagccacatgaagaaagttaggagaaacactggaagagcacattggggaatttcagaaaaaaagagtctttcaagaagaggcagtgatcaacggtatgagtctattttcacaatgctataaatatactgcctgacactgggtaatttataaacaaaagaggtttaattgactcacagttctgcatggctggggaggtctcaggaaacttacagtcatggcagaaggtgaaggggaagcaagtgccttcttcacaaggtggcaggagagaggaagcaagggaaatgccccttttaaaccatcagatcttgtgaaaactcctgcactatcacaagaatgcatgggagaaaccacctccattatccaatcacttcccactaggtccctcctctgacatgttgggattacaattccagatgagatttgggtggggatacagagccaaaccatatcatcaattgtttcaaatgtagctgagacttcaagtagatgaggatggacaatgtacttcttggttttaacagcaagtatttggttctgttaccctgggaagtggagttttaattcagtgataaatagagtgcactaggttgaggctgagagtggatgtggattagaagggaccacatgagtgcaagtgatgcattcatgttgatgagctgtgaaaacctgaaaccgggcagtggctggagggacaccttatatagaaagtcaattcattttttcctttaacacggaggaaatgtgaacatgttcataactggggaagaaacacacgaagagagataaatgacatatgcataatagaaaagagaaaactgaccagacacgggcactcacacctgtaatctcagcgctttgggaggctgaggtgggcagatcacttgaggccaggagtttgagaccagcctggccaacagggcaaaaccctgtctctactaaaaaatacaaaataaattagccaggcatggtagtgcatgcctgtaatcccagctacttgggtggctaaggcatgagaatcacttgaacctgggaggtggaggttgcagtgagcctagattgtgccactggactccagcctggtggacagtgagactcgggctcaaaaaaaaaaaaaaaaaaagaaagaaaattgataagacaagagtagtggggattcagaggaaaacagatatggttctaagacaggagggaggctgcctcctccactgtgatgacaggggagagttagaatggctgtggatacaagtgggcagccagggaatctgtttctgtacaacagtttctcatctctccgtgaagtaagagctgagatgctgcctgaggtagaagagatgggatagtaaaactagaagagcatggagcaaggatgaaacaccctccattgaaaggagaggaaaaagcttgttgaacagggatgagctctgatttgggggctgcaaatcacttatctcagtggattgtgtttctgaggaatctatgctttgctactgcatcaactcctggtgtatgttggggtcatatggacacttgttttggcctcaaccacatccattttgtcttctatttttcacagaattcaattcacatttttcttgtagaatcatctctctcctactcccaggccaagtgggctggaatagttggcttgggaagtggcatgtggcccaggcctcaccaatcactaaatcccattccatctggttgcactgattggttcagagatggacaaatcacccaaattgagccaataagactcagtctcaagactttagtttgcattagtaggtgaaacaacatctctttccatcttgttgctgacacagcagatcatggaactgaatctgctgacatccctcttgcttaggaatgaaactaacatgaaggaagccagagacaagccatagagagagactgattcctgatagtagtgtttgaacccatgtacccagccattctatgtagcccttgactttttagttacaagagccaacaatttccctcatgtttaagttttctgaccttacaaatgaagagtcttggatgctttagaaggacatagcctgatagatagacaggtcacaaaaatggaaagttcttagaggttactacaaagaaaaaagaaacagggcttggggactacttgagtatcagagatggaagacaggagtggtcaaaggtgactttcagagttttcatgtgtgggtgaccaagatgacgatgattccatttaaagaaatttcaggccaagagctgagggagatgagtttgattttagatgaactgagttgagatgcggttgcatcactctctgcagaaaaattcatccagcatttgcaaatactatttcgatggattctgcccagagcatactatgcgctaaaaatgcattgaatgagtaaaaaagcaatgtgataaaaaactcataaaataattatttaaatatctctatcttctggtgggtatgtgcctgcttccttccccaaacctgtatggaaacacatctgaggaacagcaggaaggagggatgtcattctggcttcctcctgggagagtccaagaggaaagactgtgtacatattttgggtcatcatttattctaaataaatggtaaaaaggaccttgattccttttgtttaaaataattctgaaaacaaaatacctgagcagaagtatttaactgaacatctcagacttttagagttggtttccaaatatcaaaatccaggactttccagtgaactgagctttccatggacatttagtatcgtaaccgacttatctcaagaaaatgtttcagagggctgggtgaaaacttaagattgcagccgtggggagatggtgcagggttggagtgaagtactgatttactttttgtacccaaacagctattaaagtaatttcctaaatctatcaaaataatttcctagacccatcttctctattacggcttttgcctgtctctgagtccttctgctggacagagattaagttggagagtcattgaaattgttacccaactcgtgccagcctctcccctggcaaggtgtagtagccacaggccccctggaggctgacctattttgccatgtcagaattgcttaattctgaaaatatagtgtgggcaggcacctatgtcctgagagtggagcattgaaaacgctgtagtcttctaaagcaggatcctcacactgccactttgttgctggggaggaggcagactttaaaatcatatcgaaatgttgaatgacccagagagggggattcctctggagtgcaaagcaggtctgtgcttgcagacctgtgactcttgcttagcacaaagccctgacaattttgttgggaaacatgtggttcctccttttgcacagtatgatgtcttggagaataatgggtgagggttatgggctgaactgtgtcccccctcaattccctatgtttaagctctaactccaatctggctgtttcagagacagggtctttagggaagtaattaaggataaatgaggtcataagggtggggccctaatctgataggactgatgtccttatataaaaataaaagaaaggcctctgagagcttgcatgctccatgcactgaggaaagaccctgtgaggacatggagagaaggcagccgtgcacaagccaggaagagagccctcaccagaaaccaaccctgctgatatcttgatgttagacatccagcctccaaaaccgtgagaaaataaatgtctgttgtttaagccacccagtctatggtattttgttatggcagtcggagctgacaaatacagtgaacatggaaagtaaagtgagcattaatattagcaccagtgatgagtgatgcagtttggatgtcccctccaattctcatggtgagatgtgatccccagtgttggagttggggcctggtgggaggtattagatcatggggttggatcccttatgagtgcctcggtgatgtgtgctcttgctctgagttcacatgagatccagtcatttgaaactgtgtggcacctccccgactctcgttcctgattttaccaaatgatgtgccatctccccctctgccttccaccatgtttggaagcttcctgaggccttcttagaagcagatgccagagccatgcttcctgtacggcttgcataactgtcagccaattaaaccctgtttctttataaattacccactcccaggtatttctttatagcaaggaaagaatgttctaacacaatctgtcattgtgccgacttgccagggacctgggctagcacagtcatccccccagcatcagccaagtggccactggactgcgcaggaccagctctcaacattgacactgtgtggctgcaaggtgcaacagcagcagggaacctccgacaccacgtcctgggggtggatccccaagaccttacttgcaccctgcaggcccctgaaattcttgggcaagacacagaaggggtgggctttgtacagaagattctagacaaactgataataaggcaggtgtgcccttaagaaattagttttcaacaatacaagttgtaattgtgtttgtgtctcaaaattgatgaagcgtttcatgagctaacaatgctaaaacagctgcagtgattcttgtttgaaatagcatttttcatttctccctcctacattcaaacaacagctattatgagttaaatgagttctgggactctgctgcttccccatcttctgcctctgcagattcatcctctgccgttctcttcccccacctccccaaggaagctgacttctatgggtcgaatcaccagatcctctcttcccactagatctggggttgggtttggccactggaaggcattgacaggatcagaggaggacagaaaggctggtgtgtttgctgcttccccttccccactgctggactgctgctgggcagtggtgggtgcctctaattcttcatggacaaagcttcccctccctgggaggcttccctctctgctattgctgtattggggcccagcaccaactcccgctccctgcccctccgggccttggggtgttaatggcttcccattgttatgaatccctgggtgcttccccatcccggcatatcctctgaaaatgccccttccttcaattctttccagtcacctctgtgaggttcctgtcagtccagactgatacagcgataattggctactttattctaatccaggcttatcttgtttactccttcatcctcctcacctggaattgcaatctactccctgggaagagaaacactgagatgtcccagccggatggaagttgataccaaattattgtcttttctttgttcaagtgcgtgacaccaaatgggttcccaggccttccctggtgggaactgaggatccaaatactgtgcatgactttctccagcacttcaaggagttacccagtatgcagctcgatttatatgcaaattcttcagaaaaaaaccaacaaaacagcctggactgaaaaaaaccacaacacagcctggaagctggtgggagataatccagccccaggttctgtgccccgcaggagtgcatttcccggtcaactcatgtcaaaagtggaacgtgacagcctttcctctgaccttagtcaaggcttagcctcactggtgctgactgctctccatcggcctggtatgattaaaacaggcttgtccccaacaatgtgataccacgacccacccaccataatggctgcaattaaacagcgaaaataatcaaatgttggcaagtacttggagcaactggaattctcaggctttgacagcatgaagtctgacagtttcttgtaaagttaaacatatacccagctgtattggtccattttcatactgctataaagaactgcccaagactgggtaatttataaaggaaagaggtttaattgactcatagttcagcacgaggaactatagttcagcctcaggaaacttacaatcatggcggaaggtgaaggggaagcaaggcaccttcttcacaaggcggcaggaagaagtgctgagtgaaggggaaagagcccattataaaaccatcagatctcatgagaatttactcagtatcacaagaacaacatgggggaaactgcccccataattcaattacctccacctggtatctcccttgacacatagggatttttgggattacaagatgagatttgggtgggaacacaaagcctaaacatatcaccaacctattctactcataggtatttactagagaacaatcaaaacatatgtcttcatgaaggtttgcatatagaacattcataccagcttcagtcatacgagctaaaagctggaatcccctgaggaaaatagataatggtatattcatacatgggaaaattactctgcagcaaaaaggaaaggactattgattcacaaaataacatgagagaatctcaaaaatatggcatggaatggaagaagccctccatatgcaccgaatgatctgatttatatgaaattctaggaataggcagactaatctattatgaagatgtcagaatagtggttgcccctggagagggtaggatgggcttggaagggagctgaaagaactttctgcagcagtggtagtgatgtacatctggatgactgtttgggttgcaaaggtgtacacgtgtctcaaagctcatcactgggcactcttaagatttgtgcatttcatggtgtgtaaagtctacataaaaatgaactataaaaaattgaactctacgtaatgatagacaaacaagtgtttatatataaagtgttgtgatgtctgcaactaactgaaatggacaaagaaatggatcagttgttttagggatgaatagataggtgtgtgacaaaacaagcacagcaaaatgttcattgcaaaataaaacaaaacttgagcctgtctctaccctgtttctctaacaccactctccacatgtgttctcccctgaactggaaattgaccagtattaaaaataaaaatttggccatgggcagagcagtgtcaaacatttcttctttttttttttcccctacaaaagagatactctgccatgttaaaaacaaagcatgacaaaaagttaaaacatgatatgaagtgtgtcatcccacagagccttgactccttgactccttctggctagactttttctaggttgttttcctttgtgtaagtatagaaaaaaataaatcacaaaaaggatgctggcatgaccccgggcatgatgctctcgataagaataatagtggctattcacgtgacgctgactatgggctgagccctgggttatcctgtttatatgcattatatgcatcttattttagttctcacaaccaccattggaaacagcagctattattatcgctgttttgtgggtgatgaaagtcaggttcagcgaggttacataagttgcccagttacagagcaaaccattatgggagctgggacttgacaactggtctttctaattttcacagcaggcaccacaaactcaaatgcccacagggcttaggcaggtaaaaataagtaacgtgggctctatgtaaatggatgcacccgatgggacctgctaactctcattcgactgagtgttgcggctacaatggggatgggggactgtgggaagctggagaacccctgctccgtctaaagggccacatatgtttcgtctccggctactgtttgacaggcatgaatgcgggcggagctccatctaaagggccacgtatgtttcatctccggctactgtttgacatgcatgaatgtgggcggatgtggcaggctttttagtatctcaagtaaaggccaaatttagattctatcctgaaatgtgtaagtatttaaatgttgtcaactaatttaatattaagacactgtatgttagccactgctatgtgattactaaaacacagaaacgaagtcaaaccaaatgtgtattgaagcagactatgcaacctccagtaagaagctcattacataaaccgccaggccatcctgggactacgcaaggacatatatatacacatacacacacacacacacacacacacatatacacacacacacatatatatatatacacatatacatacacacacacatatatatatatacatatatatatatatatatatatatatatatatatttcagttgtcaactcggaagacacaagtacattttcctgggctagctcagcatcttagaaaccacaccagttgctgggcgcagtggctcacacttgtaatcccagcactttgggaggccgaggagggcagatcacttgaggtcacgagttcgagaccaacctggccaacatggcaaaaccctgtctctactgaaaatacaaaaattaggcatgttggtgcatgcctgtgggcccagatactttggaggctgaggtgggagaatcacttgaaaccaggaggccgaggttgcagtgagctgagatcatgtcactacactccagcctgggtgatagagtgagactctgtttaaaaaaaaaaaacaaaaaaaaaaccagtgccaacatgggtagcaaacagagctcaggaacctagaagtttcctgaagcacagaatgctgagacgaggaggcctcaccatctcgcagcaggtgggaccactgcaattagcatctcccaggaaccaggggcccactttccatagcaggaagggcagaaacgtcgatttgctagaagtctccagctatgtggctgttggcttccccacgcaactcatttaagtagctggcacctaaaaccagactgttggtgcctgggcagtctatttgtctaccaagtgacaaggttgcttttacacctgcctgggaaaaagctgcaggagtgacaggagtcaggggcctctgcaggagtacaggagccactggtcctggcatggggtctccataggatgaagaaagatcaggggacctttgtcttctcttggtgcttcttgatttatcatttccctcactgaagactattccttaacacataccttctgacactgtggaattggcacaatactagatacagcttagatctagagtatgtacatctatttaatattaaaataatttaacagtgaattcaaatggcagtttgcccaattgggaggcccccacaaccaccccaccaagccccagattcagtgtttctaagatatgggagctccaggaagtgaaaagaaccacactttattcggaatcctaaaggagggctgcactgagcataaggactggttcactgtcaccatcgagaaatgtttatgaatggttggagggaagcttttagaggaagaaagctgtcaaaaagaagtctttctcttctgggcttcctctgagtggtttccaaaacaatggagctttttgcaaaaggtaaaaattatagccatattcactgagataaaatgacaagttcagagttaatagaaggaacagtcatgatgattcttggaaaatgtgttcccttttgaaaacagtgaaggtattgtccctggaaaaattgcagctttctctaagagttttaactatggtttccactaaggagtctgctatttgggctcctcaatccatctcctcttttgggattttttttttaccaacaagagctttattgatatataattcacataccacacaaattatcctttaaaagtataaaattaagtgatttttagtatattctcagagtcatgaaaccatgaccactatgtaatttttgccacacccaaaagaatccccatacccattatgagtcactttcattcctgctcctgccagcccctgtggacccctaatttactttccgctctatggattttcctattctagacatgtcatatacatggagttatataagacatgcctttcacgtccagcttccttcacctaatatgacgtcctcaaggtccacctgtattgtggttcccagagctgtgatggaccctcaagttcacctcccccaggggggttccacctgggctctacagacatttaaggttggataattctatgtttcgtggggctgtcctatgagtcataggctgtgtagtgtcatctctgtcctctaccttccagatgctggtggtatctcatcttattttgatgggaacccaaaaggtatccagatattgccaaatgtcccctgggtggggaatcacccttggttgagaaccgctgacctaactaactctcttctcaaactctacccaactcccatcaccatttaaagaaacaaaaccctggaaggctgactgacttcctgaaatcccacagttagctagcggccgatagagggactagagccctagctcttgatatctactttgtatcactctaagaatctacctttcaaatatacctttgctgaaatcaggctgctttttacccaaatagcattttcgtaaagccgtctttaaacttcaacccacaaccaaaccatccaaagagcttgttaaaatgcagatctccagcccccagccctagagtttgtgattttgtaggtctgtggtggggcctaagaacttgcatttctattaagttatcaggtgatgctgatgcagctggtctgggggtcctgctctgagaagaaccattggagcattcactcatcctttacttgtctgtggactgggagtctcaaacacaattatctgctgtggccaggcagaaaacacaactgtgagacatgaatggtgtgaggatgttgtggctggagctatggcagccatcatgtgacagtgaggactgagtcaaaggaattcctgggaagccagcctggctccccctgcatggcactgctacatagctgtatctaggactggcaatctctgagcttgatgtcatgcagaatggatgataactcctattattaaccacttttacttggttgttctgttatcttctatctgattgcatcttaaatgacacattcccctcttagcatgcaaatacaatgggacaagctacttcatcgatttttttgtttatctctatatttccatcatcaagacgaggggctgagcagaacttcatcaataagaggggattcaagaagcacttaaatgaatgaatgaattgtactgcaggggccatctcatgctttgagcatctgtgtataacatcttcacatttatttttattttttcaaaatgccatgtgtctaaacaccacttccactattctaccttttattcttttacaaaaacacccttaagcttcttctaagcaaaatatttgcaatcccagttttgatatgttacttatattttctaacacattacatcaaatacacaaatgttctatttcaacaagatctatttagcacctgcaatcctcacgcttgctgtggttctgatcatgtctacacttttcagatgccacactggaccacggccagggcttaattgggtccaggcagtctgacttctttgtgaataatcgtaaagtctccaactccctttctcatctagagctgctccttccaggtcaggggtgaggcaaagaggaggagctgttcccacatgctcttaccatatgcaaactgtgaataaataaaagatgatgagatctcaggctggcagcaaaggtccttggagcagaaagtaattcaccaacagagttggggtatgaattgcagtgcagagagcaagcaaataagccctgaaaatatttgttgatacaggcacaccttggagatattgtggatttggctccactgcaagaaagcttatatctcaataaagagagttacaggaattttttggtttcccagtgcatgtaaaagttatgttaacactatactgtagtctactaagcatgaaattgcattatgtctagaaaataacactcatgccttaatttaaaaatatcttattgagggccaggcatgatggctcacacctgtaatccagcacttttgtgggccgaggcaggcagatcacttgaggtcaggagtttgagactagcctggccaacatagtaaaacccagtctctactaaaaatacaaaaataagctgagtgttgtggcgcacacctgtagtcccagctactagggaggctgaggcaggagaattgcttgaacctgggagccgagattgcaccactgccctccagcctgagcgacccagcgagactccaagtaaaaaaaaaaagtgttattgataaaaatgctaatgataatctaagccattaacaagtcataatctttttgctggtggagggtcttgccttgaggttgatggctgctggctgatcaggctggtggatgctgaagtttggggcggctgtggcaaggactgaaaataagacaacaatgaggtttgctgcattgatcgactcttcctttcatgaatgacttctctgtagcatgcgatgctgtttgatagcattttacccacagcagaacttctttcaaaattggaatcattcctctcaaatcctgctgctacttaatgaactaaacttatctaatatcctaagacctttgttgtcatttcaacgacgttcacagtatcttccccaggagtagattccatctcaagaaaccactttctttgctcatccataaaaagcaactcttcttctgttcaaggtttgtcatgagattgtggccattcagccccatcttcaggctctacttctacttctagttctcttgctgtttcccccacacctgcactgacttcctgcactgaaatcttaaacccctcaaagtcatctagtggggctggaaacaactaagttcttccaaagccttgttcatgttgatattctgaggtcctcccatgaatcacacatgtgcttaatggcgaatagggaatcctttccagaaggtttgcaatttactttgctcaggcccatcagaggaatcacagtctctggcagctatagctttacaaaatgtatttcttaagtagtaacacttggaagtcagaattactttttgctttgtaggctgcagagtggatgttgtgttggcaggtgtgaaaacaagattcatctcgcacatctccatcagcactcttgggcgatgaggtgcattgtcattaagcaggaatattttgaaagaaatcttttcttctgagaagtagatctcaacaggtaggcttaaaatatttagtaaaccatgctacaaacagatacgctgcgatacaggctttgtggttccatttacagagcacaggcagagtagatttagcataactcttaagggccctaggatttggggaatgctaaatgagcactggcttcaataaagttactaggtgcattactccctgacaagacagtcagcctgtcctttggagctctgaagccaggcactgacttcttctctccagctatgaaagcactagatgacatcttctttccctggaaggttgttcttgcttagtgtagcctccttccccaatgatattagctagatcttctggagaacttgctgcagcttctccatcagtacttgctgcttcaccttgcacttttatattgtgaagatggcttctttccctaaacctcatgaaccaatgtctgctagcttccagcttttcttctgcagcttcctcgctcctctcagcctacatagccttgctctggattaggctttggctcaagggaatgttgcagctggtctgatcttctatctagaccaccaaaactttttcatatcagcaaaaggctatttcactttcttatcatttgtgtgttcactgaagtagcatttttaatttccttgaagaagttttcctttgcattcacaacttggctaactgaggcgagaggcctagcttttggcctatcttggctttccatctgccttcctcactcagcttaaccatttctagcttttgatttaaagtgacagactcttcctttcatttgaacacttagaggccactgtattaattggcctcatttctttttcttttttgagatagagtttcactcttgttgcccaggctggagtgcaatggtgagatcttggctcactgcaacctctgcctcccgggttcaagtgattctcctgcctcagcctcctgagtagctgggattacaggcatgcaccaccacacccagctaattttgtatttttagtagagacagggtttctctatgttggtcaggctggtctcaaactcccggcctcaggcgatccacccacctcggcctcccaaagtgctgggattacagtgtgagccactgcacccggcctggcctcatttcaatattgtgtctcagggaataggcaggcccgaggagagggaaaatgatgggggaatggtgggttggtggagcagtcagaagacacacaacatttattaagtttgccatcttctatgggtgggatttgtggggccctaaagcaattataatagtaacagcaaagatcactgattgcagatcaccataacaggtataataaaaaagaaaaagcttgatatattgtgagagttgaccaaatgtgacacagagacatgaagtgggcacaagctgttcgaaaaatggtgctgacagacttgcctaacacagagttgccgtgaaccttcaatttataacaaatgcaatatcttggaagcagagtaaagctaggtaagcctatataagattaataagccttggatataagaaaagtcttcaaaatgggctgttttcagcaaaactactttgagatgaaagatatgatacgttgtactcccagaaatatttcttaccttgtacctaaaatttataaaataggatattccctaatgataggttatttctcatataggcttaaacagcctctgtctagctggctctttttgtccaaagtcatgctttttctcaccaaagattttcagcctgagggattcttcatctgatgagtggatgatctttataacaccttcagcttctgactctcatattgcattaaaccaatcttcttttgtgatttatgtttacgccagtgttcaattctagcaccttctccttcctgcattctcaatttcctctcagattctttttatctcgataataccatttttgtagctaagtcataggctgtcacttagcatttatgaactgagaggtaatgcatgtgataactttatttttgtgaatatccataatgactaatgcattgattgagtccttaggatggagtctcaacttctagcccacccatcccccagttgccagcatttttaacaatccgcatgtgctgaggaggtgatgaaaatctgtaatcctttttcagggttttcagatgttccgaagagagacacgaatatctccaaattgctcaaattttggagtaattttaagttgtggttcaagaaaagagggaaatacgaatttattttaataaaaattggaccagaacaaacgtagcctggttacataaatactcagccaacataataattagggcatctgaaataacgatgccccgcttttctttattttattttaccttaagttgcaggatacatgtgcagaacatgcaggtttgttacataggtatatgtgtgccatggtggtctgctgcacttattaacccgtcctctaagttcactccccttgccccccacccctcaacaggccctggggtgttttgttcccctccctgtgtccatgcgttctcattgttcaactcgcacttatgagtgagaacatgcagtgtttggttttctgttcctgtgttactttgctgaggatgatggtttccagcttcatctatgtccctgcaaaggacatgatctcatgtatttttatggttgtgtattattccatggtgtatatgtaccaaattttctttatccagtctatcattgatggacatctgggttggttccatgactttgctattgtaaatagtgctgcaattaacatacatgtgcatgtgtctttatagtaaaatgatttatattcacttgggtatatacccagtaatgagattgctgggtcaaatggcatctctgcttctagatccttgaggaattgccatattgtcttccacaatggttgaactaatttacactcccaccaacagcgtaaaagtgttcttatttctccacagcctcaccagcatctattgtttcttgactttgtaataatcaccattctgactggcatgagatggtatccattgtggttttgaattgcatttctctaatgatcagtgatgttgagccttttttcataggtctgtcggctgcatacatgtcttcttttgagaagtgtctgttcatgtcctttgcccattttttgagggggttgtttttttcttctaaatttgtttaagttccttgtaaattctggatactagacctttgtcagatgggtagattgcaaacattttctcccattctgtaggttgcctgttcactcttatgatagtttcttttgctgtgcagaagttctttagtttaattagaccccatttgttaattctggcttttgttgcaattgcttttcacatttttgtcatgaagtctttgtccatgcctatgtcctgaatggtattgcctaggttttcttctagggtttttatggttttgggttttacatttgtctttaatccatctcaagttaatttttgtataaggtgtaaggaagggatccagtttcagttttctgtatatggatgccccgcttttcaagagtgatgtggtacattgcagtaaagggagcccaggattccacaccaagggccagggtttgataccaccacttattgccaatctggtattgcgtatgtcacttacagtatgtatctcagtttccttatttgtattacaaatattttaagtgaaaaggttgtaagagaaaattattccaaatcatgtaaagttcttataaatgaaatcattatgaaaaggccccatctctactaaaaacacacaaacaaaaataaccaggcatggtggcacatgcctgtaatccaagctacttgggaggctgacgcaagagaatcacttgaacctgggaggtggaagttgcagcgagccaagatcacaccatttcactccagcctgggcaaaaacagtgaaactccatctctaaataaataggcaaagccatcttgctgttgtacctacttagcctgtgtagcttacataatttattactgatgcaaatgcaatggtactttgtccatctaacttctcagagttagtgtccttagtttgcaaaatttatttttttatgtccaaaatccttctaggtttagtagagttgaaactcttatagggtttaagacgtgaagtaaaatgtctggcagagtccacattacccttgcatacttcttactcctcacccttgcaaaacatcaagtggagtctggagtaattccaacatatgtgtgctcccttccagtgaacacactggtcatagtttcctttggttgaacttgggagccactgagggggcttatgttcaaggaccacgttgcgtggaactagacatcttcaaatgcacatgcagagagatgttcatacctccagagttatctgagaagggagactgtcaggaggagagcagatttcaactccattcttgcctttgccaccaggtatctgctcagtgtatgagtggtggcaaaatctccctcactgttgggattattatttatctccctgtatatcccaccccccaagcttatgtaagcaattggattcccacaacaaatttacatacagtgtgactccaccatactgtttagaagagcaggtgtaattatttcactgaagaacagagggatgtagccaccattgggttgccataggctgttgttgggacccgtaattctagctcctggaacttcaggaaattttccctctgcttggccaaggccacagaggaaggcgaatagcaagaagatggtctttccttctctgatctagggaggggactccttgcctcctgggatttgcagaatcctccccaaattgctttgatggctctcgctaccacacaacactgcagagaataattacagtgaattaaaatccacttcaagacttttgccagggcctctgagaggacatgaaatgtcttcctgttggtaattaacttcgctgaagggcagccaacgagagcaggctgggcatcacttatcacaggtgggaggaccaagttgagtgattaactcctaagaaatagaactctgtccctggcatgtgccatgggcattgcccagtgacagctgttaagaagtaaagtgccaggcacggaggtgtatttagtctgagaacaaatgctgcgatttgggaaagatcctgttgagcatattggaagggaaatgcaaacacagccaggactgcccccagccgtcttgaccgcgcttcaggctgagaaccttctctttggtttggtgcatggcttgaaaattccttatggatggaggcactcacagtgctgaaaagtaacaggctagcacaaccacataaattttagaaaatggggaattaactagacaaaagaaaaaaatgaaaatatttataagtggaattacaagtaagagtatctcattcttgcttatgacttagattttgaagtcagtgcgttcatctattttaaaaaatcaccaatatttattggggcctaatgaatgcctaatgagatacatccccctatgggctatgtcgtcaataaaacaaacaaaaacccagctccaatgaagcatatattctacagagggcagggagacaataaacaatcactgaaataaatcagcaaattacacagtatgtcagaaagtgataatgatagggaaaagtagattaggatgaggtggttgccagtgtttggatgtttaaaagtatatgtggccggggatgattgctcacacctatattctcaaaactttgggaggccaaggtggcaggatcacttgaacctgggagttcaagaccagcctggacaacatagtgagaccccatctctacaaaaaatgaaaaagttagccaggcatggtggtgtgtacctatagttccagctacttgggaggctgaggcgggaggattgcttgcacccaggagttggagactgcagtgagctatgatcgcaccactgcactccagcctgggcaatagaataagtaagttccctgactcttaatttttttaaattttaagttctgggtacatgtgcaggatgtgcaggtttgttacatcggtaaatgtgtaccatagtggtttgctgctcagatcatcccatcacctagctattaagcccagtgtccattagctattcttcctgatgctctgcctcctccctctgcaccctctggtaggccccagtgtgtgttgttcccctccctgtgtccatgggctctcatcattcagctcccactcataagcgaggacatgtggtgtttggttttctgtcctgcattagttcactgaggataatggcttccagcttcatccatgtccctgcaaaggatatgatcttgttcctttttatggctgcatagtattccaaggtgtgtatgtaccacattttctttacccagtctatcactgttggacatttgggttgattccatgtctttgctattgtgaatagtgctgtggtgaacatacatgtgcatgtatctttataagggaatgatttatattcctctgggtatatactcagtaatgggattgctgggtcaaatggtatttctgcctctaggtctttgaggaatcaccgcactgtcttccactatggttgaactaatttacactcccaccaacaatataaaagtgttcctttttctccacaatctcaccagcatctgttttttttttttttttgtgactttttagtaatagccattctgactgatatgagatggtatctcattgtggttttgatttccatttctctaatggagatctctgactcttacaaaattaataaattaaataaaataacataaaagcacatgtgattttaaggaaaaacaagaaacataggccttcttagggtgatatttgggcaaacacttcaagagggtaaaagatgggggcagtagaaattactgctgaaaatcacttaaactgcttttaccaattgtagtaatatgatgtggtcaattgcaaaaatggccccaaattcctccatgcctatgtatacatgcttttgcaaccaggagctttactgattctccatcaggaggtgaagtctatgtctgcactccttgaacctgggtttggccaggtggctgctgtgggtcaaaggaacaccagcagatgtaatacaagcaaggggttacaaagcacttgtgcagcggggcttttgctctcgccacacccgggactctgggaccactgtgtgaatggcccaagctaggcttcttgatcataaatcatacagccacaaatcacacccacaccaaatggggccaaatgccagctgtgtgaaagaggacatgctgcttggggaccgtagacaaacagatgagtgagcccagagttcagagtagaactgcccatcagcgtacagaaacgggatgttcaaagtgtgatctcaaaggaggatggaaaaagccatttgcagaagaaatgggatgggcaaggggttagcaggaggagtgattatctattgtattgctccaacaatgaaataagcttgagacccaactttgcagatgtggggaagggtggtccctccagaggtagcctttttttttgttttttgttttttgttttttttctaagaaggtcaaggtgcaaagcgacagctgtaaggagattccagagcctccccagtttgggagccaagagacaggggatccctggtgtctcttctgtgggagacaagggtgatggagtaattctctccagttgtttcatatccagagctgcagggcgatattgctgctgctactttaacttttattccactaaggctggtaggcagttcaagggtagtaaaattgcttccctatggaaaatgaactcacaacgaaccacaaaattcacggacttttctacttttcagtgctcacagagaaacttggttatttatttatttaatgaaatgtgaacttcggttggatgatggtctgacagcttttatgttgtcaccagcttcaaaaaagtgacaccggccgggcccggtggctcacacctataatcccagcactttgggaggctgagatgggtggatcacatgaggctgggagttcgagatcagcctggccaacatggcgaaactccgtctctactaaaaatacaaaaattagccaggcgtggtggctggagcctgtaatcccagctactcgggaggctgaggcaggagaatggcttgaacctgggaggcggaggttcctgggagccaagctcgcatcacagcactccagcctgggccacagagcaagactccatctcaaaaagaaaataaaaaaaaaaaaagtgacaccatggaggtcagagctgctgtcataaatggcagaatctggcctgctggacacctgccacatgctgggactttgaccactctctatggaccattaacccagtaagcacaattcaacgggtatccagtgcattcgtaagcagcacagatagtggggaggaggaggaggaggaggaggaggaagcagtctgcacttcatatttgttctcactctgcatgattttcctggggaatcaatccactcacatggtgtccacagccaatttacaggattgcaacgcccagctttccatatgcagtctatggttctgtgatgagtccctgcctcactcacgtacatgggttcctgtgtatgcatttattcatttgctcacatactcagtcatccattcatgtgtgttttgttcaatgttacctactgagcacccactgtataccctgcagggttctagccatcaagaatatgatgaatacgagacagacacagtccttgctttcacagaccttatgggaaacatttcaggcagtgctaagatttgtgaaggagattatggggttgagtaaggaggagagttaaagaagcaggcagtcaggaaaggcctttttgagaaggtgacatttggacccaaatgacacgaaggaggccgtttccagatctgcaggaagaaccttccagacaggagaaagacagggctagttccctaactcacttcccttgtcttctcttcatcaggagttggcctctgatggccagtgtggctggggcatggtaagcaaggggaacgtggtacgagtcagggccggggagagccataggggccagatgatactgagccttccgggctacagagaggagtctagaatgttttcttggtgggatgagaagatttagagaatttcaacaggggtagagcatgattcgatggaggttatggggccaggagaggagatatggaaaccagttatgaggatgctgccattatcggggatatgaaggtggtggctggactcaggagtcgctgtgaagatgggggatgtggacagatccaggaaatgcaactggcacctcatactcaattcaaacccaactaagtccaatttttctctccagatttgctccttctttggctaaatggcagctactgttctccatcctgtctcctgagccaggcttctgaaaacaatctgaaattcctcctcctccatttcttccaacatcccatcagtcatcaaagatagattctattttccccaggcctctaaaacacacctccttctctccatctctactttatcaactcttgcccagacaattgcaatcacatccaaattgatctccctgcctctggtttcaccctgctaggattcatcctccaacagcagagagacttttctgaaatgaaactctgaacatgtcattccactgcttaaggacattcagtggctcccccagtcctcctaggataaaatcccaaccttggcttgatgtacacagtgctcctatatggatccttccacagtgctcctgcatcgatccttcccacctctcccacctcatctccttttgaggccccaccccagctcgagacaaacctgacaggcacagagtccaggctcttttttccctatctgtccttgtgaaagctgtttcctctgcttaggatgcctttgttggaagagaccctatttattcttagaagattccatttccaagtcatcatctctgtgatatttttcttgatcttcctcttcctctatgtagaagtgacaattccatcctttatttgtccattttctttcatctcctggtaaaactttattgcactgatttgaaaagctgcttttctttcagtagagacaaacttctctgttttctcaccaccaccagtgtgtctaattcatctcagtgtctctagcacctagcaaagtatctgacaatatcaaacatagaatcaaggtggctacaggcaagagtgaagggatgaggggttcatctgcaaccattatggatagaaagaggagctggccaggcgcggtgtctcatgcctgtaaaccaagcactttgggaggcagaggtgagtggatcacctggggtcaggagttcgagaccagcctgaccaacatggtgaaactccatctctactaaaaatacaaaaaaattagccgggtgcagtggtgcacacctataatcccagctacttgggagactgaggcaggagaatggcttgaccctgggaggcagtggttgcagtgagcctagattgtgccactgcattccagcctaggtaacaaagcaagactccatctcaaaatgaaagaaagtggagccatggacagttagtcatctcactgcttcaccctgcaaccagaacataggcaagtctcaaaccatttgcacttgtgcaggtccacactctgcagggaaggctggtaggagacagactcaggaagagtggacgctgcagtgccatgtggaagggagcgtgctggcaaagtcgcctcttcctggagaagagttggttgtgttttctgtgaaggccctggactaactggacaagtcccacccatctgatggaggctaatctgcttttctgagtctatggatttaaatgttaatctcatctaagtacacatcttcccagaaatacttgggatgatgtttgaccaaatgtctgggcactgtggcccagtcaagttgacacataaaattaactaacacaagggaattggatcttccagttgtttatctgctgtggagaaacaaatcaccctaaagcttagcggctaaaacaaccaccactgtatgatttctcaggatcacgtgagttgactgaggctccttagggaggttcttctgctggcctttgctggagctgctcatggggtggtggttaggttacaacaggtgtggcagggatggctgagggctgaggcttctctctctctctctttggggctaaatgaggcttcttcacgtggctgctggcttccaagaatgactgctccaagaacaagccccagtgtgcaagcacttaccaaacctctggttgcattacgtgtgttcatatccctctgaccaaagcgggccaggccacatggccaagaccagggtcaatataaaggagactccggaatggcacaaccaccagcaggcctggttagtctggaacagccaaagtaacagtctaccataccagtcaacacgtggctgagccaaagagtccttcatgtcacaggggcctattacaggtgagagtggccgctgtcgagaggttgctcctaaaacaagagcctgctcatccgtcattatcttctgcctatggtcaaagctctctgtggccgaaagccatttctagccttggttttcaactctgtcttgtgggtaggagctcaactcaccctttcctgcagcccaggcgtatttccttcttcacgccacctgagctcctagacaacaggatttctagaaggagccttgctagtgttttgggcctgaggttgatgccaacggtctttcagccacacgggacttgttttgttttttaacatgcatttgttgcggctacctaaaagatgagaggttttgcctgaaagtctgcatttctgttttctcttgaagagtccctaggtctagtagaactgggccagtgtcttgtcaaagggacgattctttggagctgggtggtggctgtccccttgggtagggacacggatgattctttggagctgggtagtggctgtccccttgggtaggggcacggatgattctttggagctgggtggtggctgtccccttggataggggcatggacgattctttggagctgggtggtggctgtccccatgctgtcagttcaacagagacccaaccactcactgttgtctccgaaacaaaggtgcctgtccattgtttcttgtcattgcagtaatgctgtggcttcctttcagaaggggcaaatctttctgtggccatgtttttaccacagtgagaaaaaaaaagctaggctgggaggacagtgtgttccttaggaacgccctctgaagacccactatgtcacccactcatgtcaccgtctcacccctgtcaccaccaagtctgcagtttccgttaagacaacatctgatctaggccaggtctctgcaggccacccgcagcagccatgcaggcggaggggcatggggagtctcttcttactcatgctctcactgtcagaattctttaccgctgataaattaccaacatcaacacagaaatcggtcaccttccaagagggcctgcctgtgtgtgcatttaaatagaggctggagtttcgcagagctgttctcatccacaggctgtcctttgtgcgggctgtttacaaacaaaacagaaaagcacctgcctacgggatggggttgatttctgggccgtctggctgatctcagcaccctgtcgctccagggcacatttcatgggattcccatactctatgggactagcccagaagggctggggtggtggattttgggctggggtgagtagcccacactggatttagtctctccgtggctattacaacacgaagttcactgcacttcaggcacaatccactctcagaagatacaacttgcgctctggcgcctgcggctgttttctttgttcggtgttcctgtctcttcccggttgcatggagaccattaatctagttgaggtgctgagctctgatcacatgggacacactttctctttcttagacaatcacctttggctgtttcatcagaaatgtgatattctgggttccaggggaaagaaaggacgagtgtttggggtgagggtgggggtgggagtgtgtgtttctgcttcaggctctgggctcaagaatcatgaccccagctgccccagagctgagtctcacatgagaagagaaggaactaatttgctaaacaaaccacagtggacctaggtggaaattatttcactaaatctcaagtctaaaatcaattatcgtgagccgagctgaacctgcgctgaacttatttattttctaaaattccagaatattctctgaattaaacttgctgctgaactgaaaggttagaattcccagttctccctccaggagagaagatcctggagaccatctgtatgacctcacagaactacagcagagatgaacagaccatccagggcgtgaggaccctggcattccaaaacacatctctaagctttcaaagaaatgagatttctgtgatctgtcatcaccaagaataaaaatgtagcagttacagaaaaaaagaatcctattttcaattcaaaagaacttttgaaaacaaaacaaaataaaacaaataaaaatgggtgaaaacaagtgaatgcatgttaaattcccgactaatgtgtccacgcataaagtgaatatttttcccagttgtttagaaagtcagttgtttacaaagtcatcaacagaagatgatttgttcttttatttttcatcacttttattttattattttattttaattttattatttttattatattattttattttcatctgacctacagaacaatagataatttagtatgaccaatattcaaaattggcttctcaaagttggttatttttctttaggaaatgttaaagttttatgtccatatcttatctatctgtctgtctgtctctatctatctgtctatctatctatctgcctgtcttttatccatcatctgtctgtctgtctatctatctatctatctatctatctatctatctatcatctatctatctgtttttctccttactagtgaggttaagccactttgctttgaaatggagtgcatatagaacttctgatacaatccagagccctggaaatgttcttgttttaataaagttcttttgctctgacaacaccctggaaaacctctagtttgagttgccaaaaaccatactttctcagatctgctggagggttgcaccagagagtcagaatgtggctctgagctccttgacccctgctgaccacagaccacagagatgtttggattctgccagacccttccattaggagcctctgactgttccgctgcggggagtccacccaaggcccccatggggatgctatcatctcatctattgacagtgcagaagcctctgcacgtgtaaaattcaggtgagcaaaaggccaccttggtgcatctccagctcacatcctgctcatctggagtcctgtgtaacttatccaggttggcagctcccttggcagcccctgcagagacccctcagctttgcctccttctatgcctctgctgatgcaaggactctgactgtcatccctcccaggccccctggtttccttgagttccactgagaggggtccagatgtcctctatgtagaagagggggcccaggctttactttcttgcacctccccacttgaccctctataccattctccagttttcactgggcccctttcctggcttttccttcctttgcctcctgggtcatcaagcgctctgcttatttgtgacgggcaaccctgtgaatcctggagccagactgcctgggttcaagcttgggcatacgacttcacttctttgtgcctcagtttcctcatctgtaacacagaacctaccccatagggatgttatgaagatgaaatgagctaatacatgtaagtgttatccaacagtgccaggatcagaacaatcactccgcaggagatttagcattgtaatcattctttgctaaatgataatagcaactacaacgtcattgtgaaagtgacaattccattttttcagaactgattttgtctaatgctaacatttcaattatgaaatttaaaaaacctaagtaatacattttagacacactatttttgcatattataaaaatatgaggtaaatcataaatttctaacataatgcatattgaacacctattgtcaatttaatataaataattagctgctctgggctctcctacttctttgatctcaatcccctccacccaagagtatctgtgttctacttcttcccaggcacacggctagcctgggtttcccagcctcctttgcaggagcatcaaacactgtgtgtggttttccaccagagggcaatagaggagtcctagggggatggaggagccataagatggaaagagcttggatccctgagtcaccaggtggaggaagacaaaaaatactgatattggactgttatataagaggtaaatcaactccaattgtgttaggccacacacaaaattgggaggatttatttgttacagaagcaagcctctccctaacaaatacagggggaggaggagggatgggagaacattaactcagaataacagccaagaacttggagataaggtgagtctgggaggacttggctgagggtgtcagggatgtggtagtggaagagcaggggagaaccagaatgaaagtctgaaatattattacttaagagttacttaaaaactaccacagtttatcatcctgtatcacaattactaagccagtcatttaatgttttcaaattgtaatggacccagctgtgcaatgggaatgtgtcttctttgtactgctgcatagtcacagtcagcaggacatcctatttctcacctccttctaagaaatggtaagtcattctgtggcactggaacttcccttgttccttttcctgtggagtcatccttccaaataggacaaaacgaagcaatcacacatttccacaaagagatttacctgcacttactgctgacggaaacagtttctccactcttacgaagtcgtatagtaaagaagtattttctggccacttgtgtgtaaccctcactgtcaccctatcctgtattattacttactaatatgtttctttacaccaactacttttacaatttagtctggtctaaaagaagaatattcgtgaaatcatagttggatgtaccaaatatatgttgtcttaacatgacgcggtagactgacagcaacaatggctgcagttttaatctctctcccacaacccacccatcctctttgcaacagaactctgcagcttcttccaacaagagttgaagactgttttctatcccttgaacgtggacatggagacaaattttggccaacagacttgtgtcagccctgagacaaggccccacaagcctatggaagctgttctttctccaagactctgctgttgccttgttagcaggtcccagctggcctcctggagggtgcagctcagggggcccagtcacctctcgacacctagcctgccaaagccaccaacgtatgcatgaggacttcctggattggccaatactccagctgactgcagattcaagcatagcccagctgacccgcaggcttcttgatgaaataaatgctcactctttcaagccatcagaggttgtgagttttgttatgtagcattattgtgacagataccagatacacatgggcaatatggcatgctggcttcatgtgctctgacccatgcatatcttgctagccctgtggtttccaactagggacagttttggtccccagtgggcttgtggagacacatactagctgtcaggcacaggtgtgtctggaagcagaggatggatatttgaagggcaaaagatgaaactagatgattgatagatagatagatagataatagagataaatgagagagagagggaaggagggagagggggagggagagagggagagagagagagagagagagagagagagagagagagaaagagagagatctcagcttttatgagcttaatcagaaatgaaagtgttgttaggtactaactgagctcccatgtaccttgagttgattaaggctgtagcagagagtgtaaggttcctggcatgcaccgttctgacttctgagtgcttgagtggctgagaccacccactttcctggaggacctacagtgccatttggttacaacagaattgatgctactcaccctttactggtcaacaaggtcaacaaaaaagtagggattgcaggataagagaggctattttacagggaaagggaggaatccagaaggggaagtgcgtctggccttcaggtccccatgagagaggaggaagtccctgagaggtgattttccatgaagccgttggagggaagccctaaagatttgctcatagcctttggaggtagctaaaccaccacccttcagcctcagggacaggggaccaattccagtctgaaagtttgggatcccaggccattatagtaccagatgctgcctggagataatggagagggcaaaatgacaggctgatgggaaagctctctttcaagtttccaatccctgggaagtaaggaagatggacctggctcaggcctcagaatcagggccaagagattagacaactttgtggggggtgaagactgcacatggtgaggaaagagggctaccctccggggtcactgccagtgtggctggctgtgagggctgctgtggcctggagagctgcccatagcccaccgtgcatctgacccagggtgcgtgaggtccatccggaggaaggctgggagtccccacgggaaatcacaggagaatgcacttcacatttccctctcccattttgtcacctcaaaactgaagaagttagtccacaaggaagggttcaggtggcacaacaccatttaaatttcaagagaagcaagtctggtctgctgggatattattaagggagtctgtggcaggcagagtcaagcttggcaaagacgtcagtgtcctcatccctgcagactgtgaatgagttaggttacatgacaggggaaagtgaggttgctgatggaattggagtcgctaacagctgatgttgagatggggaagctatcctgattattcaggtggggcagtgtaatcaaagagcccttaaaagtggaagagggaggcagaaaatgagaatcagagggaggtgagactagaggaaaaaagtcagagatgcaacacggctggcgctgaagatgcagggaagggtcttgggacggcctgcagatggaggaagggagtctcaggcttgcagatggagggaggggtcttgggggcctgcagatggagggagggggtctcaggcctgcagatggagggagggagtctcaggcctgcagatggagggagggagtctcaggcctgcagatggagggagggagtctcaggcctgcagatggagggagggagtctcaggcctgcagatggagggaggggtctcaggcctgcagatggagggaggggtctcggcctgcagatggagggaggggtcttgggggcctgcagatggagggagggagtctcaggcctgcagatggagggagggagtctcaggcctgcagatggagggaggggtctcggcctgcagatggagggagggagtctcaggcctgcagatggagggagggagtctcaggcctgcagatggagggaggggtctcaggcctgcagatggagggaggggtctcggcctgcagatggagggaggggtcttgggggcctgcagatggagggagggggtctggggcctgtagatggagggaggggtctagggcctgcacatgtgggggcctctggcagctggaaagtcaaggagagatattcccctagaacatccagaaaacaaggcagccctgctgagaccttgattttagcccagcgcaactcaggtttgtttctaacctacagaactgtaagataacacatttgtgttgttttaagccactaaatttgtagtcctttacagcagtggtgggaaactaatacagattctgagcccatatcctagctctctgttctcagtggagcagcccagagctcttgctgtcctgccggtgagaccccctcagacctcaggacaggctccgggtgctgcctccgcacaaaaggtgtagtctcaggtgtggcctgtggtctccagcaagctgtttcccctccttccagacccggctccagacgccccctccgggtcactgccagtggtgctgatctctgactcctcagacctggctatttcctctccaagggacgtgggccttacttcctgccacagtgcctgaactcttcttcctttctgaccatcacatgacttgctcagttagcctatgtggaatctactcaaagccaccttttcagtgaggtacatatgtttataacatatgctatacatatatgtgtgcatacatacacatatcttgccgaaaagacacagagaagggaaataggacacacacacacacacacacacacacacacacacttctacataggatatgggatgtatacatgtatatttaaaataggttatgtataagaaattacacatatagaatacagaatagagagatctatatgaaaatatctcccattttcctttctatggaggaaactatatatatgaaactattataaaggatatatatgaaaataaaatatacataaatatagctatatataggttatataggagatgagatatatgtggatgtatgtgtgtatcctagttttctcctctgtaaaggaaactacatatatgatactaattatataagatataggagatatatatgtatatttatatatatctcagtaggagattatacatatatctctatatctcctatttttcttctctaaagaggaagctatatatatgaaactgtatcacaggatataatgaaccatacacacacacagaacacacacacacacatacacacacacacacgaaatatctcctgtttttgtcctccagttggaaactcatgaggggcagggacttttttgttactgcttaatctccagcactctgatcagtggcttgcatgtatcagaaactcaataaacacttgttaaattatttatgtttatgccaaagactcttcattcaaatcagttacaaacattttaattttgaattctgtacgaaagcttccatcatatcttctgaaccctgggtctctaaagtctgaacctggccctgtagaaaacaaattcacatctagtggaggcacagtgttcacttctggtcttcaccagggcctgagtcttactcttggctggacctcgaatggttcctactaccttgacctgcgtctgcactcactggggaggtctggaagagacccctggggcctccatcctgggtgacttgtcatgataaatgttgctcaagaatatcagaatccaaatagaagttctcatttggaatttggaatccaccgattgtcttccttgactgtagccatgacctccaaagtaagaagtgtatcatcactagttttacttagaagaactttgagcttggttttcatcttgatcacacacactcattatgtgatacttgtttttcctctcttcttggatcaaagaccttcccatgaggggaaagatggcagaagcttctgtaactgactctaacattgaaatcaagattctgtggcaaattcttataagagaaactttaaggccctgaaagactaatcatgaaaaataccccttttggataaatataatctcaaatttagggttgttcacatatttttgccattggtgtctcttcttattaatctttattctcttgtatcagaggacagggctggctgggtactaattatctatcactgcctccactggtgagattttgtggcacaaatggggggtttgaattacagcgggtgtgttgcacactcagatacattttaactgtgatgtgcctggtggtagctgggcgcctcgttttagcaccaaaggaggttcaaatcctaaatcactatatacaacactaccattctaatgttgggcttcaaaaattatataacaggccaggcgcggtggctcacgcctgtaatcccaacactttgggaggccgaggcgggcggatcacgaggtcaggagatcgagaccacagtgaaaccccatttctactaaaaatacaaaaaattagccgagcgcggtggcaggtgcctgtagtcccagctactagggaggctgaggcaggagaatggcgtgaacccgggaggcggagcttgcagtgagccgagatcgtgccactgcactccagcctgggtgacagagtgagattctgtctcaaaaaaaaaaaaaaaaaaaaagatacaacagctttatgccaattacatgcactctgtatgtgatacagtgtttaattgcctgcatgtttagttagaggttttaaggtgacatatggcatataactcatgctttaatgcagctgttgccaatatgttttccttcttcacatagcaatgttttttttttgtggtcacagaactgaaagtaaataattctccatcgcagaaatggaggcaaatcagcacgttaacccttacaggcaggttagaaacccagaaggtgctatgcctgcaatttgggctgctgccaccaggtggcaccattacaaatcccttgacccatagtatcttgcccatcatgctttagagcattttgcaaataacacatccaaaatcgaattttactaaaataacctattaaacacaaagtatgtgtgttaaaaagtcaatttaactggaaataccataaaagggaaatgaaggatataatactttatatctcattggatgttcatcaatttttaatacaaagatgggtttgttgtccattcattcaacaaatcattatttattaagcaactgctacataccaggccttctggtaagtccaggaatatagaaatgagtaagacatgttccccagtcttgaattcctccaacgctatcagatgtgcccactcatggataactgaggactacaatgtgtgctaagtgtgatgaagtcacattttacctaagagttaaagtctacagaaaggtaaaatttgcctatagtgaagatttttcttgaacgtctcttaaactgaagctcttctgaccatgtctcttgtttggactctaaagcctgacttttggcattttgaccttcaggggttaggaagcaatcatttgcaatcctcatggtttgctttcattacctacccagtacctgttaaaggaacccttggtccatggctccttgttttcatttaagctgataaagaatttcaatttgctgtcccatttttttcctctccatgtagaaaacagaaaatatggagaagcaattagggctgggcccctctcttcctaacctcacccctgttttcttatctttacatccagaacactaaccctgcagctattctcaccataggtttactcttttctgaactggactgacagagccatctgaatacaatcctaaacattacccaacaacagaaatccaaataatgcatgttctcacttataagtgggagctaaactataagaacttatgaacacaaagaaggaaacaacagacctgggggtctacgtgagggtggagggtgggagcagggagaggaacagaaaagatcactatttggcacttgacttaattcctggctgatgaaataatctgtacaacaaatcttcatgacacgagtttacctacgtaacaaaccttcacgtgtacccccaaacctaaaagttcaataaaaataaaaataaacattatccattaattcagctcttgaaacttctgcttatttttatttgggcctggagggagtctcatccaacaaccagggtatattttcacttttttatgtgaaggttcaggaaaaattcaccgtgcagtgagtatacaggtgtctccttatccaaatgaagaaaatgttcagagttgtttctatgtttttttctactgaagagaggagtcttcctcctccccatgataaccagaatcctctatgtgacaaccaagagagatggccctctctgtcctcatccactgtgacttcttagataagatctttctttcaacaaatattgatagcccagtgggcagcaggcatttttccaggcaccggggaataagtaatgatcaaaaccaaccagtcctcacccttgtagaggtggacaatgaacagataacaagcaaaaaatataggaaggctttggtgataagttctatgaaaaaacatagggcagggaagaaggatggggaatgtcagaggtggggcactgctgttgaaactggggagatttgagcagagacctgaagacagtgagggggagctgtgtgcatccagtaggcgggagaaaggcagggtgaggtctccaggcaggcacaggcctgggaggttccaagagtcatcaagaagcccagtgtggccagaaggagagttgcaggaaatgaggtgaggatggtaggggctaagagggagggtggggagatggaataggccttagaggcagttgtaaggaacatagctttcactgggcgggagacagaaaccatgggaggattttgagtggagaaataatgtgatgtggcccatattttaaaaggatcactttgactctcgggtggggagtggattttggggtgggggacaagatcaaaagcaacaaggagaagctcataggaaattcatattaccttgtgaccctgacccacttatctggttctaaatagttaaaccagggaaggctttgtgcagacagtcctgaaattaagaacatagctgaaggcatattcctacttataagggaatttaagcataattgaagtgactctaattgattaattttccaatgcaaccacatgtgtttttttgtggccacagaactaaaaagctgttagaatcaaaatttgtcatgttaaatggatcgtgtccattcaacaacagaaaaaaactgaggaataaagagtttacgggggccaggtgcagtggctcacagctgtaatcccagcattttgggaggccaagatgggcgggtcacttgaggtcaggaatttgagaccagctgggccaacgtggtgaaaccccatctctaccaaaaatacaaaaattagctgggtgtggtggcacacgcctgtaatctcagctacttgggaggctgaggcaggaggatggcttgaacccaggaagtggaggctacagtgagctgagatggcgccactgcactccaacctgggcgacagagtgagactccatctcaaaaaaagaaaaaaaaaagagtttatggatcttgccctggttgttgttgtttgtaaatatcagagcgaggatttaaatccatgcaatttgactcaggagctaaatgcttaagcagcatgttataatcttttcatgcagcaacaggcaggtaggatgcagttgtggttttatctctagaaagggcatgtgtccctcagtctgtgcaatcctcatgattccttattgctttcactcatttaaattatctcctgcctcttgtattcttctgggcttgtgattcctggtataaatgttctccaaaatcctttatataaattctatgtaagtggggtagcatggggaggtcatgtggtttctttctaggtctaagatgcccatgattggcagtattggggattgtcaaccaatgtctcagcacagtaaaatgatgtggtgtatttgactggtgatgtctgccctgggtatggtcctgggaggagtatcttgtgtgaggtttatttgctgatgctgttctagactaacctaagatatagggtaaggttggtccatctttgacccattttctctcattttttgatgtgttcccatttctccaggaggtataatctctgcttgtccagatttgactatcaaaaagaaaagtgatctaaacaattcattatgacaaaaatttccaggaattgatatatacaatctcacctagaaatgcattaactttaatgaaggattgtagggagagattaatgcctaatccaatggcatgaagtcttgttggaagaattgcatgcatctgtggaggagttacttttggctggggaagtagggtgtcagtaaataatcatgtaagtcaccacccgtgaagaaaaggcccagtagagtccatgagcagagattggcactttctctacagaggactggatggtaagtattttcagcattgcaggccatatgatttctctcacaacagctcaactctgccctggtcacataaaagcagctactaacaagatgtaaatgagtgggtgtggctgtgcggcaatgaaactttctttatggatactgaactttggattttatataatttttatatatccactctgtcactgtagcacaaaagcagccatagacaatactcaacaggtaaacatgcccaatctcatccccaagcaggcagagtttgccgacccctattctagaagatgagcgatagagcaagatagaaaagggctggaaatgggtaccacgtatgtgatctctgatgatgcatcagaactctctgtgtctcaattccctcaccccaaaaatgaggataaaaataataccactttcaatggagcagaacagagagcctagaaatgaatccatgcttgtaaagtccattgatttccaacaaaggttccaggaacacaaaatgggaaaggacagtctcttcgataaatggcactgggaaaactggatatccacatgcagaagaataaaactggatctttatcacacaccacatccaaaaatcaactcaaaataaagacttaaacacaaaaccagaaactgcaaaactactagaagaaaacacaggggaaacactgtatgagttgtgtctgggcaataatttcctggacttgaccttgagagtacaggcaacaaaacaaaatagacaaatgaaattgaatgaaacataaacatttctacacagcaaaggaaacgattaacagtgtgaagatataacccatggaatgggagaaaatatttgcaagccatacatccaataagggttaacatctaaaatatataagaaattcaaacaactcaatagtaaggaaacaatccaattaaaacatgagcaagggaactgagcagacatttcacaaaagaagagctacaaatagtcaatagatacattttaaaatgctcaacatcacgaatcactacggaatgaagattaaaaccattccttggttttaatatcacctcacatctgtcagaatggctattattaagaattgttaaaattataaaattataaaaatcattaagaattattaaaaagatagcaagtgtaggcaaggatgtaacgaaaagggaacttttgtacactgttggtggtacagtcattatggagaaccatacggaggttactcgaaaaactaaaatagaattaccatataatctagcaatcccacttctgggtatataccccaaagatctgaaattaatatgtgaaagagatgtctcacttctatgttcactgcagcactacttacaatagcggagttatggaatcaatctaagtgtccatcaacagatggatgggtaaaggaaatgcattacatataaacaatggaatactagccagacattaaaaaaacattgtatcatttttgacaatatgcatgaaatttgaaaacattatgctaagtgaaattcacaaggcccagaaagacaaatactgcatgttctcatttgtggaatttaaactaaaacaatggatgtcatcaaagcacagagtaaaatggtcactacagacgttgaggctttggtacaaggcttcagttagccagaaagaataagttattttttaaaaatctatctcacagtgtggacaatatagttaacaatagtatattgtacatttcaaaacgtgtcaagagagtaaatttcaactgtcctcactacaaaaaataagtatctgaagtgaaggatatgttaattagtttgatttaattatttcacattttttcataaatcttaacatcactttgtgctccataaatatatataattataaactgttaatttataataagataaaaattaaaacagaaaatatgtgttaaactataactgataaaaatatctatttcatggggttgctgtgaggattaaagaagcaaacgcttacctgctatgaagtaagcatccaataagtattaaaacatcacaatttctattctcattgctataacacgtccatctacctttttttttttttttttttttttttgaaacagggtctcgctctgtcatccaggatggaatgcagtggtgccatcatggctcactgcagcctcgacttcccaggctccagcaattctcctccatcagtgtccttaatagctaggataacaggcatgcacccagctaatttttgtatttttggtagagatagggtttcgccatgttgctcaggctggtctcgaactcctgagctcatgtgatccacccatcttggcctcccaaattgttgggattacaggtgtgaaccaccacgctcagctaactctaattacttttaatctgcatcaggagtgaaataatccactaacaattctaaaatcacacattaggttttagaaacagattgacatagcagaagaagaacttacaagatgagcctacagatgggaaccagaaatgttgttttctctaaactaatatatttactcctgtattatccatttttaaactgctctaaagaaatacctgagactgggtaatttataatgaaaaagaggtttaatggactcacagttccacatggctgggaggtctcacaatcacagcagaaggtgtaggaggagcaaaggcatgtcttacatggtggcaagcaagagagcttgtgcaggggaactgccctttataaaaccatcagatctcatgacacttattcactatcatgagaacagcatgggaaagacccgcccccacgtttcaattacctcccactgggtccctcgcatgacacatggggattatgggagcaacaattcaagataagatttgggtggggacacagccaaaccatatcaactcctaatccagcaataacaaaaatcctaacgttaggaagtcaactttaggaaagaatcaccactatttgctgtccaaatagaatgccgtgattaaaaatcaataataatgccaggtgagtatgcaaagtttatgtggtacagttcatctttatcttcccctaactctccctgccatgaatccacttggatctccacttaatggaggggggaccaagagggccaatccctgtatcccgcaggtggtcactcccactctgtagctacagagtcctttccaatattgaaggattactatcaaaatgaccaccttttgccacatgatggattgaagaaagtgtctattgggaggccagtctaatccattacccctgccgaataaaagagcctcagagatactccttcactaatcaaaagtgcatctcttgtgttagtgcatcaaaggtatcatgctcatacatgggggatgctattgttatgtggccagtctgctccctgagaactcttccctgcaggtgacacagggaaagtcttcaaaggcggcagcagggatcagtgaggcggcgcaatccctgcagcttctccattcctgagctgaatatttgaagccatttggctaaactcttggggtggggacaaaaaagctgatcgggagttataggatctgcaggtggagaaaaaaagaagggactatttaggaaactgcctcctgggggctgtccctgtggctgcgcaggttgtcgggcgcccagctggattgcagaaagagaactgctgggagccggctctccaccactctcctctcctcaggaacaggctgctggaagaggagccaggccattcaggccccaacactgaagcactccaccagggatgctgaaaatagctgcagaagagcttctctgattttccactcgtctcttcctcccagttgtttactcagcttgttaagcgttgtgctcccatccccgaaattacactccttctcctcacagcagtttgctgcactcacagaaagattccactttgatccaccttaggagaatgtgtcaagctttatacacctgatttccactggtgtgtgtctctggtgcagaagcaagggtggatgttgatgctgttgaaatgctgtataataaagcaggttcaccaagagcagctgtaatcaggtagggctacagccccctttgatttttatcagtggacatttctgaaatatttggtggatactggtttattcaggacctgttaatgaacacttgagtctgtaagttgcaacaacaaaaacaaaaacctcagcaaatttttcaggagtaatacttgagcccacgtcaatcttcctcctagtgtgtgcagtgtggctggctttaggagagagtggctctcccaccagctgatctgtgggttcttacaatgtccccaaccccgaggctatcccactcctaagtggctgcaggggacatgggttgcttttgctgcagagagtccactgcccttctctgtagtgacaatacacaggttggccctgggggaccctactccccaaactcctcattgagttcatgtgctttgagatgatttagggcttggacaaccagtatgtttggatccctgggctgcagtgctgggctcaaggataaggtgacctaaataggtcccataagaacatatctcaggatttatacaggaatgtcctagaagacaaatactcttttctattggatgtgaaccagttctgaggcatccatcttgctcccacaaggacagctctgtgagaatgaaactcatacagaagaaagagtgtctataaggaagaaaaagagagaaagattgggggtagggggagaaagagagagaaggagggagggagaggaagagaggggatgttccggtgatatattttggagttctaaataaaacaccctaagctagcgccaggctggacttttcaatcatgtgacaattttttttaacttgttgatgtaggtggcatttcccattatttccaacctctgagaatcacagtgtatattattgcaaacatctgaaatgctttcactggggacctgttgccttcttgaaaaaaaaaataaaacaaaacgagcatccttgggaggcagaagagagcatggcttgacgcaatttacaattcaacgggaatgagttttcagtggatttcctgagaggaggttttgatgtggctggggaagcccacaccagcctgttgggcttttggctgaggaaagaagagaaagcaaataaaaataaaaagactggggcctttaaaggccgaccttctctgctcagaggctttccaggggctgcacaggtggctgtgacacatctctgagaatcccttggctttctttcttaacagcctccaaatgacaccaacacatcacacgtaccaggtgactctttgtcaacatctgtgattcacagagcaccacaatgacaactgtatgagctgtgggttttgatttttaagttgtgcatcgggctttgaggcttattggtggatgtaaaataaatgctgtgaggtttttcatttttcgttgcaccctctatatttccaagggtggtttcatgagtcattctcagaaacaaagagaggaaaaacatttctttctcaagagttcctgcccaagtctgaagcctgcatctcattggctctgactggataatgtgtctatccctgagccaatggcacgtccagaatttgccatgttctgattggccaccctgaatcacatggccactcctggagactggagatgtggccacctgcagaaagaaccgcctcctatttcccttcctcatgccattccctctgtcagcagggcatactgggtacaaattcatccttcaggtattacacctccagggaaaacttgagtaatgcagttatgttttcccttcagtgtttaaactacgtgaggcagctttaggctaaacgttacactaggcacatagtagttgctcaagaaatgtttgctgtcaaacatatttaagcaaatgtttgctgacagcaaacatttcttaaccacctgctacatgcctagtgttaagtttagcctaaagctgccacatgtagcttaagtttggcccaaaggtttctccatgcctactgaacagtaacctaactgcacgttcaaccacactgtacctgcttttgtatcaatcgctgagtgtcagccaactacaggtagccaacaccgcaaaccatgttcaaatacagcagatgctgaactgtaactaacccggctgcatctgcacctcactctgttttctgtggtccactttcctttttctgtctataaatgttatctgaccacatgacagctccagagtcactctgaacctgttcagattctgggggttccctaatttgtgaatcattatttgctcaattaaactctgttaaatttaatttgtttaaggtttttcttttaacactagtgttgactgacagccaggagggcaatgcttgctagagcttctggtccagtggccctgcttctgtgggaactcagccagtgggtgcagcctcctgtggtcccaggaagcatgtggagggcagggcaggcattgttacccacccctgccactggtagccaggcaagccactcctgctagagcttctagctcaatggtcctacttctgcctaaatttgccaagggacacagcctcctgttgctctggaaacatctggatgtctgggcagggaactccaccctctcttgcctcccatagccagacgtgtcacacccagagagcttccaacacagcagtcctgtttctgcctgagctctaaggacaggcgggcacaaccccatatttccccagggagcatatgggcagcagattaggaccaacctggtaagtatacagcttgtctgccaattgtggctcctgcctgagggggcctcatggaccagaatactgaacaaaagaaatatgggcatgaaaacagtaatcagagggggctcctcagagacccaggagcagactagaattgaagccagtcaaccgaacccaccttatgccataatcaaaccccctagaacctcaaagaagaaaagagccaaaaaacccatccaaaggacatcaacttcatatactgaagaaatatcagcccacacaaatgagaaagagcaaacacaaaaactctggcaactgaaaaagctagagtgccttttttcttctaaatgactgcactagttccccagcaagggttcttaacaaggttgaaatggctgaaatgatataaatagaattcagaatatggatagaaacaaagatcacagagattcaagagaatatcaaacccaatctaaggaaattaagaatcacaataaaatgataaaggaacaaagtagccattataaaaaagaaggaagctgatgtgatagagcttaaaaacacactacaagaattaaataatgcaattgcaagtattaaaagcagaatagacctagctgaagaaatctcagagcttgagggctggctgtctgaaataattcagtcaaacaaaaataaaggaagaaaatgaagaagaacaaacaaagcctctgaggaaggcttatgggattatgtaaagggaccaaatctacaactcactggtatccctgaaagagacaggaagaaagcaagcaacttggaaaacatatttcaggatatcacccatgaaaacttccccaactttgctagatatgccaacattcaaattcaggaaatgtagagcacccctgtgagatatcacacaagaagaacgtccccaagacacaatcatcagattctccaaggtcaaaatgaaaggaaaaatgttaagggcagctagagagaaggggcaggtcacctacaaagggaaccccaccaggctaacagtggacctttcagcagaaaccctacatgccagaagagattgaggtcctatattcaacattcataaagaaaaaaatttccaaccaaaaatttcatatccaaactaagcttcataagtgaaggagaaataagcccctttttcaggcaagcaagtgctgagagaatttgttactaccagacctgcctgacaagaggtcctgaaaggagcactaaatatggaaaggaaagaccattgccagccaatttgaaaaaacacttccatacacagaacagtgacattataaagcaacaacacaaacaaatctatggctaacaacatgaagacaggatcaaatctgcacatatcaatactaactttaaatgtaaatgggctaaatgcctcaattaaaaggcacagaatagcaagctggataaagaaacaagacttaatggtatgctgtctttaagaggcccatctcacatgtagtgacatccattggctcaaaataaagggatggagaaaaatctaccaaagaaatggaaaacagaaaaaaagcaagagttacaatcctaatttcagaaaaaaaaaaaaaaaactgactttaaaccaacaaagataaaaaaaagaagggcattatatagtacatggttcaattcaataagacctaattatcctaactatacatgcatccaattcaggggcatccaaattcataaagcaagttcttagagacctaggaagagacttagatccctatgcaataatagtgggaaacttcaacatcccattgacagtattagacaaatcattgaagcagaaaattaacacagatattcaggacctgaactcaacacttcaccaaatgaacctcatagacatctacaaaactctccacccctaaacaatagaatatacattcttctcatcaccacgtggaacatactccaaaatcaaccacataatcagacataaaacaatccttagcaaattcaaaaaaaaaaattgaaaccataccaaccatactctcagaccacagcacaatgaaaacagaaataaatacaaagaaaatcactcaaaatcataaaattacatggaagttaaacaacctactcctgaatgacctaccccttccttacaccacatacaaaattaactcaagatggattaaatacttaaatgtaaaactcaaaactatagaaaccctggaagataacctaagaaataccattctggacacagaacttggcaaagatttcatgaggaagatgccaaaagcaattgcaacaaaaacaaaaattgacaaacaggatctaattaaagttaagagcatctgcagagcaaaggaaactcaacagagtaaacagacaacctacatacagaatggaaaaaaatatttgcaaacttagcatctgacaaaggtctcatatcccgcacctgtaaggaaaataaacaattttacaagcaaaaaccaaccccactgaaaagtgagcaaaggacatgaacagacatttttcaaaagaagacatatatatggccaataagcatatgagaaaatgcttaacatcactaatcatttgagaaatgcaaatcaataccacaatgagataccatctcacaccagtcagatggcctattattagaaagtcaaaaaatagcagatgctggtgaggttgtggagaaaagggaatgctgatacggtgctggtgggaatgcaaattagttcagccactatggaaagcagtttggtgattcctcaaagagctaaaaacagaactaccattcaatccagcaatcctattattgggtacatacccaaaggaatataaatcattctaccataaagatacatgcacgcgaatgttcattgctacactattcacaatagcaaagacatgaaattaacctaaatggccatcagtgctagactggataaagaaaatgtggtacatatacaccatggaatactatgcagccataaaagagaatgagatcatgtcctttgcagggacatggatggagctagaggccattatcctaactaatacaggaatagaaaaccaaatactccatgttcttgcttacaagtgggagatcaacaaggagaacacatggatactaggaggagaataacacacactggggtctatggaaggctggagggtgggaaggggagaggatcagagaaaaatacctcttgagtactgtgcttattacctgggtgatgaaactatctgtaatcaaagccctgtgacacgcaggtgacctattaatatataacaaacctgtacgtgtacccccaaacctgaaataaaagttaaaaacacacaaaaagaaaaaaacaaacaaaaaaccccccactactgttgtgataagaatagagcagcaaacaaagtggacccaaacagcaccgccctcacggagcttaagttccaaggaggacagtcagaagatgaatacagcaccgccctcatggagtttagattccaatgaggacagtcagacgatgaatacagcaccgccctcacagagcttaggttccaacgaggacagtcagaagatgaatacaacaaacaaaaatatatagtgtatctgtgaatacataaacgtatgctatgtatgacatatacgcatatatgaatagaagttcagcagggatggggaaggcagtgctgtgggtgtctgtgaagattttgctgacgctgctcagaaaaggccttggggagaagatgaggcgagggagccgtacaggcatccagggaaagagagttaaaggcagagggaggagaggggatgcctgtcctgttacaggagtggccgagtctccagtgtggccagagtggaggcagccagaggggctgtgcctagcgtgaggccagcgttacagcaggtatggctgcaaaggtttgattctgtctctgtaaatactttggcttttactgtgaggaggggaagccagtgaattttttttatataaaaaaagtattgatccataattaatgtacatattttggggtccacgtggccatttaatacattcataaaatttgtggagatcaaatcagtgtaactgagatagcctccacctaagatatttgttgtttctttatgctaggaatgttagtattattctctagctattttgaaatatgtaatagattattgtaaactgtcatcacccaactgatctatctaacatgaggtcttatttcttctttcaaactgcacatctgtgtccactcatcagcctgaggggccgagcagaggagtgacatggtcatatcgcccgtgaccgccctggctgtagcactaaagaggggttatgggagaggaggtaaggacaggccctaggtcaccagcaaggtggtcaatgctttgaggtgattgtgtctgggattggggtggtggcaggacccgaggagggctggatcctggctatccttggaaggcactgccaacaggatttgatgaaggcttgggtgtgcagagaggggagaaatgtaagatgagcctagatattggctggagtcagtgaaggaagttgtcctgtgctgatgtgaagaagattctggaatgagtaggtaggagtgctgtatgatgtcatgtgttccgctgccctgttgctttctgacatctctgccttctctctgaaacccataaggatggacgtccatctcatttatgtggtcctagagtcttgaacagtacctagcacttagtggggatttgattcgcatttgttgactgcgttttaagtgagcaaaaatgctccctgaaggtttgcttcagagcagagtggttacaccaattcctgtccgggaattgtcctgtgctccagccatggctaggactcatatggagggagtctcccggagcctcgtgaagcccttctcgctgtcccgggcttttgttggcagcctcctcctttgaggaggtgcctgctgcatctgtcactgcagccctgtctctggagtgggcggaggcagcctggggaacccatttatctcctgcaggctggaagtgtgctatgaggttcctggcagagcaagactccatctccccagcctcctccatccgtctcccagggtgcctttgttttgaatcatttttgatttcaatttaagaagagaaagaagaggctgagacgaaggaaggaggggtgagcgctgttcatccacatccctagctcatgtggaattttgtgggctgggcagaggaatggagaatgatttcctcttcctcccttggccagtactgtaaatcaaagctgggagtagttgtacaccttataccaccattgattttacacgaatgctgtgtgctatagaatcatcccggagtgtggccgcatacccatccatctaggttctagggctccttcccttcttctcccctgcctggggtgggtggagggtaagcgggtccctgcctcccacgacaatctccctggggatctgggaagaggccaagggcattcggcgaacacagagtgtcaagggacagcctcccagactcggagtcaccagccagagcactttttcattctgtccaatatttgtgccacggagaatgtcctgatttaagtggcaggataaccagaatgggatgggagggatcctgtgggacccagaggtcccagaggtcccagaggtcccaagctggtccaggagcacagaagctgacatgacagcaggtttctgcaggggcggggaggtgtcaacttgccttaatcacgtcttcatcagacgatctacactccacagactccagcagctctgtcactgtgccgtcgtcctccacggagaccactttcaccgggacggccaccgtcttccccgtgaggatggctgtgttcaggatttctgcctcctggaagaccaaacacacccttccatcacatcccctcctgagacggcccagtccctgggagtatgccgcctgcctttcctcagcctccctgcaaacagcactggcctcttctgcaggctcagaaatcctggcagtccgcaccagctggctgaccgtggcagccatgagataatgttctgtcctcacccagatttccacagggcaactatgatggggaaggggtggaggacagaaaaggtggcggaggaaatttattactaatattgtgtttggcaaacacttatgtgtcaggcacccttgtaagtgctttacaaatatcggctcgtcaatcctcatagcatcctgataagacaaacattcttcttcttcccagtttacagatggcacagagagcttttgtcacttgcccagggtcacccagctagaaattaatgaaggcaggatttgaacctgggaagtccagctcccgagtccatgcatcagctaactcaaataggtctaaacgtggacatgacgacggtagcttaagccgccgaaggatggccagaggggcctggtgttgtgaaagaagcttgatgagcagcaccgcaccaccagtgcgaggtatgtgagggagacaaaggcagggagagagccctcgctctctgtgctctcttgctctggcttgctttcactctgtttcaattttctaggcttttattgggtcctggcctccagacgtgtctggaatgttgctgtggctccaacagcactcccacatccccactgatgcgacccacgatgcaccacacacatccacactcacccaaacatgcgttttgctgtaaacccttctttcatcgagcagctcaagacaggtgtctttagggatgtcccggcttgccccaagtatttgctttcagaattaagaatgtcctgaacctttccccttggtagcacctaacagttgctgttttacttttacttatagttatttaatccctttatctctcttccagactctaagctccatggggctgtatctgctttctgctcaccagcacccagcgcagagcttagctacaacgaatggtgttaatgtttgtcaagtgcataaataggactcaacagggaaaggactgggatttacatcctcaccttcttgctccccagctcctcacactgtatgcatgaatctccttttttcaggcacacctatgcctcggtggtgtttcccagacatcgagcatctctggatctcatgacaccctgcatctctctctccagcacacccatgctcatcctcagtgactcctctagaattcttgtgattttttaactggtgggggacagagagatcataggagcccatttttcagatagagaaaactgagcctcaagacccggtaagtgaatctcattcttctctgcagagattgcattttctatcacaaaaacgtagaagtcccaatataaccccacatctctgtataatacaacttccaagtcctagctcacaatgttctttgctcagtttcagctcattacattccagtggtgtccctaagaggtgttttatcaacatgccacattgcgtttcttctgttaactatgaacgtatctgtcttttccttgacacaataacatcaaaagatctgggtgggtgctagttgctggttagggtggatctaaaacaattgtcattttactttcactcatggttattcaatcgctttattttccttctaagactgcgagctcagtagggctgtatctatgtcattttgagagatgagcttgcaaagattcttgttactttgattctcatgtgaaatgtaaaatgcctgttagtagaatgccagcagaaggaatagaagtttatcatcctaaaattacataactattttcattatgttaactatttcttagataagatcttatttgtcatttatgggatgagatttgtctataaccagctcactggggttaggctttggatgtagcaatacatatattattcattattttaattctaaaagacaagactccaatttggaatgctcctgaagttcagagaccatgtttcaaactgttggaatatgcataggccttcaaagtcccattatccatacactttttctcctctgtgggttcccagcctgattttactttaattcgaataaaaacatggcacaaacatgaaggggcaaaatcagtatatgatgctatttcctgctgcctctaggcaggaaaaattagctttaatggcaaaaatcaccattacttttgcaccaacctaacttttttttctactctaaagggggaggatcaaaaggaacaagtggtattctggaaaaaagtggaacaatgctgtttaacttgctggccgaaactggctcatcacaaaggagagagacagacgagggagcagtgtggccacttctgacatcagtctcagggaaaacagtttctcacattcgtggtaaaaactgaagagcatctccactctaacgataaaaatcaaaaggcctttcatgtttttgcacattcaggttaatataatgagaaatgacgctgggaatgactgatgagcagctgtaagcccatatgtctggggtgttgcctttttctctgaatagcatacgtgtttctgcctaccaagatctcagcgtggctgagtgactgagccttcaggcttggtatttccctgcctcctctgtgtatttccaattctttgacgtcacgaattttctgttttggacagctttgccttttccaggaggtgaatggtacggggatgactcacagaagtcttcagataagaggaggacaaaagagacccttgttcagtggcagaagtacctgtaaagccttagctttgcctgagatatgacctataactgctctgatttttggaccccagaaaacccttgaaagctcagcttccttattgctgcgtggtcaccttatcacagcactgcagagcctaggaaataaaggcacagactctctttagaaaacatatctccttcccgtcagtcaatcataatccttattgtcacttcatacaccctttctgctacttgggcattatctgtgtgccagtaaggatctctgacaaagcactacagaactttaggcactccagagtcaaggaggaggtagaatagcagagaataggctggatgtggcactgagaaggtatcaccattaaagtgaggcttcagatatttttcctgggggctcactgtcatccattatagggaaacaataacagcccctgtcttgctagagaaataatgacccatgtcttagtttgagccagcctggaagtagatcctgggacaaagattcaagagcaatttatctgggacattcaggaaacttcaataggagagtgtgcaagtgacacggggaaaaggaggctactaacaagttgtgtagattaaaccagttatcacagtgggcacctggggctgatcctgcaggggatgatgtatttcacgacatatattgtatattctgtgtgtgtgtcttagttcatttgtattgctataaagaaataccaggctaggtgcagtggctcacacctgcaatcccagccctttgggaggctgaggcaggtggatcacttgaacccaggagttcgagaccagcctgggcaatacagtgagaccctgtctctacaaacaaatagaaaaaagtttatccaggtgtgatggtacatgcctgtagtcccaactacttgaatggctaggtgaaaggaccacctgagcccagcgaggtcaaggctgcagtgagtcgtgattgtgcgactgcaccacagcctgggcaacagagcgaggccttctctcaaaacaaacaaaacaaaacaaaacaaaacaaaaaaacctagagaggctgggtaatttataagaataaaaggtttgcttggttcctgattctgctggctgaaagattgggcatctggagaaagccttgtggaggagggcgaagggagcaggcatgtgcagagatcacctagtagtagaggaagcaagggagaagaacaggggaagtgccaggcttttaacaatgctgagaactccatcactgccccacgcccactgccaaccagagagggactttacctactcatgagggattcactcccatgacccaaatacctcccatggccctacctccaacccgggggatcacatttcaacatgaggtttgggggaacagacattccaaccgtagcagtgtgtaaatgtgtatgtatctcaatagattgaaatctattatgatgtatttccctgcaggggatttctctagaatatacacctaagaatagtttcgttgagggctgagggagctggggtatttatacaccaaacctaagtgctgctcctaaacagaccactgcttagcacttccagcccactgcatgtgcagacaaaacagacttctactatttcaaaggaagctcccgatggatggtgacacttggacctggtctggagaacactgctgtgctagggtacaagggaaatgtgtagggccctaactgagtctgctacaacatcactgaagtaatctgtcatgcagtggtctgatggattggaaccagaattagagtgctttttattttgatttttgtttttttaaatttcctcatgtttctggtatcctgatgttatgcttcaagtatcagcatagtcatttattcatgttgacctttgaaaattaattgtaaaagagacaaggaaaataatggatagagaaaaacactgcacaagggaagcttttaaacatcttaagagattgatctctgtgttagacagtttgttgcccattcaatgtctgttctgcctttctttctgacaaaaccccaatttcatttgtggctgtaacatgcctgaataaaatgactatagtttttggctgcccttaatctctgacacatttctggcccagaagatatcaataaaagtcatttagtgagacttccagaaaattttgtgaaaaaacaaacaaaaactcaaaagaagacagacacacagacaatactcacataaaaaagctcaacatcattgatcactagagaaatgcaaatcaaaaccacaatgagatatcatctcacaccagtcagaatagctattattaaaaagatttttaaaaacccacagatactggtgacattgtggggtaaagggaatacttatatactgtgggtaggagtgtaaattagttcaacctttgtggaagacggtgtggtgattccttaaagagataaaaacagaaatacatttgacccagcaatcccattaccaagtatagacccaaaggaatataaatcattctaccatgaagacacaggcatgtgcatgtatactgcagcagtattcacaatagcaaagacatgaaatctacctagatgtccatcaatggtagactggatagagaaaatgtgatacatatacaccatggaatactatgcagccataaaaaagaatgagatcatgtcctttgcagggacatggttggagctggaggccattatccttggcaaactaacacagaaacagaaaacaacataccacctgttctcgcttataccacatgttctcgcttataagtgggggctaaatgatgagaacacatgaacacatagagggtaacaacacacactggggcctatgtgagggtggaggttgggaggagggagaagatcaggaaaaacaaccaatgggtagtaggcttaatacctgggtggggaaataattggtacaacaaacctccatgacacatttccctttgtaacaaacctgcacatgtactccttaatttaaaataagagttacataaaaattaaattaaggtgaaaaaaataagaagaactaagcagattctgaaagatgtctttcctttcttcctgcccactaggcacagataatgttggagttaaaccgcatcttgtgactcaaaggtggtggtatgtggttaaaagacacgtggtttcagtgtagtgaactattaatagttaagtgcagggactctctcttggattgtgcattagtctgttttcacactgctgatatacccaagactgggtaatttatacagaaaaagaggtttaatggactcagttccaggtggctggggaggcctcacagtcatggcggaaggtgagggaagaacaaaggcatgtcttacatggcgtggggcaaagagagaaggagagccaagtgaaaggggaaaccccaaataaaatcatcagatctcctgagacttactcactaccatgagaacagtgtgggggaaaccgcccgaatgcatgattcaattatctcccaccaggtccctcccacaacatgtgggaattataggagctacaattcaagatgagatttgggtggggacacagccaaaccatatcagactgcctgcgtttgaatcctggttgtgacactaccagctgggtggctccaagcaagttacttaactcttcgtgcctaattctcttcagctataacatgagcataatgatggtatgtacctcttgggtttgccctagatttggtgcgttagtatttgtagagtgtttagaacagcacctggtaactaataaatgccctcccaaatgtctgataaataagcacagatgaatgatgaccatggtgtgttgagtactaagttcatgtccacctgaatgtgagcttatttggaatcagtatctctgtagatgtgattagttgagacatggtcttaatggattaaggtgggattgtgggtgtccttacaagaagagaaaacacagacagacacacagggaggatggcacaggaagatggagccagagattggggtgatccatccgtaagctgaggaatatcaagaattggcacaacccacagaagctggaagaggtaggaaggatgcttccctagagcctccagagggagcatggccctggtcacaccataatgttagacttgcagcctccagaacagtgatggagtgagtgtctcttgtatttagccatcacgttgtgttacttcatcacttcagtacagcagcactaggaagcgaatacagtgactagtcaaaaaggaagcgcctggatgccagaagcatggccacactcaccctgggcatccacctccaagcatgtttgcagagagaattaagagcttgctcattctaaccattgatttccaagttctgttactcacagataatcaccatcttaactgatgcaacctgaaaggggaccgcctcatgatttcttatcggtcttaagccaaaacgagtaagttaaattgacttatttaaattgacttatttttttgtaacgggaaaaaacattttttgttgttgttgttgttgttcttttttgtccctaaagttattacagcctctttagagatcacttgccattttaatatatggttgtgaaatgatcccataaatgttaaaatagatgagtacggttagaagaaataaaaatagtgtaatgtgagctgcatcaactgattccttcctaaacaaaagcatcaaagtgcttaactatacaccatggaatactatacagccataaaaaagaacgaggtcatgtcctttgcagggacatggttggagctggaggtcattatccttagcaaactaacacaggaacagaaaacaacataccacatgttctcacttataagtgtgagctaaatgttgagaacacatggacacagagagttgtcacagagaggacacagtgcttaacatcacagtgattaatgcacccaatctgagcaccccattggaggaggttagagggggcaaacattccaaacagcaaatgaaacggagcgccacctgaacctccagccttccctgccctgtgcaaaattggctcggggaaggcatcagaggaagatggaggcttatccaaccagaacagctcacagcccaacacctcaacctctaagcagtgtgttcccatcacttaactctgtgtgaggcacatttgagaaaggggaattttgaagaaatggacataaaagctaactggcccattaagcttgaagacttgcaaaaaggtagcattttttacagaggttagctgttaatagacatgagacagtaggcataaactttcaaacaaacaggatttgcgttacatattgagacatttcctcataacattttttaaggaaaacaatgagtcactaggatagatagtttttgcttttcctacctccttttgtataagaggacatccattttcctttgggaagctatcacttctcctgtgcatgaagcttggtgggggcacaataacgctctcccctggtcaaaagtaggcaggcatctccggagctaggaccagcagcctctctccctgggacttgaattacactcaaagggagtgaggccgggtcaagaatagctgaatttcatttgtctcatttgtggcacctgaaaagtctatgccctttatcctgatctatctctagcattgtcctggttcctaccttttctgagggctttttgtccagcttttaaattcatcctctgagagagcccctattcttgcaataaattcatttttaaaaatgttaggtagtgagaatcagtttattttggttacagtgaacagttatgggtcactaaggatggggatacattccgagaaatgcattgttaggcgatttcatcgttgtgtgaacatcatagagtatattccacaaacctagaaggcagagcatactacacacctggccatacggcatagcctattgttcctgggctacacatctgtatggcaggtgattgcacagaatgctacaggcagctgaaacaccatggtaagtatttaccatggtaagtatttgtgtatctcaacatagaaaactgagaataaaaatacagtagcataatcttatgggaccacagtggtatacgcagttcattgttgaccgaaatgttggtatatggcacataactgtacccttttgaatgaagttgaccagcaaggtgattagatcaaagtatattggtttttgaggtttcattctaaactgtcattgagatgcaaactttttgtttctttagcaagtagcaatctcagtcaccaaagtgcaacttggacatcttgttcatttgaattccccccaaaacaggcctaagacaagttaatctctttgcaggaggcgggagtgaggcgtaagcagcaggagacagtgacaggggaagccaacacaatggtgtgttgtcaaggttgcagtggtgcccagaggaactcgatttacagagggaggattctcccagaattgtctgactaaaggctagaagcctgcattcctggggttacaggtttccccgggtgtgtaaactccatgcttgggaatgggctcccatgatgtcagaaaaaccctggagcaaaacatggaaagatgtccataatgcctggaggtggggccagctcaggtgatatggtttggctctgtgtccccacccaaatctcaccttgaattgtaataatctccatgtgtcatgggagggacctggtaggaggtaattgaatcatgggggcaggtctttcccatgcttttcttgtgatagtgaataagtctcatgagatctgatggttttataaatgggaattcccctgcacaagctctcttgcctgccaccatgtaagacatgcccttgcttccccagccatgtggaactgtgagtccattaggcatctttcctttataaattacccagtcttgggtatgtctttattagcagtgtgagaacagactaatatgtcagggaatgacaagtcttcgctcacatgggtgcaactgcccagcacgaacgagggccaagagggcgtataagggcaccggagacagcagctccagaaatggactcagttgctcccatgcaaggagagaaattccccatgataaagtagggaacaaaaatgtgacttactttttgaaaagggggcacacctgggcctgcaacttgcatggaggtgtgtggccagcatttacactgatttaaacagcaggtttcagaagtaattcttcttcactcatgtgcttataaaccttggagaggctgaaagctcacttgataagatcatatcaaatacttcattaaattaaggatacaaacatggtggtagccctgcaggtcatccagagatcaaggctccacatgccctggatgaaggctccacatcagtagggctgacaccatacagggagctggccttgcaccttttgggagcacagttcgcctctgtctgccatttccaacattcttactctcttcctggtgtgtgggcaacttcttgaattgctaatatatttgttctctaaaatatgtacttcatttctcatcatatttacccattcctcaaaacatcttgcaaataatattcagttttaagaatattgtatcagtcagggatgttagttgcagacaacagaatccactctagctctttcaagcggaaaaggatttattcaggaatatggatgggattgaagaaacagatttcagctgagttcccaagagcaatgcctggaaccagagagtgggccaccaagaacctgctgcttgtcatgactagaaagcttacaaatcagacagatggttctagaacctcattgcctctcccacagtctgagccagcaaaatggatgcccacacacttccttttccccacgttggaaacgaaatctcacacaggtgcatccagttggcagggactggatcgcaagcccatataccctcacagacactttgctgcctttcaggaaaatctgagccaagtagatttttggaaagtaccttgtggggatgagatttacacagtggagagagctctcaaagctcagagagagtattttgtgggcagctgcaacagttttccactacatgtgtcaacattccatggcctcgtgttctcctgatgttatagtacagaaactcatgttctgctaagtctattcattctcttaaatattggaactatgtaccctctatgcttcaccccatctcccagcgacataaagaaatggtaccttgtaagattcttttgtccaccacagactaaatttgaggacattaaatgtcaaacggatacaagaattgtgaatttacgtttcatggaaaaagaaataaacctcttaaagacagatgtccagatcaggtataaaaagatttttttcctcctgttatatcatattcaggcgtaatatttaaaaatgaaaaaaaaaaaaagcccaacaaccacccctgggatggcatagccactgaccaatcagaggagatgcctggccaaccatgcttgatggtgttgggccagccatgcaggtgaattccagtttacagaggacaaaggaatgctccgagaatatgccatttgttccttcatattttccaggtccttacagttcagaagagacctgtgaacacttctagccactaaaatgtacgggtcaatgttgtttgttacttgtgggttgaagcaatacagctttcatgttcaattgcctattctttctcctcacctgacacggccaccaaggaggctctgtgttccagatgatgcagtgaggagatgctggagcctccattagcctggttacctgagtcacacgtggagaagagcttcctcctgacccacacaggacatacagcaggaggaataattaggcttttcttgtcttaaggcaatgtgatttgggagcaagtttttattccaatataacccaacttatcctgattaatacacaacactttccaaattcagcttcagcaactcactctatacctaatcattaaattctgggctgtccttctgggcagcaggatagattgctcagatatgaaacctcaaaatttcctccataggctgggtggctagcccttcatctcctggttactgccctgatttctgctgtaatgagcttgggcaggtccagcctaagttagtatgaaggtctcacatccctttcttcctcaatgtgtcctcctaactgtggttgacttcttaaaaaaaccttttcaatcaatttcccaacaaagatcagtaacctaatcagtagaataacaaccaatcaccctgtccttgtcttttgcttgtttggccaaactctgttatttgagcccctactcctacccctggcctcccaaataaataacaaacgctgcgacaatgatgggctgtgggttttttatttcttccacattaaacataagagctattagttgaccatagaaatactatatctaattagcaataatgctgtgttgctataaataacctgtgtgcttcttttgacaagtgcagagtatcagtcaaattggcacctgcattgcaaatagatttataaaccgctctgtttcttaaagtacatcagctcttgggtttcgtggctgtggtatggtatgcagagggattgcattttggcactcacactaaaatgaaataaaataataaaataaaataattcttctacctttggggaggcagcaagattttatgctgcagatcccacatgaggctgggcatgtggtcatgccttctccctgtgaggctggcttctcaaagccattgaaacagccaaatgcatggtgctcttcccttcctttttaacgtaaatttcaaaatcttatcaaggttatccaagctcattgttaaaatgttacccgtccaaaagcatttacaatgaaatgccatagcacgtatccacacttccctaactccatttttgtttccttcaggcaattgttttcaactcttctatgttataaaggtcttcccccatatatctaaataatatgctatattccccttttttgatatagcagttttagactttagctactgatttcctggtatgatcaatgaaattttatctctgactgccttctactttctctcctttctcaggcaatatgatcatgttccccttttgatttctctattggctgtatttataatttcaaggaaatacacctctaatcaaagacaaacactgcatcgtcttacttataggtgatatctaaagaagctgaactcacagaaatggtgagtagaagggtggttgccaggaactgggtgaggtgttgggggaaatggggaattttggttaaagggtacacattttcagctataaaatgagtaagttttgtagacttgatgtacagcatgtttagtatagttaataataatatatcacatacttgaaatttgctgagagcacagctcttaaacgctctcactaccaaaaaaaggtaactctgggaactaatgaatttattagcttgatagtggcaatcatttcacaatgtatatatgtatcaagacatcatattatacaccttaaacatacacaatgtttatttgccagttatacctcaataaagctggggggagaaagagataatgccttggtccctgaatagtttaagaacatgtctgcagattcttcgacattcctgccatgtggaagtggagtctggttttctccccttcaacacaggccggtcttaggactcacctctagctgtatcaccttttggaacctagccccggaagtagcaagcatcacttcctctagaatgcagtggaagtgatggttgctacttccgaggctaggtcctaaaagccaagacagctccaaccttgttttcttgctgggggcacttgctcttggaactcagtcaccatgctgtgaagaagccctggccacatggagaggccacatgcaggtgatctggtcaatagcccagactgtaatcggtatcccccacagcagatgtgtaaatgcagaggcttttcagaggaccacgtagactctaccttgctgcactcaacaggagaccctgagcagaagccacctggcagagtcctgtagacccccggagccatatggcagaacataatataaatggctgttgttgtaataaggatactatggtttgctggtttcttgtgcagcaatagataactgataacccccgcctcccgctttgcaagacgagaatattagccctgctaaagctcctctttggttcatctctggtgttagcttcctaacttttctcatttctaacttttacttttatactctcaaggatgataacgtctacattgtgttctgaaacataatgaagtcatctgtgcttcgtacaaaggttggatctcagagttgaaatccactaacatatctattatactcttacaaatattgttcactgtggagcaggctttctcagacttgacactattgatattttgggctgcataattctttgttatcaggatgttccatgccttataagttgtgcattgcagcatctctggcctccacccactagatgccagtagcatccctcatccccctagtatgacagcccaaaatgtctccagtcatcgccagtgtctcctgagggagaaaaatcactctcagttaagaaccactgcggtggggcgaagaattgtccttggattctgtttcttttcattataatactttgtgtctcctggagttactcattgccttcctttttttcctctttagttaatataatttactttgttcataatcttaggttttgccaagctcttcactgaccttgccattttcccggggatcctcccatcagaatattttgtcttctgttccgatgaatatgttctctagacctgctgcatagatcaggacttctttttacttgatacaaaatttgttttaaatatacacatttaaaatgggagaaattttcaaaatgcagaaacgaatgcaaaaattcttgattttcttgattttcttcatgtcaccagcaagtacggactccactgtatacagtgagctttgtgcaaccagagctggctttaggtaacagacaaacctttcaaaaacagaatatagtctatttagaaataatattttattgtactagtggagcttgctattaaaaatcagactaagcaggcagggcacggtggctcatgcctataatcccagcactttggacgtcgaggcagcagatcacttgaggtcaggagtttgagaccagactggccaacatggcaaaaccccatctctattaaaaatacaaaattagccaggcatggtggccacgcctgcagtcccagctactcaggaggctgagacatgagactcccttgaacctgggaggtagaaactgtttttttcttttccattttatatattttttaattatcctaagcaaactcaaggcccaactcaaatgctacatcttccttgatctccccaagtggaaataatcagtgtgcatattgtttatattttattagagacattatataaaataaatacggaaacaggagagcttagggtgaggagtgcgagctttggggccagacagcctggctttgaatctcagttcctatgcctactagctctgtgactttcggcaaaatagtgaccgtactgtactgcactgtgtctgttttctcatctgcgaaatcgggactggaaaagtttccatgctattgggttgaagggaaggatttcatacatgaaaggtggttattgccatgactggcgcatactaagcaaagctacatgttcaccattgttggcgtcatccacgctgcctgactttaagaactcctcaaccagcctgggagtggagacaggcacctggcctgagggatctgagtcctagctttacacagcatcagatgtgggactttggccaaggtatgtcagttcttggaggccaactttcctcatcttcactgtggagttaaatgagatgcaggagaatcgccacccgcacagtctttggactcgggtggcctgtgttcaaatcccagctttgtcacttccatgttttgtgactttgcaagttactgaaactctctgcagctcatttttcttatctgaaaaacaaggttccaagtagtatctaccacagagagttcttatgcggatccaatgagttaacgcaggcaaagtgttaaagcagtgcttggcattattaatttgtaaataaggctgcttattagtagtatcctaacatatgcaatgacttacatggattcaattacgttcctggcaaaaggaaaaagcaagagagagaggaagaggagggaagaagacataacctgccgtgcctttcaatgcactcaagtttgtcctgcagtataggaggcaggaacctgctgtttacccagtggcccccagcccccacagccactcacagtgtgagcatctcactgcagtcagtagctttagtattaaagatacatatttttcacacccaggatccctgagcacaagccaacaactccacttggtgctcagccaatgaacaataatgtgtcaatgctgaaagaaagacgggaagtttcgagccgtagaagctgtattttatgagtggtttgagggactttcaagggtgatgttgattgcgtgttattttcgcatcatgtgtttgctctggaaactaaacttctttctggaatgggacttcattgccaagaccagtgaactctcagtgaagcattggaggcttgcgataagaaagggtgaatgaactataggaacatgagttcttggccgccttcattcctatgcaaattgacatttggtttctctctggaggaaatgcctggccaggatcacagggcaatgcctgtgggcatgggccttgagcatctcttctcatgcacacctacctatgcatgtgggtttgcagagcccacaggttaggacttaagaggcatctcaagggacaggaaggttctcataccatttgcccctgtctgccgcggcaccagaccttggcccagacaatcatcccaggatgtggtgtcaaactccggttctaacccggggccttggaggtggtaatggtcacctggtaacctaggacctcacacctaagccagagggcgaagtgacagctccaggtaattgctgccttataggaatgtgaaccagactgacccatgtcctgattttcccagaggagccaagaaacaatattggtaggtgagatctcctaacttttacatttggctcactttttgtgaaatgttctgtgaagtttgaacaaacacatttgcagggtgcactggcctaagggctcccctttgtgacttcattaggaactcttgccctgctgtctggactcagcaacgaggtgaatgttttcccaggacccccgattcatttctctgggtcaccccacaacccctgctgtctgggaataaggtctccttcattctgagccgcctgaagaaatctcctgtatcacaaaagcactgcttcgttttgcataactaatttcaaatcttatttagcgtcaagtttcagaattaagaagctaaatgacagctgtttaattaactccttaagctgattaggcagtgctactgaaatcccctcaaggaggaatttctaactctggggagaacctaggccatgttactgcctctgtttaaatttagtaagctgctaaacccatcgaccacacgtacctgacatcctcaagcatgtggccaaatatggatttttatttattatgttaactgctacagaagatgccaagtgataataacaataacttcctttgatccactaagaaaatctgtcatctgtcctgcgttaggaaatatatatatatatatatatatatatggcgcaagtcggagtttttccgaagacacttgattatgttataaatcccatgggtttcaatgcactgtgttaggagaggggtttggattaaccttgggcccccacataatgggttgtacatccttctcttcattaataagagaaagccacatgaatgagtttaagaccttaagccagttttattcttaagattgatgtttttaaagtggaatttccaaggaagaggaaaccacaatatttacctgattttatttttatttattttttaatatatatatatattttattatactttaagttctaggggacatgtgcacaatgtgcaggtttgttacataggtatacatgtgccatgttggtgtgctgcacccattaactcatcatttacattaggtatatctcctaatgctatccctccccactacccccaccccacaacaggccctggtgtgtaatgttccccttcctgtgtccaagagttcttattgttcaattcccacctatgagtgagaatatgcggtgtttggttttttgtccttgcgatagtttgctgagaatgatggtttccagctttatccatgtccctacaaatgacttgaactcatcttttttatggctgcatagtattccacggtgtatacgtttattacctgattttaaatgtgaggctaaggctgcctgggcatcccaggacatcgacgctgtgtacaagatgatgaatttgtttccccctttataatccttagctgggcaacattgggtggatggtaacaaaacatggtgtagacagtgtgaagaagcatgagacgtgtgttttggagaactgccattgacctaaggttgttagaaaccgcagtttaacttttgaattgagtttagcgggatgagtccagtaatccggtggggagtggtgcggaacccacagattttgtgggctggttttgcgtgctgaaaatgtcagctccttgctcaagacctagaggttttccatttttgtgttgttttgagtttttgttttgggcagctttattgagataaaattcatataccataaaattcatctgcttaaagtgtgcaattcattagtttttaatatagtcacagatacgtgcagtattaccacagtcaatttttgaacatttttattgccttaaaaaaaatcctatgtccttagctacttccccacccctcactaccaccgtgcttcagccctggcaatcacaaatctactttctgtctgcctgaattttccagttccagatgctcaacctgaatcgaatcatgtgatgtgtggtcttttgagactggctgctttcacgtactgtgatgccatcatggttcatccatgctgtagcacgggtcagtgtttcgttcctttcacagctgaataatactcctcaaggcacacaggtttaatgctttccatttaacaaaaatcaattccgatgctgttatgatcagttaatcaactagggttccaaggaccgcatcccgcccatggaaatgatttgtttggactgtacagatttaattctttttcaatggatcacaacatttgaaaatgagaatatctgcataagatccggacttctggtttgtcttggaaaatcagaagttcagcaattccggggcatcattcagtgaatgtgtccttgtggcctctctcctcttctccagagctgacgtctccattgaattgggaggtccaggattctccgggagggtctgaatccaggctcccttgctgaggtgcctctagacgagcaacacacgtgtgatccagctgtgccaacgttgtccagttccaacaacggaggctaaaacttataagaaatgtgacaggcacagggtaaacactcagcttcgggtgtaactttttaaaataacaagctactctttgtatcagaaatactaaatctggtgatttatcagtctccttgataagaaaagtctgacaatatgatgctgttgagtacactcagcatatatcaaagatcgacaactacggatgttgataatgaaggttcttttaagaaacgtacacttcatttatagcttccaaacatcaattccatgaaacccagcatgaatatttaatttatgtctgttgatagagtcctcttgatagcataaagcatctgctctttgaaactgagggaggttttgcctgcagcctctaagtaaatgggttctcagtcctctactatatcactacagaaaaatgcatgtcaaattgtcaaaggctacagaattttctgtaggctgggagaagcctatcagttttatgggacatgaaactaaggaattaattcaattggtatggaaaggacatagaaaattgataaacatcaaagagctgctctcagacttcatttaactaaatcagtaaacctaaaagtgggtcttgtttagaattttaaccctctagaggcaccgaaagtgcttataagtccttttttaacctgcaagccacagggatttcagcaagacttattggtggggctgggagccaagtcttgattatctgtgctgatgagggtgcagtggtgtggctaatcccaaatagtgtaaaacccaaaagtcatttgcagtttggccctggaatacattaagtgcattttcttgccttcaccagacaacttcttaattatgtttcttttaggctagtgtaaaaatgaatttacatgtcttctgcccacactaattgagaagagggtagatgcaattaagattattctgggaggcaggataaaatcaatctggggttttaaattggtcacagtcacccatgcattgacttagacttcataacctgctgaccaaggaaatgcatctgaggtctatgcttccctttcctgagaaaggaagaacatcagcagtctctgctacttccccagcctggccatccccttcctcagctccttctgtgtaggggtctccccagcctagccatccccttcctaaactccttctgtgttggagggggggggctccccagcctggccatccccttcctcagctccttctgtgtatgtggggctgtgattctatgattcatgtcctgtcctccaaccccactgatgacagatgaaaatcatggggacttggagaaaatgaagatgattattagacccttcttcaaaatgtagctctgtgatcaagattatggacactggtctcattctcaactgtctgaaactacggagaaatttatgctacagcaaagcagctctgttttcggggtgtctacaggatggggtgaagccacactactgtggagaccacaccctagaagatgatctcatccagtcccagggtgttgatgttctgatcagttccagattcagatctcccatctgagagctcccatgaactcaagagtattcttctgcctagctgatgtctccactgggtgtctcagagtcactgggttcaagaagcaactcttgacatcctgtctcaaatctgctctgctaacagtattcaaatctcagcaaatggggcaacagtgccctagttgctcaatctgaaacctcaggagtgatggcttatgtcacatccatgagatcattgggttagcactgtgctcaatgtactgcaaacctgccagccacttccctccattccatgatcatcaccttcaatgaagccaccatgatatgtagccagggttaggaaaaatctttgaaaccacttatcttgtttatttactccatagcattcgtcactctcagaaatcctcccttttctcttgctgtgaatttactgtctgttcaaccacatcagaatataacctttagaagggcaggtctttcatgctgttcaacacaaagcctagggctaagttcaggcagcctcatgcaagcgcttcctggcatgccagactcaaacgtgtccttgaacataacacagggctcttagggcactccttgaatcagcattgaagtctttttcaattaacttccatttgtaacagagaatgtgcattatggccatgttctctttgatattttaatccacgttggaagcaaaatatatcattggtgggtccctgtgcatatctccagggctttacatttcctggctggaattggcaaatcttgtcccattcctgaagctagaggtataaaatgtgttatatgtttacagcagtcaaacgtcatcagatttcctctagttcagagcaagaaaataaccaattgttcttttattggttgggaggtccacactataaccactttgtgatacatcattattattttttatttcattaagccgggctttggcagaagcatcctaactgacattcagccaagaaagcagctgtggctgatgagctcagctggtgggagcatggtgttaatgaggctgaggtcgtgggttcaatccccaccgggctatgggtttgttgaaaatcagccagctgaaatggtgaccctaactatggccaacagcttaataattacatgagaaaacatgaacatagagccaaactatcttttcttcctaaggtcctggggcacctgaggttggtccagagaagtggttctcaaccaagtctacagaatataatcctccatggagctctgacaaaatttcaatgccttgggcctgcttcttccaattatatcagaacctctggggagtgggacacaggcaccagtatttctttttcatatctttgcaggtaattctcactcagtggttctcaaacttagctgtacattggaatcacctggggagattaaacaacactggtagtgggtctcacactctgattctgaattcattgtcatgggttgcagcccggatcttgggaggctaaaaatcttcccacgatattctaataggcagcaaagtgtgagcaccactgagagtgagttttgtccatgaaaaatggtcaccttccttagtgattccagagtgccttctactctgctggacctgtgaacacacatgcactcagacatggttcaagacatgtgactggacagagagggcaaactggcaaactagtgttaggcaacatgttttctgcttgatgcttaagaaatgttaaaatacaatgatggtgccataaagtaaacacagaagtaagggaaaaacactctgcacagagctgaggtcagaaagcaccatgctagctctgccttgcaggtgagactgccttctggtccaaggagattctaagttgccatccacatgagacaggatgccagtgcagagcatggcctcatagctcaaatgtcttcacctcccagggcttctgtgaccaccgaacgattactatttgccccaggtcccctgctcacaatcacattctgtattagtttgttctcccactgctataaagatactacccgaaactgggtaatttataaacaaaagaggtttttattaacaaatagttccacgtggctggggaggcctcaggaaacaatcatggcagaaggtgaaagggaagcaggcgcgtcttacatgatggcaggagagagagagataaagagagagagagagagagagcacaaaggaggaagtaccacacttttaaaccatcagatctcatgagaactccctcactatcatgagaacagcaccggggaaatcaccagcctgagccactcgcctcccaccaggtccctcctctgacatgcagggattataattggagatgaggtttgggtggggacacagagccaaaccatgtcacctccccattcaatctccaccacaatgcctcctttttcatttctgtagcacctagttagaaattatcttattcttatgttaatatatgtataagtaaatgcatatttattttgtttatttatgattaacttacttttaaaattgtccatctcctgttttagactacaagatatatgagggagggggccctgtgtgtctccagcagctgctgagttcatcccagtatacgctatcatcatctgcacgcaacagttcttgagtgaatgaatgaatgaatgaatggtaccacagtttcagaaaatggtttctttccctgagttattcttccttcctatattcaagcccctcaaatgattatttaccctttgaaaattatgttctactgtagcagctttggaagttcttatatcctgcctcatgataagatgtatttttggtgaggtcaggattgattctataaaaaaacatgctccctcgtatgttggaggaagtctgaaaagaacaaggtgattatgtcaatgtaacatggaagcatagcttgaaatcacaaactgatattattaatttttattttttaacttttaaattttatttatttatttatttttgagacagagtttcactcttgttgcccaggctggagtgtcatggtgtgatctcagctcactgcaacctttgctttccagtttcaagcgattctcctgcctcagcctcctgagtagctgggactacaggcacctgccaccacgcccggctaaccctggcctatagatgatattattattattttttacacgattgggtctctgttttcaagggtcaatggattcagtaaaaaaaagtaaagtatatattttttgaaaaaatcacaacctacccaatttttggaaaggatgttctaagcaaaagagaaagaaaaccacatcaaatgtaaaaacatatcctgactttcaaaccacatctttaatgagggttgtaaagattatttcattttctcaaccattgagttagatatgtgcataaacataggttttgaaatgtaaattctgcttggcaaaatatgactttagaagttgacatttagaaaacttcataaaagtgattgcaggagaaaataagaaatgtactccaacagctgctttaatgcaatgcaggaaggatgctaagaaattaaggaatggaaattaaaaggagagaacaggcatggagaatgcactgctggtcatttgcaaaccgaggggtgtttgaaaatgtggaacccgagaagctattatgaagagacatgatctgtcttgtaataaaattcttagaattgacgtgcaagtaaaggattccaatcctgtctcattgtaggctccgtagcaactgctaaatagctaatcttttcacacccgttccaggagaatttatgttaatgcccactctgtgtgttcaagaaaataaatctaggcttgactttggctttcaaagtgtgtgccttgaaaaagctacgtttctccacatctgatttataatgacctgcaggcttgttctcacctgccccaaacacaaaaccagtatattttttctgcttttacaaaaatgaagcatagtgcatgaagttccctgttttgtctaaatctcgttaaaatatgctaagctcacaaaatcacaaatccacacaggatgccaatactaatgacttatatatgttaatctgataggttttaataactgatagaaatataagtactattattgtgggagagtataatgattttcattcacaaaggcaatctatgtgggtgaaatccattatcttaaaagtattttgataaggatagatgtatgtagaaagagttaggcatcttatatgcaattgttaaactccattaaacatgctcaataattagttggccaaagaacctcattagatgtacattaaatgtgcttaagccatatttgagacacttcattaaaagtgacacagtgagctttactgcataactttaataaaaattctagtcaaattaaaactagaatttaagctactctcattctatctttgagggcggactactatattgagttttttcccacagtacaccagcctccgctatgctaggcattccataactgctttattcaggtatagtttacctataataaactcatcctttataaattgcagttcagtgagttttattaaatttatgcattttttccttcttctaagagatcactttcaataaaataagaataaataaaaataaatgtacgcaattgtgcaacaatcaccataatccagatttagaatattccatcacctcaacaaagttcattcacactcttttgtgggcaattctttctctcagcccctaatgggtttttttttttttattatagctttgcattttctggaaattacatatatgtgtaatcaaatattatatagccttttgtgactttcacttagcacgatgatgttgagattaatccttgctgttacatgttatcagtggttgatttttgtggctgagtaatattttattatgtggttatatcacaacttggttccatattcatcagttgatggacatttagtcggcctcatttaggatattataaataatgctgatttgaatactcaacctatacgtttctgtgcagccatatgtcttcatttctttttgaaggtggaattgctgggtcatatggaagtttatgtaacttttaaaatctgccaaatgttaggtagtgtgacacctctggctttcttcttttttgctcaatacaatattgtttggctatttggggtcttttgtgatcttatataaatcttagaattaaaaaaaacatttctatgagaaatgccattggaatttcaagggggactgcattgaatctgtagatcactttgggtagtgtggacattttaacaatattaattctttcaatccatgaacgtggaatatctttctatttatttgcagcatcttcaatttctctcaaatatgtgttacagttctcagtgtacagatttttcaactccttaagtttattccaaataattttattatgatgctattttgtgtgtgtgtgtgtgtgtgtgtgtgtgtgtatgtgtgtatgtgtgtgtatgagagagagagagagagagagagtcactaatggaatgttttctttctttctttttcagatagttcagtattggtgtatgggccgggtgcagtggctcacgcttgttatcccagcactttgggaagctgaggcaggtggatcacaaggtcaggagttcaagaccagcctggccaatatggtgaaaccctatctctactgaaaatacaaaaattagccaggcgtggtggcgtgcgcctgtgatcccagctactcgggaggctgaggcaggagaattgcttgaacctaggaggcggaggttaaggtgagccgagatcgcaccattgaactccagcctgggcaatggagtgagactccatctcaaaaaaaaaaaaaaaaagaaaaaaaaaagaaaagaaatgaaactggcttttgtatgttaattttgtattttgcaacattactaaatttgtttattagttctagcagtttttcgtggcgtctttagggttatctatatataaggtcatgtcatttgcagagacaagtttacttttttctttccgatttgaatgccttttgtttttttaaaaaatcacttcattgctctagctaggagttccagtactatgttgactagtgtgatgagagtgggcatccttgtcttgttcctgattttagaggaaatgtgtttagattttcacccttgagtatgatgttagttgtgagtttttcatatacagtctgtattatgttgaggtaaattccttctatacctacagtgataagagtttttatcacaaaaatgtattgaattttccaattgttttttcctgcatcttctgagatgatcatgtgatttttattcttcattctgttaatgtggtatatcacattaattggtttgcatatgttgaaacatctttgcatccgggggtaaattccacttggttatgttgaacaatccttttaatatgctattgaatacagtttgctagtattttcttgaggatttttgcatctacattcctcaggaatattagcctgtggttttctttgcttgtagtagttacctcttcttcaattttttgaaactcaaaagtaaaagaattcttatttttctctttttgtcatgccctatcttccctgaagcaatatatatacaataatctctttcctaagtgtgaaggatcacaggacagagtttaatgcctgaaaaaaaattgatattgagttaatttttatacatgctgtaaatttctttctgagctctgctttattccataaatttagatctattgtgttgaaattttatttagttcatgatattttctaatttcctttgggatttcctctctaaatcattggatatttagaaaattattgtttaatttccatatgtaaatttcccagatttctttctgttactgatcttaaatttaattttgatgtcattgatattatgctttgtaggatggcaatttttaaaactgtattggtatctgttttatggcctaggatattgtttaactgatgttttatgtgcacttaaaaatttgcatcctggctgggtgcagtggctcatgcctgtaatcccagcactttgggaggctgaggcgagaggatcacttgggttcgggagtttgagaccagcctggccaacatggtgaaaccctgtctctactaaaaaattcaaaaattagctgggcacggtggcaggaacctgtaatcccagctacttgggaggctgaggcaggagaatcgcttgaactctccccaaaaatgtgcatcctgatgtggttcaacggagtattctaaatatgtgaatcaggtcaaggtgattgctaggctctcacttttagcagggaaagatgatgggttttgcctctccatctcagacgagtttgtcacttctggctgataaagggtctgatcctcaccaccatccccatatcaaatctgtctcttcccctgtcctagtccctgtgaaatctgtgggttttgccctcctgatggtggcgataatgggcactacaggtggatgggtgcacacaggcaagacggccccagacttgttgacatttttattcaatgcaatagaaggtttttaagactaaaatcttctgcatttgatatctgagcttagtcaatttccaactaaactttaaattattatttaaaacaattttaaaattacgataaaatacacataatataaaagtttccaatttaaccattttcaagtgtatagttcaataatgataagtatattcacatcgttgtgtaacctatctttagaacttcatcttgcaaaactgaaaccctactcacattaaacaacaacttccctttaccttttctctcaagcccctggcaatcaccattccactttttgtttctataaatttgcctactctaggtacctcatataagtagagtcacgcagtatttatctttctgtgactagttcatttcacttagaaaaatgtcctcaagcttcacttatattgtagcatatgtccaaatttccttatttttaaggctggatgatattccactctatgtatagatcacatattgctcatccgttcatccactgatggacatttgggttgattctacctcttggctatagtgaataaagctgctatgaacatgggtgtccgaatatccctttgtgaccttgctgtcaattctttgggatgtatacacagatgtggaacttctggatcatagggttattctatgttcaattgaggaattgtcatactgttttccacaaaagcagtaccatgttacatttccaccaatagtgcacaagactttcagtctctcctcatcctcatcaacatttgttattttctgttttttttttttttttggacagtaactatcccagtgggtttgaagtaatatctcactgtggttttgatttgcttttccccaatgattaaggatgttgaccatcttttcacgtgcttgttattacccatttgcacatcttctttggagaaatgtctgttcatgttctttgctcatttttaaatttgtttatctttttgtggttgagctgtagttggaggaattatttatatattccagacattaacactataatggttaattttatgtgtttaagaaatccttgccaaatccaatgtcacaaagctttttcgttatgtttctttctaagtattttatagtttgagaggttttacatttaggtctttaatctaggttgcgttaaatttgtagatggtgtaaggtaagggcccaacttcattcttttgtgtgtagacatacagttcttctgacaccatttgttgatgaaatgactgaacagtgtcctcgcaaaagatatgtgcaagttctaaccctcagtacctttgagtgggaccttatttggaaacagggtctttgcagatgtagtcaagttaagaccctaatctaatgactgctgcccatataagaagagagagatttgggaatagacacggaagcagagagaatgccatctgatcacagaggcagagatgggagtcatggatctaggcaccaaggaatgccaaagattgctggcaaccactggaggtcaggaagaggcaaaaaaggatcttcccctagagtcttaggagacagagcatggttctgctaacacattgatttcattcttctaccttgagaaatgacagaggatactttacaatgcttcaagtgattcaagtttgtgaaatttctaatggcagccctagaacgccaatacacttggtgtagaacaattttgattttagttccctggttctgggcctagatgttcactctcgatgtctgagcaaaagtgttcttctctttgcaaggaaaagggagaaatggctgtcagttttgcaatcagtgatgtctgccttccagtctaaagaggtagacttccattttctagcattagggataaaagttgactcagatttattgtagaacacttggaaaatatacgcaagcataaagaataaaacagcaatgagcagtaatcccgccactcagagccactgctaaagttttgttgtgtatcctacagggcccttttaacatatgtgtgtaattatttgctttatgtataaaatgaccctctgcctcacttttatgccgctggataccttccattttccaatttattgctaatataagtttgttcaatgatagtcttcagtttgagaaaactggtttgaatatccccccacagtggcaattattatgatacttaagtagacgctatattaaaggcaggctgacgtagctgaaatacagtaaaatcttagaaaatttttgctgaatgaataagaaggttagaattgtcccaaatgaggatgtatcaacctagaccatatattgttttcaaactataacagcatataaaggaagaatgaagaaggttgttaggaccagcatgcagaatgatttcttcgtgatttaaaaatcataaaaagctttatgattttgaatgttaaattcacttgcgttatcattgtccttttaaagacattgtcttccaagatagaactcttcaaggttgaggcgctggaacgtgttcatacttgcacttaatgtctaattcctaaggcactgagagctcaatatactcatgcctcagccgatgctcttccaccagaaacttggtccgcttcaggttttctgtctcagaggaagacaacaccttctagctaggtgttgaagccatagcctgaggcttctgagacatctcctcaatctccctgtccatccatcaccaaatcctctttatcctgccttctgaatcccagtttagtccaaacctttccctctatatccatcacgtccatcgcaacccacaaactccctcattcatgctgccattttctcctgcctgtgtttgggtgatataaatagtttactaattggcatttccaactctaaatcttattcaataatatgttatttatactccagccaggaaaggcccttaccatgcttcagccctcttacctcaaaaaaaaaaaaaaaaaaaaggaaagaaaaaaactccaaaacaaccaactttccaatcaacaagtgaagagacaatccatagaatgggagaaaaatatttgcaaactatccatcttacaagggattaattacaaaaatttataaggagttcaaacaatgcaacggcataaaacaaataatctgattgccttggaacggcaaaattcttccatgagaccctgaatgacacatatgtttcgctcttctccatacacaccggcacaacactcttctttgctctcttctttggccccaccgacctgctttctgatctgtgtctgcatgccctctcctacggcagattctttgtgtatgctatttcctcagcctagaacaccctctccctcccctgttatcctggttccctcccattcatcctttacatctctgattaagcaccacttccttggagaagtctcctctgacttctcttaataagccaacctcaacaatgatagttcttctggttttatatctctccttcatagcacttgtcatagataaaattttatatttatttctgtaattatttgattaagatctatctttcctgccagatactgtgcttcacaagggcatagactatgcatgttttgtttacattttgataacaaaacagtagtcttcagttcctaatagaatgcttggagaggagattatcaaaaatacttgctgaatggatggcacatattaggtgtccataattataagatgtgtgcatgaaagggagacaaaatgtatttaaacaacagaaaaaaatgcattggaccctgtaattgcactattctgagggctcttctgtgtgtgagagcaaaatcccttgaatattaagcaactgaccctggggattcggccaaggggcacttagtggcattcattctaagtattctcaaggatctccactgagacactagagtccctaaaccataatgcccttccaaaaatggcccttggccctattttcttaggtttcttggacttcagaagaatggggttttacaacttctctcattgacagtttctacagtttaaccctccattattcaatgggcttccttatgtctaataaagttgttttcaaccaagaagaggagcaaagttgtagaagcatattattttgacatttatgcacacagtgagtgcatagaatgcaggcatatggatagatagctagtgaccatttttatgtctacgtagaccttttgctttaaagtctgattttcttgataattatatatttacaccaactttcttttggttagaatttgattagtatagtatataactttccaagcttttattttcaatatttttatgtccttattttttagtttttcttccctgacaacactggtcttttaaatgtagaatttaattcattttcatgggttatcaccacttgtatatttgaattcattttttgtgcttttcaatttattatttatttttgatttctatttacccaggcttttaaagcttaatttatttcttctctgttttgtttttctttggatgaaatttttctctcttccttcaatttttcttcttcttttttaagaagttacgcactattttttcttattttcggtaattatccctgagattttatttctaatgaagtccactgataagttctttaatcgtttaaactgttattgagctcttccaaaatgctaggaaataagaatatacaagtgaataaaacaacaggcttgaggacggttcagtccagtaagagaggcagtatttctaagccagaggcagcaagttcaggctgcgggctgcctgctcccacatcttgtctgtttatgtcattgctaatggatcccatttttgctgcaaagtctagatatagcttcataatgctgttaaaaaccagtggttggagttagctctccaacacaaggcaaagcaaagcaaacacgtatgtgtacacacacgtgtgcacacacatatactttagccttctcaggtcaaaaataaatgagctatagtaccaatcattaagtgctttatcagatgtaatgtaagcaaatggacccttctatttgtagtgactgaaagcactttcgtttcattattcattgtagtatttctgattctattttacacgaggatttttaagtttgtatccatgagaatcagaccttggatttatgaacaagtctattattattattattatttttactatactgcaattgcagggtaagcatactttgcatacatttgcatatgtggcataattacttgatatctgtggatatgtttgtataggttagaagctctgggggtgcagagtccggcttaaccttgtcctattctttacacatgcatgcagcatgtgtaaacaatattttttttgcaacagatatattttttgcaaaccagattagaacgactggaaacagtttggcctttggcttatttccttcctaacacagggcttcatctccacaatgattttgctgctttcattattatcatctggcaagatttgatttcaattcttgtaaaggcgaatttaatgcaaagtaaattagattctttaatgggattttctttagcatgaatgagaaatataaaacgtcaatatcaaatagcaaattactcttgattaactttttattggtttagttaacaactgattgaatacaccttagataattacttctattaatgctacatcttggcattttaattaactgtttaagtgttctcattttcattgattttattttctttggtaaatgaagtgggtacctggcttaggtatatacctagaatctcagggggaggaagtgcgtttggggggttctgtgttggacggaggtgctatgttgatagtcattcttccaaggactggagcaacagtgagggaaatgagcccatgaacaatgaaaaaaattattccggccgggtgcggtggctgacgcctgtaatcccagcactttgggaggccgaggcgggcagatcacaaagtcaggagatcgagaccatcctggctaacgcggtgaaaccccgtctctactaaaaatacaaaaaaattagccgggtgtggtggcgggcgcctgtagtcccagctactcgggaggctgaggcaggagaatggcgtgagcccgggaggcggagcttgcagtgagccgagatcgcgccactgcactccagcctgggcgacagagcgagactctgtctcaaaaaaaaaaaaaaaaaaaaaaaacaaacaaaaaggaacaaggtctcttattcatttgttcattcagcaaacttcttgctcctacggtgcatagacaatgcttacgctatggctagaaagataaaagtttgaaattgtaaacacccatgcaaaggccttgtgagagtatttgtatttagcactcacaaaacccatccgactaagtggtggtgtttttttatgtttgtttgttttttgttttatttttgttttgttttgttttgttttgtttttgagacagagtcttgctctattgtccaggctggagttcagtggtgcaatctcagcttgctgcaatctccactacccaggttcaagtgattctcgtgcctcagcctcccgagtacctcgaatcacaggtgtgggccaccacacctgactaatttttgtatttttagtagagatggggcttcagcatattggccaggctggtctcaaactcctgacctcaggtgatccacctgcctctgcctcccaaagtgttgggattacaggtgtgagccaccacgcccggcctggtgttcttttgtgaggacattaaagctcacagaatttaacaggagcttagtttacttcaaattctaagcccatattcttttaattaatgcttattttacagaaaaatcaatcctgatatattactaataactagagtccatagtttgtattaaggttcactctttgtagtgtatagttctatatacacaaagcatagtatcatgtatccatcattatagtatcccacagaacagtctcactgccgtaaaaatttgtgttccacctatccaaccctccctcccccaactcctaacaactaccgatgttttcattatctccaccgttttatcttttccagaatgtcatatacttggatcaatacagtgtgtagctatagctttagactggcttcttccacttaggaatatgactctcagtgtcttccatgtatttttatggctcgatagctcatttatttttagtgctgaatattattccattgtatgtatgtaccacagtttatttcttcatccattaagggacatcttggttgcttccaagttttggcaattatgaataaagctgctataaacatctgtgtgcagccaatattctttttattatattagaactttttttttttttggaataaagattgctctctcccttggcggatttctgatatcagctgagacattaataacttccatttttcctatatttatgggttgtgatgtgtttgtaaaaggcagtgagagtggccagcagggcaggccccagcaccgtggtggctaaaaatgagtgggaaatcagacggtagagaaagaagaaaacagacagaatgcaaaccagaacgtgaaaacaggcatcctggaaagcagatctgcctgcagatgtgttttgtttggtcagcctggtgttttaaaagaaacagagttagtcgccaccctataaataaagatgtttcatgtaaaaatacacaattctggcttttacgaaaaaactagaaaatctgccactcttgggtacacttctggcatgacgtcatctgtctgcactgagaggcagctgccccatgaactagaagacgtagttgcgtggtttgtcatgttggaccctctccccaccccggcccacttcacagcatccactggctcctataagcatttgaagttttcctatcacaaagtaagtctgcacatccaccgaaagttatgctcatgtgcagactgtaaaccgaatattgctgctgtcttgagtcacaagaacagaacctgttccttctacacatactcaacatcagctgtgagtatatagaagataaaaattaaaaatgaggaaacagaggcaatactcaaaatctggggaggagtgtccacgagaagagaaaggcggaatgacgcatgctggcctaacagcaccaaggctgagcaccacggccgctctgcttttacacataagaggccaaagctggtggaaagagaagctgaacctgacgggaaggaatgggttaataactcaacaggtcacagatgaaagtgtgcacctgggggctggacacagtggctcacacctgtaatcccaacactttgggaggccgaggcaggtggatcacttgaggttaggagtttgagaccggcctggccaacatcgtgaacacctgtctcttctaaaaatacaaaaatgagccggatgtggtggtgcatgctatatcccagctataatcccagctactcgggagactgaggcaggagagtctcttgaacttgggaggcagagattgcagtgagctgagatcacaccactgtcctccagcctgagcgacagagcaagactctatctcaaaaaaaaaaaaaagatagaaagtaggcacatggtatcaagaggattgatatgttttgatatgtaagacagacatatcttctgtggcaataggaaaaagttacatacccaatgcattattcttcagcaatatgctagttgagttcatttactggaaatgaagggcctttttaaggttcagaataaattatatactcatccagtcatttattttctgttcattaagctggtatcaaaggtatgaaaactgtaccagctataatacggattttcttgttatgtttcttcctccttaatcaaaaagatgtttcaaaagccttctaagtagctgattttattttctgcaaagtatatatcgggatattgctaaggttaaaattctgagagtcaatgtacaggttttctttgggaagtacacaaattgctgtcaatttatatctttctaactcttcaaatttggggttagtcgttggggttgggatttatagagtttttctacatttcgggccttggagcatgagtgggcagttctcacatttgccatggtgagtgtcacgatctggttccaaaatggtgccatttataagggacaactagaccaaacgcccaacttgtccctctctggctttagggattctcagcacacgacagtctatctaccgtgggaaatggtattgaaataggtcatgctctggatttggcgactacatgacttttccagcatttggatgaccataaaagccaaatcctcagcagctttctcacctgtaatagtgttctgtggcttctcattctgtcttcacaaagacaggagacaagacgttgctacaaatcatgctggtaagagtcacacgactgtggaacaaacgagagacacagtgttcttcagaatggagagaacagtcaggttctcagcccaacgagggttctgctgtcctttccctttgtaatgttaataggggggtgccccctcaccatctgaagtccaggtgaggaggtggctggcaaggaaatagaaaacgatatgccccatagcttttaattctggctggatagaaaagcattgctgaagttggaggctgccagcttcaatgagcaggttttttttttttttataatgataataataataaaacttgaaaaaacatgaaactcgggtacttggaaggcaacaaagctcccaaatggcaattataccttaatagataagtaaggttgcaatgattgaatatttgcatgcctttagcataaaattcaagccaaagctatcattgttctctacctcgatatcattaactaagtcttctacaaagagtagcaaagcgctttcacatagattggaatatctaataattctcagtaattttaactcggaattttaaaactgactgctgctgaggaatctttatttgctgaaacgtttgctgaagaaaatagcgtttgttcacttaatgctgaaaccgtgtcataggtggctggtttctctatcaactttatgataataaactcaatatgatctgctgatcccacactaattaactgaactctcacgaaaggacttctgcagaaagtcttaaaatagggatgtcattcttccttgcaagtaaaatatccgaaaagtaaaacaacggtaacactaatggattaactttcaaatccaatgcataacatcctggtactgtagcatggaaatttctgaaattgctagatcccctcaattgctatttactgctacataacaaacatagaaacaggggctgatttttttttttttattagagtactcacttaaaatttttttttaacttttaagttcaggggtagaagtgcaggtttgttacacaggtagacttgggtcatgggggtttgttgtacagattatttcatcacccaggtattaagcctagtatccattagttatttttcccaatttgctcccccgctccaccctccaccctctgttagaccctatcgtctgctgttcccctctctgtgcccatctgttgtcatcattgtgagaacatgcagtatttgcttttctgtttccacaatactttgctataaggataacggcctccagctccacccatgttcctgaaaaggacatagtcttgttctttttttatggttgcatagtattccatggtgtatatgtaccactttatatactcaaaggaatataaatcattctattataaagacccatgtaggcatatgttcacaacaccaaagacatggaatcaacccaagtgcccatcagtgatagactggataaagaaaacgtggcacttaaaatttcttttcaggtgatgtcggtgatcagaggaactatctcatcctcaaagatcccgggatattgtatacagctcattaagcaataatgaaatcagcttgggacctgccaggagcctgggccagcgtagatgctttgtaatgttttacaatattgaatgggcactgaattgtaaatttaaaaaatcatgtttacaattggcacttcctacagataccctaaggtgccttccaagtctcccttgacttcatgagctcccatcctccttcatatctaggcaccttgcagttgcttaaagaatgatttttagcacatactattatactatctgcaattatcatgcccatttgttagtttgctcaccatcggtcttgccctcctaaaggatgcacagacaagaaagaagggaacagagaacacgcagtgagggaatgaggtggcaggtacttgggtgacagttgtgttgtccaggtaaggttgacattcattcattcattcacttattcatttagtcattcgacaaatatatattgaatccctactaagtgccagtcttggtaatagcgcaggtagacagtcaaggctcctgcccaagggagatttatccatttccatgtcagtcaggagtctcagttacaataacagatatttacttcggccgatggagacagaaaaagagtttaattgaaaagaccccgagtagctcacagaatcgctgtgaacatctgagaaccacatttggaaaaggaaccgtggatcagccagggtcccagtggaagcagacggcacactcaggataatttgaagcaagtttaacaagagcttaacaaaaatgttagcagggtgtgacaagggcaggaacagcaggccccgtgaccttaaagggcaaggggagaatgtcattaccagaatccagagaccagagagagccttgtagaggaggtgggcgtaccccgctgagacctccaatcagaggagcaagccacccagacgagactctgcaaggaggtaggctgggtgccagatgccccaaatggagacatcaaggagacagcaatggagacgtcaagggaaaccctgcaagaatgcaggcggggtagcaaataccccaattacagcctcctcctgccctcacacctcctctggctcttctcaatgaccgagcccaaccagaagccaacagggcaaaggaattcatggctaagaaaatgagactgacatcacaatgtatgtatcacaattttatgcagatacgttctaggtccttcaaagttctcatctgtttccattaaagagaaagttatctattttattgctcaatatattcctggaaattcttcttttggaattacctacagagtaaaacaatttattattcgtgtaaattgcgtggagaccagcactcacttcaatttcctcaacagcgccaatccttcctaactctgatcctcctgtatctctgacaaggctttgggatgaaccagaacacccctgtgcgtggtggataaacagctgtgaggacttcaactgtccttcctcttagatagaacatccactcatgcttaatacaatgtgtgattcactcattttctctaggggtttgttcaaagtgatttaatgacagagctgcccacacgcatgggattgttccagtggctgagtctggggaggatgaccaagccctccaaagacaagaacatgagctccactggagtctggctctggtcttttggggcagttcttacctatccatgctcatgaagtgggagaatgtagtgagataccaaatcatactatttccatgcccaggatttccttgtgcagaggaataatgttttaaatagaggcagtttatgtcagcaggtgcgtacggtggtattgtgtataatcaaaattcattctgaagatgtgcttagttgcacatacgttttattttgcatggttcactgtgcagccttgtgcagcaatcaccatgcatgctaaaatttggaaacactgagcaagactaaagaagagaaagctgggcgccgtggctcacgcctgtaatcctagcactttgggaggctgaggtgggtgggttgcctgagctcaggagttcgagaccagcctgggcaacacggtgaaaccccgtctctactaaaatacaaaaaaattagccgggtgtggtagtgtgcgcctgtaatctcagctactcgggaggctgaggcaggagaatcacttgaatccaagaggcagaagttgcagtgagccgagattgcaccgctaaactccagcctggcgacagagtgagacactgtctcaaaaaaaaaaaaaaaaaaaaaaaaaagaagagagaaaagggaagctgttacggagacccttggtcattgaaactcttctgctttgagttaattatcatatcccttacccgaggaaggatggataaaaaactctaaagtgttcctgtttgcctgcaggcatctcggcattcaattttatactaagcccctaaactttaaagctcgttcaaatttgtttctttttgaagactaaataggttagaggagttgcatgcagcatgagtatttaagttagtgtttttgacaacgtatggctctcaattaactccatgctcctcttctttcgggccacaaagttggaaaacatttcccagcttcctttgctgtggggtgtggtcatgtgtctaagaatggaataggagggaataatgtgtcctatttcaggaccagggcctttcagagagcaagtgagtctactccatgttctttttctacttctgctagttggaccgtggatgcagtgaccccttgatcatcaggcaacaatgaggtattgtgggaaggcagaaacacaaggtggaaggaacctaggctcttgaatcaccctgtggatgggagttccttggtaactggaacacccaccctatacttttatgaaaaataaacccctattgtgtttgagacattgcatttggggacttacttgttagagcagtttggtttagcctagctaaaatatgtatattcaaatcatatacatgttcaataataatttgtgtatctggatctacatgagtagttaagatcctttctggcttttatatttcaaattcacaaaaccttagaaatgcaggattgtttaaaataaaaccaaaagatggagctgggacataaacataccatctcagcccaataaagaaggaggaataatataggctgtgggcaaaatgttttgtctaaaagcagaggattgggtgtgggctttgctcctcccacctgaggtggaggagcaatttccttgggtgttggataataaaagagagaagatgagttttgctcctcaaggttcctggtgaaacttcttcctaagtgggaagcagcaagaatccagatcactagctggtggtgaagccaggaagataagacccagaattgtctctcagaaagattctacattctggcaatcattaaaaagtcaggaaacaacaggtgctgagaggatgtggagaaataggaacgcttttacactgttggtgggactgtaaactagttcgaccattgtggaagtcagtgtggcgattcctcagggatctagaacaagaaataccatttgacccagccatcccattactgggtatatacccaaaggattataaatcatgctgctataaagtcacatgcacacgtatgtttatagcggcactattcacaatagcaaagacttggaaccaacctaaatgtccaacaacgatagactggattaagaaaatgtggcacatatacgccatggaatactatgcagccataaaaaaggatgagttcatgtcctttgtagggacatggatgaagctggaaaccatcattctcaggaaactatcgcaaggacaaaaaaaccaaacaccgcaagttctcactcataggtgggaattgaacaatgataacacatggacacaggaaggggaacatcacacactggggactgttgtggggtggggggagggggagggatagcattaggagatatacccaatgctaaatgacgagttaatgggtgcagcacaccaacatggcacatgtatacatatgtaacaaacctgcatgttgtgcacatgtaccctaaaacgtaaagtaaaataataataataaaataaaataaataaaaataaaaaataatgtgataattgaaaaaaaaaaagattctacattcctcagtattgcctagaaactaccagaaagccttgaatcatgtggccaaatgactgagacagtggtcgtccagtagctaaatggcagacaacttgaggactagatgtgcgcaccccacccaaagcctgagcactatgagctcattcacttcaaccttttacatgacctcagaagcaaacacaaagagactgaggttaatttccagccaacccatagaaaatagcgtcttagaaaagtaattaagttgagttacagaaaaacaaataaataaatatttcttgatcaactgtgtctgtccactgggctttatacctactatttctgacactgagcaaaggggataccttaggcttaccagccagcagtgagttttctcctccatgtctcaactgaactcagcatcttgcaaaagaagcataggttcagttggatcatttctggtgctatctgggggctgcctttctcttttcttttcttttgtggcatggggagggacctactttcatgtaaacttaaatattcctaactcagtggatgcacttccaggggagactggctctggtgagtccttccacgggaattaacatggggagaaatacaggcacagtagcaaaaaattaacttcctaccaaatccttttgaatctaaaaagctatctgaaaagaactggaagtcagtgaacaacgtaaaagcccaaaaggaaaaaggaaacctttctgattcagcagtgaccaggcataaggatgctgacttccttggataaagcaaaaacggacttggtgtatcaatagaaccaacgtcttaatttactgtgggagatgcagggcccaagatgcctaaatacacgtatcctctagccaggactttctccacattcggggagttatggacaaccaaaaaaatcagaaaattgaaagaatacatcggaatcaaaataggagaaaagatgtgtagtgttcccagagcaaagaaaacataaatgtttgaggtgatggacatcccgattactctgatttgatcattacacattgtaaaccagtatcaatatatcacatgcgtgcccaaatatgtgcaactattatatatccacacaaaaattaaaaaggatttataaaacggtgtctgtgcttcttagcgtccttgagaagtgcagagtggttaagcaggaggttcaagtgacttggttcaatcccagctctgtcacttagtaggacttgctcaagttatttaatccctctaagcctcagatccctcagtaatcaaatggggataaatatgagtatctaaattatagatttgggagagtattaaatgagattatgtctgtaaagagcttaacgccgtgctttgggacatgctaggactcagtgaatgttagggggatttgcttatccttagaggggtacatctgtcgtggagacgggtctctactgaccacatccagcacaggcaccgccaaggcacacttctttgttcctcctttctcatttccccccatagcctcatcctcttctgatttatatgatatttctttacagatgttagccaggttgcattccagtcttcctggccttgaattttcatctcaccctaggctgtccatatgtagtagttaggtggtatgatttggatctgtgtccccaaccaaatctcatgtcaagttgtaatccccagagttggaggtagagcctggtgggaggtgattggatcgtgggggtggatccttcacaaacggtttagcactgtccctttggtgctgttctcacgatagagttctcacaaaatctggttgtttaaaagtgtgtggcacctcccccgctctctcttcctcctgctccagccatgtgagacgtgtctggtcccccttcaccttccaccgcgactgcatgattctaagtttcctggggtctccccagaaacagaagccactgtgcttcctgtaaagcctgaagaacggtgagccaattaaatatcttttctttataattatgcagcctcagccatttctttatagtagtgtgagaatggactaatacatcaggactgtttttggggcaagacacagaacacccagctcaagcttaaaccgacaagagagttgattatttccttttactgatgtgttcactcaaggtttgacccagtggctgaagctggtgccccaggaggaatctgatttctcttcctctcatgactgtgccttctacagtgtcagctttatatagttgcaaattcagaaaataaaaatataagatggccagttgaatttcagatgaataataaataattttaatgcaattatgttctaaaactacatgggacattttgcatggtacataaaatattttgtttatctgtgtttatacctggcaatcttatgactttacgtgtcctcaaccttcacctgtccctcactccacccccaaacccatcccatctctgttctacagattcagcactcagcactcttgatagtaaaacagctacagcatttccagattctacattttcaaacaacacacttggagagagagggggaaaaacagaggaagagggttctcttttacagaagcatcaggagatatctccttatcgctcattgactatcattgaggtaaacactattcaagaaccaattgctatgtccttggggagggtggagtggcttagatcagtccaggaccacctctgctgtgggcagcgagttaataccaccaaaccacatggctggtgaaagaaaggaagaagtgctattccataaggagagagatgggtgtgggtttcaaacaaaacatgtcaggggcttgacttgtactactgattgattgatttattgagacagagtctcactctgtcccccagactggagtgcagtggtgcaatctcagctcactgcaacctccgcctctggggttcaagcgattctcctgcctcagccacttagcacatacgattatactatctgcaatcatcatgtccatttgttagtttgctcaccatctgtcttgccctcctaaaggatgcacagacaagaagggagcagaggacacgcagtggcggaatgacatggtgggcacttgagtgatatagttgtgttgtctaggtaaggttgccgtgtgacatagctgtagctaattctgggtatccagagtaaaatccatttatttatttatttagaaacagagtcttgctctgttgcccaggctggagtgcagtggcacaatctcggctcatggcaacctccgcctcccagcattcaagtgattctcctgcctcagcctccctagtagctgggattacaggatcacgccaccacacccaggtagtttttgtatttttagtagagatggagtttcgcgatgttggctaggctggtcttgaactcctgacctcaggtgatcctcttgcctcagcctcccaaagtgctgggattacaggcgtgcaccatcacgtctagctaatttttgtatttttagtagagacggggtttcactgtgttggccaggctggtctcaaacaggatcttgacctcaggtgatccacccgctttgacctcccaaagggctgggattgcaggcgtgagccaccacgcccggcctgtttatattgtttaattctcaacaggaattttagctttgagccttattgagatcccaggtaccataaaaaagcaatttcttgagcagattcttcaagagcccactctgatgttttagcagctggccagagagctatggtgtggcacatggcatcagactttccctggtctatccgagtgaggtatattagtccacacacaacatatcatgggtgtctgagaagaagggtgtctcccagagaaataaactcaaggtaaactgagctggccagtggcagatgagtcaattgatcatggaagtgggaagcatttttatgggcatccaggcatcccctgtttctttcttttttttttttttttttttgagatagagtctcactctgtcgcccaggcaggaatgcagtggcacgatctcggctcactgcaagctctgcctcccgggttcacgccattctcctgccttagcctcccgagtagctgggactacaggcgcccgccaccacgaccggctaatttctttttgtatttttagtagagatggggtttcaccatgttagccaggatggtctcaatctcctgacctcgtgatctgcccgcctcggcctcccaaagtgctgggattacaggcgtgagccactgtgcccggcccatcccctggttttgacaatgatttgcctttctttcgctcagggcacctggattttcagctgaagaaatacatccccttcccttctcagtctagtccaagtgtgagtgtgtgactcagtcctggccagtcagggctttgcattcttctagatgcaggggtggatctgggggtggatatgctacccatgcagatgtagggaaacacaagaatttcactagggcttccaggaaatgccactgcagtgaatgtaggaaggtgtgagcttgacctacagaaggcatcccaataccacgtggggagatgctgtctgggcatggagataactctgagaaagggaggaatagcagaccctagtgacattgcttgagctcctgggtccagcaacacctggtgtcagaggctccccggacagtaccactgcatgttaatttacatgagatgtagaatcacagaagccttttttgctcaagccattctgggttgggttatctatctcttgcaactaaactcatgcaacaattaaaagagggatgcacaatcccaccaccttccgtctaaacaggacccgtttgctcataaaactagacacatgtgctggaattatttgactctaatcctttccggctggctgatcttgggcaagttatttaaatgccctgaacttcattaccctcatttgtaaagctgggctggttcccacttcatttacagggttgtttcaaggattcaagaagataatctatgtatagcagatagtacatatataaatatataaggcatagaacatgctagcaaagataattattattattataatcatcattatcaatagtaattggagcatcaagcacacatatttgtggaatgatactattcttgatgttttctgcaaaaatagaaacgttccagtctatgcctagaagttgcttatcctcaaattgagaaataaatcactcataatatacattggcttgtgaacacccattgggagaaatatcttttgagtggtgaagttatgtgactgtcctaaattaattcaaattgacatctgtgaagggaagggtaacgacccaggccatgtgttcactttttacctttgtgccaaaagacaggcattttgctagtcagtcacgtaatatgtgtggctggctttgcatgcagtcttttgttcattctttcattttctcatgtaatatcattgtgtaccaagcacggtgctaggcttgaagggtactggacatggatcacctacttttaaggaacttatagtgagataagaggactgaaaataagcaaacaaataaatctgctagatgaattcaaataataatacatgctgtaaaataaacaaaaagaaaaggtgggcgatgtgtgcctttagtccagcttcttagaagcctggtctgaggtggggatttgggtgtgcatgagtcattgagggaacactgtcaggaaacaattataaggatgtgagataatgaggtaagccaggatgtgtcttgggtagagtctagccgtggctgagcattagggcttctggagcattaaccatacagcagggttgtagacactccagggcctcttatctagtcatcacctttcagccgccctcagtaaggccatttccttcatggttaggtggctcctgaacattgcgagtcatttcccagagaaggtgggcagctgtgtgcccttaacagccaacactcactgcaggaggatctaggctgagcatcagcagtatccatacggtgagtgttggaagctcatctggtaatggtcagcatccttgcctgggtgacatctgagctgttgcctgaaggagaagaaccaggcatgagcaaacctgggagaacttgttccaggcaagggaggaacccactggttactgcaaaagccctaaagtataaataagcttggtatgttaggaaaaaaaatgatcaaggttggagcacagtgaagtgcagaagatgaagttggaaagggaggcaggatccagaccgtatcttccctgtagtgctgggagtgtgtttttaatcttagtggcaggtttaggcatgaaagttcataacctatcttacatatttaaggagaacagatggtaattagagtcagggatggagctgggagcgaggtaggaggctcttgcaatggcccaggtgtaaaatggaggtcatacagactaaattggcagctgtgaagacaggaggtggagaagtggatagatttgggaaccattttagaagaaaagctaatgtgacttgaaaagtcacattatttaggagcaaagctaatgtgacatttgtgtgtgagggatcagagaagagttcaagttgacttcttgtaatttgacttgagcaatggggctgaggttggcgcaatttactgagatgggaaagatgagggaaagagccaaattgggaagaactggaaccaagtgttttcatttggccatgctaagtttgagatgtgttagaccattagacatccttaaggaactatcagataggcagttgagcctgaaatgagtctgaaagtcatgggaaagtttgtgctggagataacatttgggagttaaagcttcgaaatgaaagaggaaagagtctaccacagaggcttgggacactctaaatttggggggttgagaagagatagccaaggagactaggaagtagtccttgaggtaggaaacagcaagcgagtagggtgatacagaaactgagagaacatagtatgtctgacagatgagggaggaaccactggataatatgcccctgagaggtgggctgaaatgaacaaagaggagcaaccacttccttcggcaccctggacagcattggtggccatgagaagggtggcttcaatcaagtggctggggtgacaactagcccagactgcacagagaagaacatgagagctgaacaagtgactagaagcttgttttaaaatgttcacaggaaaatggctgtagctcaaagaaggagggatctaaggagatttaatttttatttttttaatttcaacagttttttagggtacaggtggtttttggttacatggataagttctttagtggtgatttctgaaactttagtgcattttcactggagaagtgcacagtgtacccaatatgtagtgtttgtctctcaccccactctcaacctttccctgtgagttcccaaagttcattttatcattcttatgcctttgcatcctcgtagctttaactctcacttataagagagaacatatgatatttggttttccatttctgagctacttcacttagaataatggcctccagctccatctaagttgctggaaaagacattgtatcattcatttttatggctgaatagtattcaatggtgtatatacaccacattttctttatccacttggttgctgggcactgaggttagttccatatctttgcaattgcaaaatgtgctgttataaacatgcatatgcatctatctttttcttataatgccttcttttccttttggtggatacccaagagtgggattgctggatcaaatggtaggtctacttttagttctttaaggaatctccacactgttttccatagtggttgtgctaacttacattcccaccagcagtgtaaaagggttctaagtgagatttttttaaaagggctgtttattagtttgctagggctaccataacaaataccatagattgtgatgcagtttggctgtgtccccacccaaatctcatcttgaattgtagctcccataatcctcacatgtcatgggagggacctggtgggaagtaattgaatcatgggggtgggtttccctgtgctgttcttgtgacagtgaataagtctcatgaggtctaatggttttataaagggcaattcatttccctgcacatgctctcttgcctgctgccatgtaagatgtgcctttgctcctcatttgccctccgccatgattgtgaggcctccccagccatgtggaactgtgagtccactaaacatcttttcctttataaattcctgagtcttggccatttctttacagcagtatgaaaatggactaatacagactggatgatttgaacaacagaaatttattttctcctagttccagaggttggaacttcaagatcaaggtgctatcagtgtttctttcctgtgaggcctctctccttggcttgcagatggccttgtccctgtgcctttgcaaggccttctctctgtgtgtgtctgtgtcctaatctctgcttacgaggacaccaagcatattggattagggcatgccagtatgacctcatttaagtttaattacctcattaaagtccctatgtccaaatacagtcacgttctgaagtcctgaagggtagtattttaacataatgaatttggaggggagacccattttcagcccataacaggatactaaaacatattttcttgacaataaaaagggataaatcgatgattcaggagagagggagaaatgtcaagtggaggcatcattgagagagtatgggcttgggggcacctacagagggatgggtcttttttctggaaacccctggctgaaaatttgcatccagagcctgcccttggatgcccctgcctgtgatggtttcttgtgttctatttgtaaagggatgcaccgataaagcagaatatacgtcagttaatttcttatggtaatacccttgatcaaggcaaaggaccgtaattgaataagcaattatctttgaaaatattagtgcacagaaaagcataacaaatgaatttgctaattattcttccctgccaaaaacatcagctgatttagtctttagtagtaacattataaccctcatagatagatcattagcttgctaggtacctactgagttttaggcacttttaaggaataggcagatgtcccaaactcaagtttttacagggctgggaggggagcatggatgaggacaggcagccaggtaagagctgtgggactctggagagcacgtgccatgtctgaagcaacagcagatgttgtcaaggaaaaggtgggctcatggctgtctgagtggtctcgcaggaaatgccacaaatctgtatttttatgcataatctcttatgttttgaatactgatgagtaattccaacttttaaaacaaggcaacatggcccaagtaagatgagactgtctcattgttgtgaccctagagtctccagtttgtaatctcagacactgggtctttattgctactttcagcagcctgcaatctataagaaggagagtggtgtggtcagaaagtctatgcaagaggtgctcagaatataggacaaaggataacaacaactcatagttcagttctagatatcttttccagaacactcctaccctcccctaccctgttcaatgaccaggaggctgacagcatgaaccatcaacggcacccttggtctctggcttctggttggggttggggttggccaatggggagctccaacaatagagcagacaggaatgagaaagtcgcgtctgagaacgtattctccatttccctgagcacttactctctgcagggttaccgtgggctggctgtgtcctttgtctaaaggccagagctcccctccagtggtgcacttcacagagcaatctctctgggtcagagcatcctttacctttgcttcttcagacctcacggtgggaagtctgcttgctgttcctaatcctgctgcataacattctgctttgttgtgtcctgatattcctttactatactctgttcaaatgacccaacttgggtatcttttggttttgttttctggtaggatccagaaagaacttggacaataaggttgacaatgttctaagtgcctagcttacttcaccaaatgctatcttatctctattttgcagaaagtaatactgaagtataaagaaggcaaagagtttgcccaagatcacccaaatgtaagaggtggagctgagatttaaacccaggcaatccagctctaacttctgtgctcttgaccatatatggagggaagttagggagagaaagatctaaggaggccacagtgatcaggaggaccttaaagattaagagaagatctaaatcgcatcttgaaggatgggcatatagagagggagggaggaagggagaagggaggaagagcagatgccatgagcagaggaaggcattttggggatgtgtggctactgaggcacttgtgcttccaaaggattaaaatatacatcccaaagtagaggaaaagaaagcagaaggtgagtagcaagcagaaagacacctgcagtcagggttcttcagaatggaaaggaagtgtctgaatgtgagatgggaagtgtattcagtactgtgtgagctgcaagtgacagaaaatcaatcaaaaatagatgaagcaagagaaaaaagggacttggttcctgtaactgaagatagcgggaagatgcagcttcaaggatgttggcatccatggccaaggtaaggtcatcaggctccgtactctgtctcttgactgagtgctttcttcagtgctggccgtcacctgcaggcagccccatacttcaggtggacatcatccttaagaacttttctggtagggcaagatggctcatgcctctaatcccagcactttggaaggccaaggcaggtggatcgcttgaggccaggagttcgagaccagcctgggcaacatggcaaaacccagtctttataaaaaatacaaaaattagctgggcatggtaacacgagcctgtagtcccacccacttgggaggctgatgcgggaggattgcttgagcctgggaggtggaggttgcagtgagcagagattgtgccactgcactccagcctgggcgacagagcgaaatcctgtctcaaaaaaaaagaaatcctcccccaaaaccagtacattttggcgtggatgctgtgatcagggaacacttctacactgctggtgggaatgtaaactagtgcagccactaaggaaacagtgtggagattccttaaagaactaaaagcagaactaccatttgatccagcaaacccactactgagtatctaccccgaggaaaataagtcattatctgaaaatgatacttgtacatgaatgtttatagcaccataatccacaattgcaaaatcgtggaaccaacccaaatgcccatcaatcaatgagtggataaagaaattgtggtatatatatgatggaatactactcagccatgaaaaggaacgaattaacagcatttgcagtgagctggatgagactggagactattattctaagtgaagtaactcaggaatgaaaaaccaaacattgtatgttctcactgatatgtgggagctaagctataaggacacaaagacataagaatgatacaatggactttgggaacttgggggtaagagtgagaagggggtgaggaataaaagactacagatatggtgcagtgtatgctgcttgggtgatgggtgcaccaaaatctcacaaatcaccactaaagacttactcatgtaaccaaggaccacctgtaccccaataacttatggaaaaaaaaatcctccaaaacaaaacttttctttcataatggttcctacaaaatccaggaaggacctctgagctgccaggtgggtcacacactcacctaggggacaatcatgatggccaaagggatgtcaggcttccatggaccagccagggtcatgtgacacactggagctgggaaacagagttactcccatcagaaccatgtagactgagggtgggagtagcctgagtcaataaagaaaaagtggtttgaatgctaggaagctaaaagaacaaatgtccagtgttgtggtagatgggggagccaaggtggctcttgaaaatgggcaaaatgtggggcggatctcctggggaaatgtgattttggtccgaatttggcacctagaactataagcatggtaagtaatccaccacaccctctgaaagaactgtctgcacttcctcacccacaccctctccattgccctgggggtaagccccggtgtccctcccggccctcatggctgcgcacggagggtcctgccgttcgggctccccatggcttctgtgatgccactctcctcttctcccctcatgtctttcaactccagctgtcctggcctgcttggggctcctcaacaccctcccacttcagggcttttgcggttgctacactttctgcttgtagtgctctttccccagaaatccacatgctcagtccctctcttccttcacatgtcatgttctcagccaggtcttctcaaaccagcctaacccaaatttctacctcctcccctcccaggcacagctgtccctcttacaatctttctcttctactttgtagcacacatccctcacaggactcatctcattcatgatctcttcccaagtataatataagcactgcaatgggggacctttgtctgttacatttactgcctggcttggcatgtagtaggtgcccaataaataggtgcactgagtgactgaatgaactcccttttcaatctgctctgagagatttttgtcttggctcctctatgtagacttctcttgtgaaggccactgatgatggcctttgtgctgccatattggatggtcatttcagtactcgtatctttactgaccaagaagcagcattaggcatagatgtctcctgcctccttgaaatatgttcttggcttagctaatggatgtcctacggccacactggggctcctctctcagcctccttggctcgctcctcctcctgtgcacagcctgtcaggggctgggtacctgtggatcaggacttggctctttccttctatccctctcctttcctttctcctcttccctcctctccccttcctttctcttctctcctcttctcttctcctgttctgcccttcccctctcttccctttcttttctcacctccacttcccctcctcttcgctccttctctcccctcttttttcctttccctttctcttatctcctctcccctcccctctcctctctatccttcccttcctctcctttcctcttcattttctcttcttcccctttttcccctcccctcccttccctttctctcctctcctctctctgtgccctctcaccagtgacctcatccagtttaccagcattaaacaggaccactctgccaatgagaccaacgtctgttatctcctatctcaacttttcagagttcttatcagccaacctcctacatccaatccattgcccaacattaagattgacctcctaaatgcaccacagatccctctactccctctgtctctgctatcaccacccaaattaaaagaatcatcacatctcacctgggtaagcaaatgtctccaaacagagctctacctcctctcactcttggacatcccagccccagtctgttttttacccagcaccagaatgacctttagatggttaccactccctggcaaaaagtcctccagctgcttctgatcacaccttgggatcaaacgaaggtcctagcaagccccacaatcaagccccttcctaagtctctgggctggtgccatttcatcccttctcttcctcattatactccagccacactggccttcttttattctttgaacaggctcatctggtccctgttgagggttttttttctttttctttttcaggcaggagaaagaaataaagggtattcaattaggaaaagaggaagtcaaattgtccctgtttgcagatgacatgattatatatttagaaaaccccatcgtctcagcccaaaatctccttaagctgataggcaacttcggcaaagtctcaggatacaaaatcaatgtgcgaaaatcacaagcattctcacacaccaataacaaacaaacagagagccaaatcatgaatgaactcccattcacaattgcttcaaagagaataaaatacctaggaatccaacttacaagggatgtgaaggacctcttcaaggagaactacaaaccactgctcaatgaaataagaggacacaaacaaatggaagaacattccatgctcatggatagtaagaatcaatatagtgaaaatggtcatactgcccaaggtcatttatagattcggtgccatccctatcaagctaccaatgactttcttcacagaattggaaaaagctactttaaagttcatatggaaccaaaaaaagagcccgcattgccaagtcaatcctaagtcaaaagaacaaagccagaggcatcatgctacctgacttcaaactacactacaaggctacagtaatcaaaacagcatggtactggtaccaaaacagagatatagatcaatggaacagaacagagccctcagaaataatgctgcatatctacaactatctgatctttgaagaacctgacaaaaacaagcaatggggaaaggattccctatttaataaatggtgctgggaaaactagctagccatatgtagaaagctgaaactggatcccttccttacaccttatacaaaaatcaattcaagatggattaaagacttacatgttagacctaaaaccataaaaaccctagaagaaaacctaggcaataccattcaggacataggcatgggcaaggacttcaagtctaaaacaccaaaagcaatggcaaccaaagccaaaattgacaaatgggatctaattaaactgaagagcttctgcacagcaaaagaaaccaccatcagagtgaacaggcaacctagagaatgggagaaaatttttgcaacctactcatctgacaaagggctaatatccagaatctacaaagaactcaaacaaatttacaagaaaaaaacaaacaaccccatcaaaaaatgggcgaaggacatgaacagacacttctcaaaagaagacatttatgcagccaaaaaacacatgaaaaaatgctcatgatcactggccatcagagaaatgcaaatgaaaatcacaatgagataccatctcacaccagttagaatggcaatcattaaaaagtcaggaaacaacaggtgctggagaggatgtggagaaataggaacactgttacactgttggtgggagtgtaaactagttcaaccattgtggaagacagtgtggcgattcctcaaggatctagaacccagacatcccattactgggtatatacccaaaggattataaaccatgcctctataaagacacatgcacacatatgtttattggggcactattcacaatagcaatgacttggaagcaacccaaatgtccaacaatgagagactggattaagaaaatgtggcacatatacaccatggaatactatgcagccataaaaaaaggatgagttcatgttctttgtagggacatggatgaagctgaaaaccagcattctcagcaaactatcgcaaggacaaaaaaccaaacactgcatgttctcactcataggtgggaattgaacagtgagaacacatggacataggaaggggaacatcacacaccggggcctgttgtggggtggggggaggggggagggatagcattaggagatatacctaatgctaaatgacgagttaatgggtgcagcacaccaacatggcacatgtgtacatatgtaacagacctgcacgttgtgcacatgtcccctagaacttaaagtataataaatttcttccctcttttttttattctgcattctgatctctgtgtcactgtttctttctttttacttggatctcagcttgtatagtgattttttagagaaaacctccaggccacccagtctaagttggtcctttctatcccattacctgatggtattttttgcacagtactttttctgatacttttcctccctcccttcctcccttcccctttgccttctcctttcccttccccttcccttccttcttccttccttccatctcccctgttagattcctagttacatgaaagcaggacttttgctagccctgtctcaacactctggcttagaatggtgcttggcacatagacgctcaataagtcttggatgaatgaatgagtgaatgtgtttgtgagatgtgaggtacgttcacggaggccgtggtagtgagagacagaactgggagacagagtatcaggataggatgacccacgaagaggaaagatgagcctggagaccttctcacttaacaaaacccccccagttaccactgttctagggtctgctttgttcctgcctgttccgctccagctcacttgcatcctggtctctcgtgtctcgttattcggtcgcagttgcatgagcttcctcagagcagaggctggatctcatttttcacattatatacagaacctagctacttgttagtaaaaacgtgggaacagggcttcagctattgccacttaatgatggatagcaatgcaaccaaggcgtctgaaaggaaaggcagtgacgtgaacctgagggattccatctgatgggtgagtgacagtggcaggcagaacagaatgggaaaatcaagcgagccactcgggaaaagccgcaggccgaggacgaaggggtctcctaggaatctgataagctctggcttttcagagtctcaatttgtcaagtctcgattccttcctcggttccagtgtcctgtatgcagataaggttgtcctgcttctccctttgttcttttctcatttttcttctagcaataatttatcatctgtatctctgccgaaaaggtaagtgttgtcaagagcaggttcctctaagcaaagctacaaagctatattgagaccataagctcagctctcacaaatctggtctggttaccatagaaaccctgtagaacacagggtaccacttgagtttaaattctcagactcaagagtcaaagatgacttctggaaaattaaagtatttagacaatttatttgggagatgactgtatcgttatacaggatggcattagtgtgtcatgtaatcttaccacatatttcccctgaaaacaatgcgtgccaatgtaccgtacgtacacaaatgccgtttgaatcacgtctagacaaatctccatcaattagtagaatgaaatgcaattgcatattccaagggcttcccttggatctttgggagtgcattacatccttacagtcaaagttccatattgtgtgtgtgtgtgtgagagtgtgccaagagaatggctgtatcaggcagcttgcagttcaagttaagtcacaagaattatgcacttttttgtttctctgtgcaactgggttctaaagtgttccattaacaaaaggctgtggtgctttcaaatcagtgctcatcctccaatttggtacatgtcaaaatattggcatccctttggaattcatcacagataattacagtcatgacaaggtttaacttgtattgttaaaaaatggttgttgttgagtatcttgcaatggcatctctgtgtcttgctttctgatgggcaggaatgttcctgccacctgtggttgcaccctgtgacggctgcctcaaaggcgttattgttaggagcagagtaacataataacgtttgtgttttatgatgccagatacttacatacaaagatttttttggagtgcatttttcccaaagcaataggttttaagtaatgtttgtgaaactcacttgaagaaaaaaatcaggccatgttttgctgggactgactgatggggatttgttaggaaaaaaaataagacacccagacaccttgctgccggaagactgggagccccctccgtggattttcaagatcattagtctcagcttcgtaacaccaaagctaaaatcagaacagaaccctttcctgtgattctctgacttgaaatcttagacctctcctatagaagagacctcagaacagtttttcttttttctttttgatttttttttaaattttactttgagttctgggacacatgtgcagaacatgcaggtttgttacacaggtatacgtgtaccagggtggtttgctgcatccatcaacccatcatctaggttttaagctccacatgcattaggtatttgtcctaatgctctccctccccttgccccccaccccctaacagggcccggtgtatgatgttcccctccctgtgtccatgtgttctcattgttcaactcctacttatgagtgagaacatgctgtgtttggtgttctgtttctgtgttagtttgctgaggatgatggcttccagctttatccatgtctctgcaaaggacatgaactcatccttttttatggctgcatagtattccatggtatatgtgtgccacattttctttatcaagtctatcattgatgggcatttaggttgctttcaagtctttgctattgtgaacagtgctgcaataaacatacatgtgcatgtgtctttctagtagaatgttttataatcctttgggtatataccccataatgggattgctgggttaaacagtatttctggttctagatctttgaggaattgccacattaccttccacaatgctccaactaatttatactcccacccaacagtgtaaaagtgttcctatttctccacataggacagtttttctacagcaaagtcggggtgattggatgccaggtactaaaacatctcaagagtgatgctacaatgaggaaaagaatacccaagccacacagtgctttgctattccaagtgtggttttaggatcggcagggaccgcatgccctgggcacttgctgggaatgcaggatcctaggcccaccccagacctgctcaatcagggtctacattttagacagatcagtaagttgtgtgtgcatcaaatctgagaattactcctccagcaagccaaggaaccaagccatcagtaagtcttgactgtaatactggagagtcacctacaagcttcactggatgaagtcactggaaacatgtttccattgaattaaggaaattaggaattaagttcctaatctgaaattccacaaattttaacaatgcagtcccatgaggttcttgataaatggggtatttctttattttgtgaaacaatattgttattaagagtatttgcattttttatatgtgttggctgcacggatgtcgtcttttgagaagtgtctgttcatgtcttctgcctgcttatttgttttttgcttgttgatttgtttaaatcccttatagattttagatattagaccttaattggaggcattagggaaatgcaaatcaagaccacagtggaatagcatctcacactagatagaaggctattattaataagtaacaaaataggccaggcacggcggctcacgcctgtaatcccagcactttgggaggccaagatgggcaggtcatctaaggtcaggagttcgaaactagccaggccaacgtgatgaaaccccatctctactaaaactacaaaaattagccagctgtggtggtgcatgcctgtaatcccagcactttgggaggccaaggtgggtggatcacttgaggtcaggagttcaagaccaccctggccaacacagtgaaaccctgtctctactaaaaatacaaaaattagctgggtgtggtggcatatgcctgtaatcccagctacttggcaggctgaggcacgagaatcaattgaatctgggaggtggaggttgcagtgagctgagattgcgcccctgcacgccagactgggtgacagagtgagattctgtttccaaacaaacaaacaaacaaacaaacaaaaaacaagcaaaagaataatagacgctggtgaagctgtggagaaaataaaatgcttattcattgttgatggaaatgtcaattaatttgtcaagcactgtggaaagaagtttgaagatttctcaaagaacttaaggaacttaaaacagaactaccacttgctccagcaatcccactgctgagtatatacccaaaggaaaataaatcagcctgtcaaaaaaaaaaaaaaaaaaagcacatgaactcatacgttcactgcagcactactcacaatagcaaagaggtggaatcaacctaggtgcccagccatggtggactggataaagaaaatgtggtccatacgcacaatggaatattatgcagccataacagagaacgaaatcatgtcctttgcagccacatggatgcagctggaggtcattatcctaagccaattaatgcatgaacgaaaaaccagttaccaaatgttctcatttataagcgggagctaatcgccgggtgcccatggacataaagatgggaacagtagatactggggaatagtcgagtggggaggtagggaggaaaaaactgtctattgggtgctgtgctcacttccttgatgatgggatcgattgtaccccaaacctcagcatcacacaatatacccatataacacacctgcacatgtacccgctgaacttaaaacaaaagttgaaaaaaaaaaagagtgtttgcatctgatttctaattcaggagtcaatatgtttttatgttgctgcttgtaggtatgtgaaaataccactaatttagacataccctatacttcctgcagttaagaagatacattctcttggatgtgagtttcctagttgtagaaaaaaaagattaaattaccagatttattctaaaaagatatggagctgagatgatgccggaagtcttatgcgcatgagagttaaaaggaactgggagagtctctgttccccctgtgtctccatccaacaagggcagtctttcctcaaacctgccagcttttcagtggataggccagaacaatgtgtgctctgatgtatggagcccctgcagcagcattcttgggtctagagtttatcagcaaatagaattagaagcaactttagttagcacatggatagtgcattaaactagcattgagatacatggcgaggtacaggtcttctctccccgattccagccatggttctgagtcttttacagaggtggtatcagtctggtgcccatatggtctcacaaccctttaaacactgctcatcctaccaatcctacttcctcatcttttttttaaacaaagagcagtaggccttttcctggcaagaagatgctctggaattgttttacaatatatttattttaacaattatttggccgggtgcagtggttcacgcctgtaatcccagcactttgggagtctgaggcgggcggatcacaaggtcaggagatcgagaccatcctggctaccacagtgaaaccccgtctctactaaaaaatacaaaaaattagccaggcgtggtggcgggcgcctgtggtcccagctactcaggaggctgaggcaggagaatggcgtgaacccgggaggcggagcttgcagtgagccgagatagcgccactgcactccagcctgggcgacagagcgagactccgtctcaaaaacaaaaacaaaaacaaaacaattattttactacaaatgataacaataatgaaggtgatgtaaaatatctttgaaaatatatttattaaattaaaagttgagtccattggccagatacagtggctcaggcctgtaatcctagcactttgggaggttgaggcgggacgattccttgaggccaggagtttaagactagcctggtcaacagtgtgagaccccacctttttaaaaacttaaacaattagccaggtgtcgtggcacacagctgtaaccccagctaattgggagactgaggcaggaggatcacttgagcccaagagttcaattgctgtagtgagccatgattgcaccactgcactacagcctgggtgacaaagcaaaactcagtctctaaaaaatataaaataaaataaaataataataaaaataactcaagtctatttaaagaagagcactaagtttataacagaaataggaacatagaactaccccaaatcatgagacttatacttgaataactaaaatttgggtaatgttgctgtgaggaaacaatgatatatctattcactctctagtagagacatatttctgtgcttcttgctaactctgacaagaaactaaaaaacacaaactacacgctcaggaaacttcatatcccctggagctgagacacacaaaataagtcattctagacagataccaggtagcccagacaccacagttcaggggatgctggaataaggagatcaaggtcagggccgcctgcattccatgtttgttcagcaatcactttctggcttctcccgggctcaggtcccatgtgagttgctaaagcaatgcctggaagcggggatctcacctgcctggaggagcaccatctagaggtgtcccagaaaaaataaagaacgagagcaggtcccagaaataagagagaataaggttgctacgtttggggtcttgacattttcagacaccttctagagtgaccccaacaagcaagcctagagggctgtgaggtcgagttggaaatcaagagtgatttggtagataggaacagcgtgggccatgctgcagtccaggcgtgtttagcaggagttcaatctcttatcccgcagtctgctttccaggcacgtggatgcacaggtttgtttgtttgtttgtttgtttgttttctcaagacagaagcaggtcttccaatattaacacatgatagccaggttcttcccccaaactagatttcaccctccaccctccctaacccctaaaggaaattgccaaggatttgcccactcggggaaaatgatacttatgtaattcattgaccattcttccacgtggaatttctcttcgtattattacccaaagataaaacgcttgccacctaaggcaccattttcttgaatagcagctttcatgggaaactcagttatcggcaactctgaacgttatactgtcaaagcgtggagagcgtgccaatttttttctcagatagctttcaaggacacttacaataaatatatgaaagagagctacttataagccagggatttatggaatttgtcagttgtttgtgtccctccctttgtccatagcattaagatttgctgtttgtgcggaattatccactgacctaaatcctagcaagctatcaaagtctgtttcccagataaagtcgtgcaggcgtgtgatacatttatcagttccaggcatgcagccacttcatggaggtggctttttgtgtctcctctcagcaccagacaaagaggaaactacaaatgaatcacagcccacttacgccgatagttttaaacaattactaagtgtttattatttaaaaagtacaataacaggatccttgcctcctcgtttcctgcaaacttttaaagtataatgacatgcaatttgtttacctaatgcacagccctgagaattaatgacaaggccaaacggatttattgttcttacattatgcaaaatgctctgggtacatcatgcctcattatgcaaaatcaaaaccattgctattcacttgagtgtgtctcaatgtgtccgcaccaggtgcccttcgtgactggctgctgtgtctgtcagaatcctgctgcctaaaacttcaaagtaagaaagtaacccaagtcttggaggagattctaagtctgaccaaaggctaaggcttccaaagccagcataaatggacgagcacaaaggggcttaataatataaaggtgaatttcagggccttagaacatgggtgtgggtgagaacagtgggtgtgtggagaacaaaaactatggaaacaagcctggctttttccttttcttttattttttctcactaaagatatttgtgcttgtgtgtctgagtctctttagaagaagagatgtattttcctcaacaatgaggtccagacttagaggtatttgtgtcaaattaaggcttccactgtattttgaaatgtttgatatgaaaaagttgtattcacacagagatctactcttactgccacaaagaatttcaatattaaatttgtcgaggaaagaaaaggataccatttcaacggctgtccagttttgaatgcttgtacaaatgatttttaaaattctttatcccttactcattgctgctatcaggaatttgaaagaattattaaaaatgatttgatgtagccatttcaggaataaagccagatatttaaaagttgtgctcagtcatgcaaaccaaagttgctcatttaaaaatttaaaagattacatttgaaagttagaaacaaatttagtatctcaattttttaaattgcccgtattgtgtttttcttatcagaatcatatcatatgaagaaaaaaacaacttttccaggaagcctcatagattctccggaagcctctcctatgtcctctggtgacactcatgatgtgaatatgacaaagtttggaaaatactgacccagaggatggatccttaggcttaagaactccctggttcatctcacggcgtcttttaaaactccactctctatacagagagcagcaaatgtcctaaatgaccaccagtcttctggttgcccacctttcttttgcagtgagaaactccaagcttgaatgagagatcggggagcccagaaccaagccaggaatcagcagaaaaggactgggtcaaggatgagtcttctcaaagacagacctcgtcttcagccagctagggtctggttctaactgctcactcctttacataagccccaagctcccaactccaatggaaacgatgaatgtgcattgatttgggtgttccctgtggcctctctgagaaacgcagcagccaagttcatatcgcggtgatggacttcctaggtgctgggcaagggagacccagggcacaatcatttcctggcctgggaattactcagtggtaactgggtcaccatgcacatgaaacgcagaccacactgaacatatacagtccaggctctgctacatcatgctgttatgtagctgctggggacatctggaaggtcagtgaaaaatctggagaagcaaggaagcgactggttcagaaagaagccaccatgatcttatctcatgccatgcactccaaggctccatcttaacccccgtcttgcatccgggtctcagccaggcttggtttcaggaggagaagacagaactcttgactgtctagggccaagaagccatttgactgtgtttgaattcctctttaggaaacatgaaatgactgccgttcaaatgaggtccctccagcattaagaacttctgtgggctttggctctgggaggaataaagacaattttgccttttaaaagggaccaagcttcctttcccttcaaggaaaccgctaaacgggtcccaaactgtccagagaataaaagaaatgcagagaaattagcaggagacaggatacgtgtcatgggtgttaacaactagcttaatttggggcaatatttagatatcattttcttcctgttgtctgactcaaaggtcacagacataggcctggatggggccaagaatgaagtggttgtgtaggtcctgaggccaaatgcaaattataaggactgagtggaggtgcgcctccaggcttcgggtggttggtatcaagcaggattccagccggtgtggcagtttctagttttataagagaactcagaaatgcaaactttatgtaaatttttcttatgttaaatttagccacgaaatttaattaaaaacaaaacaaaacacacaaaaagaacctgtgcagcccaaatacaacatttctgactcatgggacggcagtctgcagttttcaatttaaagggaaaagttgatatcacctaattaatgtttaagaaacacacataggaaataggattttctcttggaggataacagtcagtgcctaaattcagtggagtgataacacgttaagtaagtgtaactctaatggaccttggcgaaatactaaattctgtggcaaaggattcttttttctacttcctcttcttcctaaagaattttttttgggaatggggactttttacttatttaggaaagaactgaaacctgcaacagaagtagcaagccacattttacatcctttgaaaaagaaagtaaaaatatcgctcttctctaatagcgatattctttaatatttgatttccttaacttgatttttttttttgaggggggtataaaatcgaaaacctacaaaatctttcagtagagagatctggtaatgaattagagtgaatcctttaagggaatacacccattggcaatcccaccatcctcaaatgtggagctatattctcacgagcgaaaactgggaaactgaaaaaaatcttccgttcattcttccccccagcactgctgcacaacttagaaaaatcaagaacagcacaagcgtccgatggtgatctcatgttttacgcagccacgtgcaattcacttctaaatgacatgacttcataaaggacagagtcagataattccattgtatctgaagttaagtatgttaatgtggctgaattaattttcttggtgttaaagtgcaaactaggctaataaaagtgacacattgacttttccagagaatgatgttctgcttataaggaatggcagcgtaaatgaaaattagcctcaagacaatgttaattacactttatccattagtaggagggtaattgaatcactcatttcacagcaaagaaaaccctgctgtcttcataaagggaaactatagtatttaatgttctaattaaggcctaacaatgtagctgaatatagaggaaagaaagtgaaatacacatagtacaggagagatagaaaccatgagtgccatcttgttgaattcttttagtactctcttcatccctctaatttgtaactagacatttcataaaaggagtgaaagactggtgggataattttaacataaagattctgatctataaaacatgtgcaatatccatgacacatgcatttaccctgggaatgcacaaaacgggtttattactgcagatacgatttaaaacaatatgattacacatagtgtttgcagtggattcataatataagatttgcttttttccaaaacaaataaatgaaaatcagatgattgtttccttatacaacagacttttccttaggacgttcactaagtcaaaagcaccttccatactccaccacagaaagtgagaagtcaggaactatattattagctcttatgggtctccaggttagtgactgcatattttgggatttctcagcctccataagtatgtaagccatttgtttgtaatatctatctatctatctacctacctatcatctatcaatcatctgtcatctatcttctatcttagcttatctatctaattatccattttatctattcatccacccatttattcatctatctatcttctattatctgtcatatatataatatatatacacacaaacatatatcctattggttttgtttctccagagaaacttaatacaggattctagtatgatgtcaacttttggaacttcctaggtctcttggtgggctggtaatatctaaggtcattttcgccacaatattttgaaatttattttcttaaaatgtggtccatctatactctttactcctttctctggtgaatatgaaacccccaggaaataaggccactttctgagattcttcttacttctatagtaccaaccaggccttctttgctaatcagaaaataactcaggatagcaattgtcttcgccatactctattctcagagaaatggaacagtcattaaggcaggtcaagaattaagagctttgtctttcactgaatacatacccaacggatgccccatactgtcctgatccctactttatcttacccccacttcagatttatagtcttaaccaggaaggtgtcatttgtaacctccatctggtcaggatgtgcacacacacacaactgtggcacttctatgtttcaggtttttttgtttgtttgtttgtttttttactgtcaatcaataaataaattcttttttttttaaaaaaaaaaagaaagaaaatgagaagtctgctgagcagagttcctgccaaggctgcttgtggttatgtcttgacatcccagaggcttgttcgtgaattctgttgatggagaggcatttgttttgcactctttggcataatatggttaatctacatcataaactcatggagaccagaaggaatcttcctgacgcccccgtagcagaccacactgcttatctgtattcagttatcctctatgattgcataaacagtataattaattcttccccaccctctctgcatccactgtgaaagctggatgataacagctcccagctcccattggccaaaagccaagacctgcctttggccagccagtggaagctgtttctcctggtattacctgggaggttatggctccctcaaacctcctcaaactaccgccaaagcctggttgaaagggaaaacaaaagaccaggtgtctttcctcaatggggctcaactcagtgatggcatctatgctccagccctccctgtggggttggtggagggtagacctccgtgaacccgctccattgcctggtttcctgccttgcctgattcccttccttgtctccttataggtttctcctaagaatactccctccatcaatcccttccacaagaaacctcatcccagcctccactcctacaaaacccaacctaagatgaagtcagagctacaacatccacaaccaaaagatgagataagagtgaggaaacactgaggtttgctgagaaggcagctactacttgtctcaaccctggtctgaattctaaggggaataatggcatctccaggtgggattgggaatatgagaccagagggagcttatccctccccctagttccaacccaggcagagcccggttgctgacaaggctcatagtacccctggaagacagcagctgagcacataaaaaaatatctgcatgaaagtgaggttggggacagattcagagtttcctgcagctcccaatggcatagcagtgaaagtcctcacatctgtagatggcacagatctgaggtccagatgaacaccagctacgatccgggctgactaaaaaccgaagaccaggtggaacgattttcctggagatttggcaaccctctcctgacctccatgtgtggcaataagaaaactgcactgagtttatattcaatcctgaggcaagtgtgagtttggattttggatcatctgggaggtaggtggaatgtaggtgaaaatggaaattaagttgaaaattagaaaactccacagaaatttacatttcttgcatatctgagttactgagatgacggttgtacccaggagacctcaagcgtgcttcagatcatgataatctattggaggacatagccaaaagcacaggcaatggaaaagaaagaatctcaactatgattgctggactggtgatgcttttctcactcgtggggccagatgaatgcactctggtcagtaaagtcttgtggtcatcatgtctgcctttctggtcatctgttccagaatgcatgagttttctgggtacgacaggataaagaacttctgattcccaagtcttctcaggggctctacttatactaagtatctgaggggatttgccaggcaggagctgatacctatagatctgtcattcactgactcattcattcattcatacactcatccattcaatttttcatttgggcattcaggaatcaaataactactttggagcatctacgataaactaggcattgttcttggctctgggcattcagcagtgatgacaacagaaaaggagtgactctggtagaaattaccttcgaccttctcactgcaacctctgcctcccaggttcaagtgattctcctgcctcagcctccccagtagctgggattacaggtgcatgccaccatgcccagctaattgttgtatttttagtagagacgggatttcaccatgttggcgaggctggtctcgaacgcctgacctcaggtgatcctcccacctcagcctcccaaagtgctggaattacaggcatgagccaccacacccagccttatattagctatttttaaactcttgtctcctaaatgttttctcatgcttgcataaatataaaaacatatctctactgaattttttttcccaaagtattgaatgattttcaagacatgtctttgaaaatggaattgtcctcccttcgacatgatggggagacagggcaggtgaggcagtgactgcagatgattagggagcagggctcctatactccaacactctcaggccgatacacaagatgagaatgtccactgccctaagacagaggcattttgtccaagtgcttctgttctctccctcactgacactgtgcctctggtggaagtgagcctccaaagacagcctccgacaattcctcctctctgtgtacatgcacactgtgggggaggagctaacttccccctgaccccttgaatatgaacttgcccatgatcatttgaccaatggaaagcactgggagtgacattcaaaagcttaagccaatgagcagcttctttcttattcttgaaactcattgttagaatccagccacgtgggaggcacctgatggaggacaaggctctcctgtgcagccttggctcagctcacagctggcagccagcagctggatgtgcatatgaggcctttagaccatcggggacatttcggcctaatctagtccccggatgcctgaagatccatctacatcatctgaaacaggtgcagccttggctcagctcacagctggcagccagcagctggacatccacatcaggcctttagaccttcagggacatttcggtctaatatagtccccagatgcctgaagacccatctacatcatctgaaacagaaaaccactcagtttgtctcagtcaacttacagaatcatgcaagaataataagagtcattttaaggcactcagtaatatttagctaaaataactctttaatttctagtgatgtctctgaacaaacttgtaggttgaggattctttgaccacaaaaccatgacatctgccacactggccttcagtgtaagatggaatggaatatggattcgtatttgtccccacaattccatgacaaggtatataccctgaataattgaaaacaggtgttcaaacaaacacatgtaaacatatgttcatggcaggaccatgtacaataggcaagggtgaaaacagtccaaatgcccattggcggatgcatggattaacaaaatatagcatataaatacaatggaatattattcagccataaaaaaggaattaagtgttaatacatgctacaacatggatgaacctcaaggacattattacggcaagtgaaagaaaccagacacaaaaggttgcatattgtgtgattcaatttgtaggaaatatctggaataaataaatccatagagactgaaggcagattggtggtgccaggggtaaggggaaggagtggggaaagactgctaaggggtgcatggctgtaccgtggagtgatggacacgctttggagagagatgtttgcacagcattgtgaatatacgaaatgccactgaattgttctcttcaatgttaatttgatgttatttgactttcacctcaataaattatatttacaaaagcaatggaggttttttcctatgccactgagtcaacatccccaagaggggatgtggccctttgtgtaggaaggacaggtagtgctgcaatccaagattgagaccatcatgcagaagcaaatcaacaggaagatgagagagaggctctaggctgggtgtggtggctcacgcctgtaatctcagcactttgggaggccaaagtaggtggattgcttggggtcaggaattcaagaccagcctggccaacatagtgaaaccctgtctccactaaaagtacaaaaaaaaaaaaattagctgggcatggtggtgcatgcctgtaatcccagcgacccgggaggctgaggcaggaaaatcgcttggacccgggaggcagaggttgcagtgagccaagatcatgccattgcactgcagcctgggtgacagagtgagactgtgtctcaaaaaaaaaaaaaagagagagagagagaggctcccattatcatcccagaaatgggataaccacttccagaccagctaccattggtgtattacttgactggggaaaaaatatactaaaagtggaatgactaaaatttactttcatcattgttttttcaaataagtttctattttgatatagcacagccatttacatttaaatcaagctgcctaaaatacaggtgtgaaaagtaactttttttttctccctccatcactgtaaaacatgtaatttcaacccacatcactcttctcaccccagtagtttctccattccacttcccccatcagtccatcacgacctgttgtcagagatgagtcttccaatctagatttgctttagtcacagtgtgttgtcgtaactttattaactacttctcacagcctcacatttctattgattcagataagatgctttttaaaaaaatatgctattaaatccatgattttcttcttgctaacaagaaagatttattttagatgaacggtttacagaaggctgtggcaaccaacctcctcagtgtccaattctggaaagaaagtttctctagttttaggttcattaggaaggaagttaaactaaaaataagacaactagaatttgagtttcagacataccagcctgccacaatctactttagatcattataggaaaaatagctgacggcaaagcagaaggagtacagaacccaaaatatacgtgggcattggtgtttcatgtatggtgtttaataaaattcagaaaacatatcaccatggctatatctgaagctgtgctcatcttcttatagttcagctgagatattttttaaggacactgggcatgggtagtctactgggattgtgaccaaggagacaggttcaaatgagtacattgtaggattgtttttaggcatgaaaaattaagagcacagtatatggctaaataaatagaaaggtaatcacactatgagattctgttgcagaagtgataatgttatgtgttcatcactgtttccctcctcctgggcacccaggaaaataagattcctcagcctctctcattcgtaggttgggagcatgtgctggagctccgggcaatcaggaatgtgagcaaggcttgacccatcatttctgttcagaatccattaagagcaaatgtgtgatcttagcatctagaccttaaagtgtaaataacattggccaataaaaggagacagggagccaagcatggtggcttatgcctgtaatcccagcatgtcgggaggccaaggcaggtggatggcttgaggctgggagtttgagaccagccaggccaacatggtgaaaccccgtctctactaaaaatacaaaaattagtcgggcgtggtggcgcatgcctgtaatcccagctacttggaaggctgaggcacgagcatcacttgaacttgggaggtggaggttgcaatgagctgagatcacgccactgtactccagcctgggcaacagagtgagactctgtcaaaaaaaaaaaagggagaaaaggggccagggattatttggagcaatggctgattccagcctaaaacagaaaatgtatgtgataagccaggacctcttatagcacaaaacaaggaaagtgctcaaaaaaagcatggtggcaggagatgacttgaagtgctatgaactgatgaatccgggatacttcgaggaagaaaataaatactgatagtaatgctctataatccatggcataaaacaaatatccatgagttcagagctgatgtaagcacagaattgaaaatgtaaattaataaacaggaagggaatgatggtaatacaaaatcaccacttggcaaacagcacagcaataattgctttggacaagaatcatcaatagatgctaaaatttgtgggcaaaatatggcaattaataggatatttacatagcctcaaagcattaggttagtgcaaaagtagttgcaggttttgccattacttttataattattttaattacttttgcaccaacctagtatctccacatttatttgatgcatagggaaaataggaaccttacagtggagaaatctggcagacagcacctgaaccaaatgctccaagttaacctcacctgtaacaggacatattggcatcatattccttttgatctgatgctccgagaactgcccagcaaaactttcatggtattcatgttaaaaaaggttgatcttttgtgtgtggctatctactttccctagcaccatttggtgaagagactatccgtttcccactggtatttttgacacccttatcaaaaaacagttcactgtacatgcgtgtatttatttctgggctctttgttctgatgcattggtctatgtatctgtcttcatgccagagacatatggttttaagcactgtagcgttgtaatatatttcaaaatcgggaagtgtgatgcctctagctttgttcttctttctcaagattgttttgactatttggtgtcctctgtggttccatgtaagtttttaaaacctggatatccacatgtaaaagaattaaattggaccattatcgtgcaccatgcacaacaacaactcaaaatgtgttaaatagttaaataggggaaaagctccatgacattggtctcaacagtgatttcataaatatgacaccaaaagcacaggcaacaaaagcaaagacagacaagtggtattgcatcaagctaataagcttctgcacagcaagaagaaaaataaacagaggaagaaggcaatctatgaaacgggaaaatatttgcaggccatatatctgatacggggttaattcttagaatggtaaactcatacagctcaatagcaacaacaacgacaacaacaacaaaccactaagaacccaattttaaaatgggttaaagacttaaatagacatttctccaaagaagacatacaaatggccaataggtgtatgaaaaggtgctcaatgtctctaatcatcagagaaatgcaaatcaaaaccacaatgagatatcatctcatgcctgttaggatggttattattatgaagacaaagacagcaagcgttgacaagcatgtggagaaatttgatcccttgtacactcttggtaagaatgcaaaatggtgcagctgctatgcaaaacggtaaggaggttcctcaaaaggattacaaatagaactgctaggtatttatccaaaataatggaaagcaggatctgggagagatactagcactcccctgtttgctgtagaatgttcacaatagccaaggcatggaaacaacctaaatgtccatcagtgaatgagtagatgaagaaagattagtacatacacacaatgggatatgattcagcctaataaagaataaaattctgcaacatgtgacaacgtgaataaaccttaaggacattatgctaagtcagataagccagtcacagaaggacaaatactgtatgaattgtattgtattattttagagacctcctgtgaatggaggtctctaaaatagtcaaactcatagaagcagacagtagaacggtgggtgccagggatgggggtatcggggggaatgggtagatgttgctcaataggcataaagtttaagttacgtaaagtgaataaattcgagatatctgtaaaaccttgtacctatagttaacaggaatgtattgtgtacttgagattttgttaaaaaggtagaactaattttaactgccctggccgggcgccatggctcacacctgtaatcccagcactttgggaggccgaggcaggcagatgacctgagttcaggagttcaagaccagcctggccaacgtggtgaaactccgtctctactaaaaatacaaaaattagccaggtgtggtggcaggcgcctgtaatcccagctacacagaaggctgaggaaggagaatcacttgaacctgggaggtggaggttgcagtgagccgagatggtgccattgcactccagcctgggtgacaagagtgaaattccatctcaataaaaaaaaaaaaaaaaagaaaaaaaagaaaaagaaaaggaaaagcaaaaagaactaatgttaattgtgcttgctgcaattgaaaaatccaaaaagcacaacttgacttcaatcacaaaaaaattaaccaaactcaaattgaggggtaatatgctaattggttagtgctgattaaatatgacaaagtcaggggtctagcaccttcctgcagtcccagctatttgggagattaaggagggaggatgacttgagcccagaagtttaagtccagcctggacaacatagcaagacctcatctctgtcaatcaatccatcaattaagacaaggccatagaaaactaagagtgtaagaaattattctggactgagagagactaagcagacgcagccaccctgcacaatgtgcagctctggattggatcacgcatgccagaaaagggataactgttggaatttgaatgggtctgtatttattaataggttcatatcaatgtttatttcctggttttgatccttgtactgtggttgtgtaacatgttaacatttagggaagcttagtaaaggacctctgagaactctactatttttgagacatatacttaagctcaacttattttaaaatgaaaagttcgcaagagagtcaatgtttttcctcacctctttgttacccttccaggttaatcctggaagccatgcactgaggtgggagcatcttgaaatgggaaagcctagatccctaagtcactgcatggaagggcatcccgaccacctagactcaactttacgtgagtgagaaacaggtttctgctgtgctaagacgctgagacttcaagtaacaggttatcgaagcataacctacactattctaattaacacacctgagctgctgctagcagtaataagctaggtctttgtgtacacacatgcatagatctcaagaattattgttgatcaaaagaaaagtaagttgcaaaacaacagctacagagggaaaccatttatgttgaaataaaatcatgaaaatttggtataggttttatgtgtgcacaaatgtgtataaaagtatagaaaaaggtttagaagaatatacagtttgaaactgttcatttctaatgaggggacaaggtttcaggatgtgggtggtagccttatttgcaatattttaaacatgataatatattcaggaatcatttctgtaattaacattcacaataaaagcagacagtctgttaagttgttgacctcaactgaatgatctgtaacccatggcaaggatacattttcagtgtagacctcattaatttggtagggccaggttctctatttactgtataatgaagttgcattttcccagaggattcagtcccagagtcagagcttaaggcagaaattgcataaagttcattactcttaaaattttccttaaattgcccataaagtatagtgtcgaaggtttcatgtatccaaagcaataaagtgattttcctggacatgaatattaaagaactactggactacactgaagagagacaccaaatggaattttcgttgcaggtatctggactaaatcctctgattttaagttaactataaactccccatcagtcaatggggcacggctggagaaatacctctgcaggatttattctattttgttttaatattatgcagccctaattttaatgcatgctaatagatgtgttcattattgaggaattcagttaaataatgaggtttcatcttcctgggtttcatttctagaggcagcttgtaggttaaaagtaattatggtgcaacttcactttactaggctttcttaaagaggaatttatcttatctataatctttccatttggatcctctttacaatgatctcaaataattgcaactctcctgttttcttcttgttctagatgtcttttcgcctgaaactgagctattaaactgagaccgagtcctccatctcttccctctccacctggatgggtcaactttcaaggaacttaattacttttgtaacagaacaaaggctacggaaaatgtctgtaaaatttggaacacaggctatgaaattagaatccaagctctctgcaaagaaatattgatttagttattctgacagcacgtggtcaacaggtttctcctcaagatccccctgcttccctctagaattgtgtatggtgtgtgggtggaggagttggaaaggggagaaactctaggggaaaaggggttggaaatggctatggggctattgaggttcagagaaagaaagcctgatttctgttctaagcagaggctaggaggctggggaaggtcaaagccaacatcacaataatggaagaatggagaaggacataaggtttgctaggagcaatcagaaggatagaatacatgggttttaagggggatggggggagtaaaatgggagatcgaacatggggcaggaagccttttcatatgagtccacagcccccaccaccatggaagggagaaagtatcatgggttggtatgataacggcatgcctatcatgttaggatgaaattaataagcatgagctggaagaatattaataaagatcaacattcacatctattggccctcttcacattttccccatgatttagcaaaataaattcatccacatcaataagaagattcctaagtcttcctttttgttacactgataggcaagaagcttggtcttcataataatattttctctgctctttccaaaatgtagtcctaatgtggtcagcagagaaacaatggaagaagcccattagctcccattagcgtatctgaaagtagctgtaactgactcccgaggagccaaagattcttatagagaagagggagctatgcaagcccttcattgctaatcaaatcacacccatgagcgcaaatgagattgatccatcctttatggagaatcctgtaattagagaagggccagggttaatgaccaaaggaaaacagactagctcactgctacactcctcatgagcatctcaattcagtttcggatttataaacctaacctctggttcctcctatcctgccacctattattgttaatatagatgagtatagacacatgcaaggataatcactcagaaagtgcaattgataatattgaagattacaaagaaataacttttaatagcacataattaccaataacacagacatattcatagttaattatgccattgcgtgggatgagatttgagaaagtagaggagaaaatgaaaaaaggagagaaagaccttttcttggctttcgatttccaaaagtctagaaaaaaggtacaggaaatgctaaggatctgaatgaagactcagtgcctactaacaagggctgctccacatccacaagttagtcctcaaactaaaagggagggagggtagtcagtggagaagtagagatattggtggatctgtttcccagaacgagccgaggagagagaggatctgagggcagaggggccctgttttctgttcccagggatgtggagggtatccagagagagaaattgacagagacttgactagcctgacagggctttgcatatcatcctggagatttcctgtgccctagggtggtacggaggcagtgcaagcatcctcatgtgcccaggagtattgcagaagtagccccaagagcctctggacccaaaaagtcagttcaccatgtaggtggggtgaaagaggtcatcctgatggcttgggagcagcagagccaatgcattaaagccagacggacacctgggtctcagaagatgctttacatgaagaagttattcagtcagatatttccatccccacatgctttggaagtgtattctggggcagcagtccccagcctttctggcaccagggaccagttttgtagaagacaatttttccaaagacgggtggcgggatggttttgggatgattcaagtgcattacttttattgtgcacttgatttctattattcttacattataatatacaatgaaataattatacaattcaccataatgtagaaggagtgggagccctgagcttgttttcctgcaatgagatggtcccatctgggggtgatggagacagtaacagatcatcaggcattagattctcacaaggagcgtgcaacctagatccctcgcatgtgcagttcacagtagggttagtgcttccatgagaatctaatgctgccactgatctgacaggaggtagagcttgggtagtaatgcgagccatggggagcagctgtaaatacagatgaagcttcgctcgcttgcccatcacttgccttctgctgtgtggcccggttcctaaccagccacggaccaatactggtccatagcctaggggttggggactcctgttctggggcttcccagagcataaacacaaccaaaaatgaagaggagaggggggccccacagtaactgagattccattcctgaaaacgagcagcatttagaaacttgaaaaagaaattgggttgcacccttgtaaagttataaaactatttatcttgcatttttgtgtttgtggcacaggacactatttccatatatggatcatcaatatttatataattagaacagagggaagtatatgaactaaagttccatgtttttaccatgattcagaatacccttcaagatttttaatgccttgaatacgaatgatgggtattggtaatcaatggctggcaggtctttatgtctgtcccctaatctgtaaaacaaggtcattagatgaaatatgttataaagtgaaacaatgcaatgaagcttgtaataaaatcatcaattgccttccctatctgtcttggtgattggggcttaaacaaggaaggtagcctggggagaatctcaccatcatatatgaatctttacagctgtgccccatgcttaacacagggcctctcacccagtctttcagctgggacaggtgccccgatgccagaacatctctcatttaccctttccagagggctaccttcagtcttcctgtgggagtttaggggacaggtgactggatgcaagggctaagagaggggatccgtggagtctaaaatgtttcttacatacagttctaacttgccttcctgttttcagctctatcacacactgtatatttccaagataccaggaacctccaggtcccaagcatttttattttctctacttttttcaatgtttgctcccatcacccccctgcaggcagttagctacctctgctctgctaatctagttaccaaatgataatgtactttccatctttcaaagttttctgaaatatctcctatgactgtgtactgttttctccagtttggtgggatttttgataaataatcatttcctattgtgatggttcattgtgtgtatcagctggcctgggccacagggtgcccagatatttggtcacatgttactgagtgtttctgttagggtgtttttttgatgagatgaactttgagtaaagcaaattgccctccataatgtgggtgggcctcatccaatcagtcgaaggcttacatagaacaaaaagattggcctcctgcaaggaagagagaattctcagcagactgcctttgcatgttacctgcaacactgattctttgtagttccacagaagacgaccactacggaacactgctggctagacactacggaacactgctggctagacactacggaacactgctggctagacgctacggaacactgccggctacacactacagaacactgccggctacacactatggaacactgttggctagacactacagaacgctgccggctaaactccagggaacactgccagctagactcgtgctgcagattttggacttccctgcctctgaaatcatattagccttttttttttttttttttttgagacagtatctcgtccttcttgcccaggctggagtgcagtggcgtgatctcggctcactgcaacctccacctcccgggttcaagcgattctcctgcctcagtctcccaagtagctgagtttacaagcacgcaccaccatgcccagctaattttgagccaattctttataataattagttttgtacacacactcacacactctcacacataaaaagtcatcccactgtatccacaagggattggttccaggacaccatgaatagcaaagtcgaggatgctcaagttcttatacaaaagtcttaatatttgcatataacctttgtacatctgattatacactttaaatcatctctagattacttataatacctaatacaatgtaaatgctatatcaatacttgttatactgtatttttacatcttgtattcttttttattgttgtactattactttgtatttatttttctgaatattttccacctgtggttggttaatccacaaatgtggaactcgaaaatacgaagggccaactatactcacacacaaatgagcacacacacatacactcacatacatatatatgaacatgcacacacatatatacatctatatgaacatgcacacacacacacacacatatatatatatatacatatgtatattaacatgcacatacacacatacacacatcctgttggttctgtttttctggaaaaccctgactcaggcaactgtaaatataagtaaacattccactatgcttcactagcttgaacaacactcttctgattgctttttatgcactgcgtgattttgagtacgttatctcatttaaacctcccaatgtcattatgaagagatgcttggtgaggttaaatggtttgcaaaaggcaaaatggaaaaacaagtattttaatataagcacagtgttctattcactgcaacagagttatcaccccggttacttctaagtccatcctagaagcaacaagatgttcttcgtgccaaataggagaatactttgtgttacagactttgcctttatgctcttcctgatcagcagacaagtgtcggcagcttctgaaccctattcctgtttctttcctcaagtgacagataaatctggatataggctgtaattctgttttcctgaagtttcctacaccttcccatccaaggtgtgagatacgttaaaggcactaaagagagatgaagtgccagtttctccagactaactcataaacagtagctcagtctgtgtttcctggaaaacagagcctgaagccagcaaaggttatgtgctattaatgtctgagggggtgtcagcccccagagcagggattggggaaaggaggggtgagtcagggaatcaaggaggctggtgtgagtatacactaccaagctcattagtatttggtatcaagcaccagacattgctcactgttgccagactttctggaagacagtacaaaggaatgcttctcagaactctccatttggggaggaatttatcaaccagtttccatttttcaattggtcagtagtttgctctgcagggtgctaattcctctctgcctctgggtaaaatgtatgtgcctgtccagagaaagtttcctgtttcagagtctacaggagagccctagggaaggacagcctggacacgcagggagacccccgtctttagtgtcagaggaaagtcctcagagtcaatgtggagtttgttgccacagtagcagggggctggaaaaactggctgaaggtcctggaaccaggtggggcagacagaatctgaaatagagcaaagctgcatttggtgcacgttctttagtccagttctctcatcctgacccccacaggccttcccgagtgattttggcctggctaggcctcacagtgggttcaaggcaagccatttgctgccagcagcagaaagcaacttcggatcatttaagcaatacagggatttacaggaaagatattgggacaaacttgagaatttaaaaaatagctgagaaagcaggtctgcagaagggcaagaaccaggaccagaaagggattccagcagcaggtcaacgcctctgccgttagtaagaattggcttcaaagcaccccaggctctgtggctttcctttccagtttaaggtgctcgggagagaatctgatcgggtcagctgcacagggtgtttctatgccttaattacttatctgcggccagggcacaggatggcagatgaagggtgtccctgtgagcatcctgcatcagactggataagcgaggttatcaggtcgttatcaaacgacctcatcgccctggtgctttaacaaaggttgatttcctcgtcaggctgcacacctgtcacaggtcggctggggacgctgctctccccaaccccatgttctgggacccaggctacttaagcagccagtatcttgaacatggtcagacaccaagccagacagaaagatcactctggaggcttttgagctggtaattaaatgttttttaggaagaactggttatttgacttactcaaccacaagggaaaagaaaaggatgatgccacaatctgggtggggagacatggaaacatttgaaaaacaacattaatacatatcaccaactcatgggtgggattcatacatatcatcaccaactcatgggtgggattcatacatatcaccaactcatgggtgtagagggtaggactgtttccagcagaagacaaacgaattacaaggcagagaaaatgatcaatgtctatcataagcaacgacaggcttgaggaagactgaattctttatctcagaattttagagctaaagtaaacctacagcttgcaaagtcacacttctgctttttaatgttttttattttttaaaatgcatcaacacatcgcaattgtatatatttatagggttcagtttgatattttgatacatatatatgttgtataatggtcaaaccagagtgtttaagcatatccatcacacatttatcatttctttgtggtcaaaacattcaaaagctcttgtctagctactttttaatataaaaggcctcactgttaaccgtcatcaccccaccatgcagtaaaacaccagaactgcttcctcctatctgattgtcactgtgtacccattaaccagcctctccccatccaccccacaatctttctgtctggctcccctatttctggtaaccaacggttctactttctgcttctgtaatacaactctttttatcttaattttagatttcacatatgagtgaaatcctgcggtatttgtctttctgtgtctggcttatttcacttaatgtgatgtcctccaggcccatctatagagagccaaagaaggagaatggccatttggtggcttagtgacaggcactgaacaagatggccccgtcaaaggctcttctttatgagcactcattattaaatgtgctgacgataaacctcctcttagcacgagacttaaaagacacggtcactggcaagggcttttgccattcaaaacacttgttctattaagaactttgatgtcagaacctcaactttccttcataaaaccgacttcactgcactctcaggccaagcgcttcagaaggaagttcccaaggtcgatctgtgactcaggtatggctcatcagagccaaagtggttcagatatgacatctgatttagtcaaccagagccatgagatgttggctggaattctcgggagataggttattttgttttctgcaaggactgtgaatggaaagaatggtaggaacctggaggtgctggggtcagcctgtgtgtggccaaggcaaccatacagggaaatccagagctaaaatgtgagaagagcaaaactggtgctgatgatactgttggagctcctggatcaagccatacctgaaatccatatgcagacttttttatggaagtcaataaatgtctcttttctgtttcacatagttgaacttttttttttttttttttgccaattgcaagaaaaaatttcaactgtttttcatttaattgattttctccaaagcacatatgggttactaaacaacttaaagactcatttacagatagctaagaaagcccagagaatgttttgtatgtgacaattcatgggagagccccaccccacctctcatcaaactggacacattgaacaatcaggtttttttttttttttttagctcttggaacatgtagagactattaacaatgaaatataattttcactgctttattggtattagatttaatttactgctgagaaaaaagggaaatgacaattacaccatttcagacgtccttcagggcgttctcatggtggtgctaaaaaagaggaagctaatatttctatgaaccttttgtgccgtaaagttaaacaggtctcttcaatgaaccatgctggactgaatcctttccaattacgcttaatcattttcataggcaaacttcagacctcaaggacttcccttgtgcttttgaaatctgatattattcaaagccataaatatatctttggtgcttaaaaggttgatttcttttaaaggcgaaaaagtgaagaaataaacctcacaccttttcttttgtgagtctccgcatatttggagtttgggcacaaaggagattcttggaatggtggctgttctaatgtgccattcaaaatgtactggggaaccaagtcatcgtagaggagatggagaatacttgagccagctacttaattaagatgcaggagtgtgtggtctgaatccaatactctcaaggccgaccaacactcagagaagtgattaacctgcaaagcaaggcaagttgccacataggaaccctataagaggagagggttctgagagccatacaaatgggaacgtcatcaatctattgagataaaaagacattcgatgactgctccgtggccaggacttgggatgaagaaatgtgacgatgaatatcactgagcacccacctaacttaggagtccacacacgtgcaatgcacctgttaaggtttttgctatggatgctgtaacatgttgccacaaacttagtggcttgaaacaacaaattactatttttcgttttgggagggtagcagtataaaacggtgtgttggaaagactgtgttccttctggagacttcaggggagaatctcttcccttgtctttttttctttttcctgtcaatgctgaatatttattaacaaagagatactggcattttgacatttctaaagacttgctttggacattaacatttgcagtggatgctttaaaacataaacactttgaagctatacctacagaaaaactaggaaaatgtaatacagaaacgaataattacatcaatgatagttgctgttagaaatattgtgtcaaatgtacccagaggttgcctgaatctcatagctcgtgacccgttcatttcattcctccaatctggtgcttcacttcaacctttcctttatcctcacactccctactgtagttaccccactcctgtctccctcttatacaaggactcctgtggttacatacatacaaatgatcgagaatcatctcctcacctcacatctctagccacgactccaaataccctgctgccatgtaagtcaacacttacacgttccaagggtttaggatgcaaacactttgaggggttgctatttagtctatcactgtcccgagagcagaagctggaaagcaaggaactctccccttccagaaaggactctcccattgaaaaaacttcctggttgtgctgtcctgtttatttaagcttcttgttaatgctcgacttcttccaagatttggtcttatctagtccctatattataaatgtctgaatcccccttcaggagtttgtatacagcacacaccttatgagctatgggggctcaaagctgcatcctctcacctccttctctccctgtgtttcctaacatttgctcagtaaatgttgaaccaagatgccattagcaatgcttaaaaaaaaaagaggctcacctaggaactttaaatgtccatgctaattacttcctcatgcgacctgcttcaaaagcacagacattactccaattttccaaattgggaactcacacacatgtaggcaagaatatgaggccttcagtttcatccataaagacagtcacagcagcaatcacagctgcaaccatgagcgcaaaagctaacatttattgagtacccactttgtcttgggcactgttctaggtgattttatgcattatttaattaaagccaccctcctccccaagtctggtgggtgggggtcattgtctccacttacaaatgaggaaactgaggtttagggtgattaaatgaaacgcccaacaccagaacagacacaggattcaccatcagcctactctgatttcaaggctctgactcttaagcaccatattctattgtctcaggtggtgatgacgctgaagggaacataatattttaggcacgtacattggaaaagactataatagcaccaatagatcttttctttaaaaaaaaaaacgtattgtctacagcttctatctaaaggacataaactacagctactgtgaatcccagtggttttctgggctcaaaatcttgagaagcaagaacaaggtctatccacatccaccaggcttgtctgccactttatttttttattttattttttgacgaagtcttgctctcttgccaggctggcgtgcaatggcatgatctcggctcactgcaacctctgcctcccaggttcaagcgattctcctgcctcagcctcctgagtagctgggattataggtgtgcaccaccatacccggctaatttttgtagttttcgtagagatggggtttcaccatgttggccaggctggtcttgaactcctgacctcaagagatccagccgcctcggcctcccaaagttctgggattacaggcgtgagccaccacgcccggcctctgccaccttttctatggcaaggccaggatatgtctccgagggctctccattaggcagcccctggcacacaacacgaagctcaccttccttccagccctgatctgtgggccagctgctgatgctgtactgcaggctggagtctgtgggtcagctgggcttagaaggcagtgggccttagttccagcttttgggttgggctcaggcccattccagatgcttcctttttctccaggaccagcaggccactggagcgtatttttctcataatcatggcagaagcaccagagggaaaacctaaccccataagcacgtgttcagtgtcacctccttttacatccaccaacagccccttggccaaagcaatgcacacagcgaagctcgagctcaaagtcattgggagaaggaaagcctccacccatgtgagaccaaaggaaagttgtggatataaagcaagggacagaggcctggatcccaaagacaacccactgccagctgtgcatttctagtctcgttttccttgctgtaaggctctcaatcccatgtctgctccaaaggcagaagaaccaaggagtagaaaccaatgtcttctactccacttacaagcacgggtccttaattccacctccccacatgtgttcaatccatcagcaagcattgatggctccatagccaacacatcaaccggtgccacccagttttcaccatcagggtgtcccttgcagcctccaccatcatcactcgccgggactctgcagagcctccaccatcatcactcgccgggactctgcagagcctccaccatcatcactcgccgggactctgcagagcctccaccatcatcactcgccgggactctgcagagcctccaccatcatcactcgccgggactctgcagagcctccaccatcatcactcgccgggactctgcagagcctccaccatcatcactcgccgggactctgcagagcctccaccatcatcactcgccgggactctgcagagcctccaccatcatcactcgccgggactctgcagagcctccaccatcatcactcgccgggactctgcagagcctccaccatcatcactcgccgggactctgcagagcctccaccatcatcactcgccgggactctgcagagcctccaccatcatcactcgccgggactctgcagagcctccaccatcatcactcgccgggactctgcagagcctccgtattagtcagggttctcctgagaagcagagccaacaggatatacacagatgtgtacgagaagatttgttatggaaattggctcatatgattatggaggctgagaagtcccatgatctaccattggcaagctggggacccaggaaagctggtgatgtgatttggaagcagaaatcctgagaactgtgggtgggtgggttgagggggcgggttgagcataaatctctgtgtctacagacctgagaaccaggagctccaatgcctgagggcaggagacgatggaagtcccagctcaagaagacagaggggaaattcaccctgcctccacctttgtgttctgcttgcgccctcgatggcttagatggtgccagcccacactgcagagggtggatctttacttggtatactgatttaaattctagtctcttctaaggaagaaacaccctcatactcatacccagcaataatgtcttaccgactatctggctatccgtgagcccaatccagttgccaaatttcaaccatcgcagtctgtaagcagagtcattgacaccacacagtggctggtgtgatctttcaaaatgtcagctccttgcctgacaactctacacttgcaacaccatgcaaagaccaggtcatggcctgagcgatcccatatcctccgataccgtgcaaagaccaggtcatggcctgaacaatcccatatcctacaataccatgcaaaggccaggtcatggcttgaacgatcccatatcctacaataccatgcaaaggccaagtcatggcctgaacaattacatatcctccaataccgtgcaaagaccaggtcatggcctgaacaatcccatatcctacaataccatgcaaagtccacatcatggcctgaacaatcccatatcctggtgtcaccatgcaaagtccaggtcacagcctgaacaatcccatatcctcctagctctttcccatttatacggcggcatcttgcaaaagttcccctgccacacccctaaataccaaacatacttggatctttttttttttttttttttttttttgatagggtcttgctctgtcaggctggaatgcagtgtcgcaatctcagctcactgaaatctccgcttcccaggttcaagtgattgtcatgcctcagcctctcaagtagctgggattataggcgtgcgccactatgcccagctaatttttgtgtttttagtagagacagggttttgccatgttgaccgggctggtcttgaactcttgccctcaagtgatctgcccaccttggcctcccaaagtgctggaattacaggcatgagccactgcgcctggccaagctctttcttggccctcaatgaaacctttgccaactacaatatctacaaaaccatatatccattatacactttccactaactagactgttcttattttattattacttggggaatgccagtacatcccaagaaagaagtttaactgagagcagggactttaccagcctgattcatcactatatccccaataacaagcacaatgccagtttacattagcagccccctaaatattggttgaattgaaaaataatcagagacaaatgaacacaaacttcaaatgcactccagaaagctggagaaagaaattgctcaagcctaaagaatattgctgtattactggttcaacaaattcaacactctcctgtatacacatctgatatttaggaaatggaagcttgattgagtttcagggagtctaagtgccactgcctgtcctgaggcttggcaaaggacctcatgccacctgcaaatagcaagacatcaaattatgtattagttacaatgcaaaggtaaaggaattgagtatagatgtatgccccccaaaaaccccacatgaaattagaaaaagaagtggcctgttataaagccatccaaatgtatggtatacttaaaaaaatatatgcccagcaacaaatagctcaagcaatgtattgcaatgttgatgaaaggctacatgctatgaatctgagctctggagcttgactgcccaggttaggattttgatcaggtttcttaatctctctgaacctcagttttgcatcattaagatgcggataatagcactgcgtctctcacagggtgtcatggacattacaaggtccggtccacgcaaggtctttgtgagcagtgctgggtgcatagtaagaatccatctgggtttgctattattagtataaataaatattaatttggatcaaattgtagatacaaagcagagagagaaaaaaatcataattagaactgttaaataacacttgttataatttccccgtggtgccttctcaaaataaggtcttctgtaaatgccacttcaaatctcagagctcagcaactcacccaccagccagctgtcagggaacgggtttaactcagagaagtggttctgttgagccacttctttttctctgacaatgttgtctcagggctccccagtggaaaagttacaatgcttattataaccacactataaacaaggcccgggtttatataacacctcggttaccaaaagctaaaaagtacatctaagtgttgtagttatgtctattttcacaacatccatgcaaaattaagaaagtttgataatattatctcatttgtagatgaagaaattcaaaagaaatcaagtaacttcttctggcttatgcagtagataagttggatagctaaaaagaggtctgaagacaagcttcagcataacatgccttccataatttacccaaattaacattttaatctatctacttacatttcacctccttccaaaacatattaacaaaggaattggtattattatccatagttcaaatatgttctcccagaatgcattccgtggcacaatacagatgttgattgttgtggcttgggaaactaggaattccactggcaaataggattttatgataaagaaccctgtgcaacacaatattttaattcctcctatgtggcaaatgatcattatttatggttctgagtggtcctacagcagagaagtctgctgactttggttaacccagtatttcgcattcttggcagagcatttttttaaatacaaagtcaataatattcaaagcaccagtgttctatgtctcatccatttaggaaatgctgacttaggaaatcacagggcagagcaaatctagacaacaatgagaactccaggaccaggttagggcactaaagacagtctgcagacctggaagtgagcgcccgactggccaaggaaaagcgggaacatgagcagttctaggaatccgctagtgagcgacgggtaggtctggagattgtggagtttttggagatttgatgaacctttaactcaaactgcctcaaatattttaagatttgacataaagaagtaacataggacaatagactgatttttttttttttgtctaagcaaatttagcaatcccaaatgtaagtcatgacattcttagaggtactattcaaatttgttttaaacttagtgctactagttccaaaatgggtgcatatgttaatgcagaaggattttaaagagtttctaggagatttagagagaaactcgagcaccctatgaaaagagtataatccaaccaagtgacagtgactgggaaacacctattgaacccaacggaaagtgggaaatcagtatcttattatcacctgtcattattattgttactattttttcaacatcactgaaaataccacagctgaaccctctgcctcatgcttatttgctaattcaaacctggagatttcttttcaggcagtgaacatatgatttaaatggagtttaaaaccttagcccttctatttcctaggtttctcaaaatgtacatatccaaaacaaaatgcttgatttcccccttaaaaccatctcatccctctcttctcctgtcccatacacaggtcctccatacagctgtctgcttgaaatcagacacagaggcttcctcagacattctcttctttccctcaacactcacataaccctggaggaacaagtctcctgatcacttccttgttgctgtaactgcagatcattcgaatctgccctcttctctctgcaccaagacagtccaagccacaactggcttcttagctggactctgccacagtctttgcaagtggtcttgctgcttccatcctgctttctttcaatgcagtctctgctcacaaatgatttttaaaagcataaaatgtatgattttcttattttctcttgatatcccccacatcctaactattacactaggaataaagtctagacaccatctccaaacttatcttgagacatttctctcgaactcattgcattctggccacactggttacttccagttctttctctccttcgagcttccaaggtaaaattccctctatctgcaacatccatatcctttgcaccttgcctgacacctctttagttcttcaagcctcagtttataggctgaccctatctgatcttccaaatgaaggattcctctttacctaatctttaattctcgatcacaatattgttatatgttaaagcatgctgtttgatacctgcaatttttactgacttattcatttacttgttccttctctgtctcctacatccttactgctcactccatgggagtgggaaccatgttttctttaccctacattctaggcatgatacgtaaacatccataaagtatctgcatgggtgaataaagaaaactctacaaaggattttttgatgtgaaaggaatctaatttgcatttatggtacgtcgtgtacataacttgcaaagcatccatgaaagggcaattcattaattaattcccttccatttctctgccacagaaactactttggccaacgtttcaataaacaagcagggcttacttcctatcacttgccttcaaaatactcgatgacccattgccttgtttagaaatcataaattgaatatagaggcaaaataaaatgatccttcagaaagagcagaacacctcttaattcttaaatgaatactaaaacacaataaatagcacataccactgagatggtaaatggatttattaactggagtttgggaaaagaaggagccaacataattcagccaattttggggctattcttagatatacacttatagagaatatttgatggaataaaaatgtcctaggtaagatgtctttatctgcctggaagaggtaaatagtagctgcagatggatattgatcaacttaccattttggatgttaaatgactggaagaggagcaagtaactatagcttttagtctaaatttgcaaagaagggtaccttagggtaagctgctcatgtgagcaaaacgccaaacacccttggtcttcataatccatagggtactcttcacagcctcagtttgcccactcatgtaaagagaactctaccctccctctctttatcttacttttgtaacctcttgaacaaacacattcaaaggtcacttatgtagtttggttcttgatagcaaaacacactgtgaataacttctttaaataggtaactcttcttaggtcctgtattatattaatatattccctctggttctttttgtaagtttagttgatttttcatgttctttctttagttgttggtggcatctttgttgttgttgttaaatgcaaagggaaggcatagtccaattatctatctaattactagttcaataattactttatcactacttaggcaccaaattatctaaatagcttttgtctctacagtcccctcagatttgtcccttgaatatatgttggccctttctcttttataataatacacaagggagtgggtaaaatccttaggaataaaggtattgtaggattgtgattgcttttaaagatcctatgtagacagttatccagcctacagtcccatctcaccagaaccccacccggatcactcagaggagagttgcactttatgctgggtctgtgaaatgggatcttcttttccattgttgctggtgttcactaaccagcctgcaaacattaggagagcaaggtgtcgtatagatagaaaaatttagatgtgttcaataaagctctcattgggaagagaagcatggtgcgtttcaaactcattgaagttgaataagtgtgggtggtcaggccggaaaatcgaggaatcctgagggaaaaaagcaaagctacatttaaaaaaaaactataagaaaatagatacaaaagccatggtagagtcgtcctctgcagctggagcgtttccacaagacacccgactgagctggaagggcccggtgtggaaaagtcatttgtcacaaagcatggtcagaaaaggaagccagactcctaagcatttcccaaaaaaaaagtgctacagccagaaaatctagatgagggctggccgaggaggaaaatctagatgagggctggccgagaaggaaaatctagatgagggctggccaaggagtaagactcaagttctgattcacaactgtgcgtgattgctacagaaagaaaagccaaaggactctacaggctagtggtggctgtgagggcaaggagggtgggtgggaggtggcaggaaccaggtcaggaggtaggatgccagggaaccggtcagggcctccccagaaaacagaagggcattgtgaggaggatttattcaggaacaggggatagagatgaaccacagacatgcttcagtaacctggagctggcagcagctaagctgttaccaatccttggcctgagagggaggaaagacaaataatttgctgttcagttgtgggacaggcccagcccaaggggaccttgcagagagagaaccggaaaggaaagtactgtgacctcactctcctccctccctctgagctcctgctggggcttccagagacttttctttggctgaacccaggtggaagccagaaggcactgaaatgctttaacaaagattgtgcaagagagggtggagaatgggccttggtaagcaaagagaagaaactcagtacatccggtaaaaggaaggcttgaagaacatggtataaaccatccaactcctcattcccatttaatttgtcagagtcatcagattagaagcaatattgattaggaaggaattggaccccaatttaatgagcactctgcacacctcaaccaagccttttaaagtgagctccagcctccgggcttgcatgcatcgttgtcccgaacagacagatggaatttgtagttgtgcttattgaacatgcgaggaactggagggagaaagaaaggtcctaggataattctcattgaacaaaaaggaacaggccgaggcaggcggatcacgaggtcaggagatcgagaccatcctggctaacacggtgaaaccccgtctctactaaaaatacaaaaaattagccgggcgtggtagcgggcgcctgtagtcccagctactcgggaggctgaggcaggagaatggcgtgaacccgggaggcggagcttgcagtgagccgagatcgcgccactgcactccagcctgggcgacagagcgagactccgtctcaaaaaaaaaaaaaaaaaaaaaaaaaaaaaaaaaaaaaaggaacaggacagaaagtgatcaaaaaaactgcggatcaataaacctgaagtcagcatagacacaggtatatgttgttaaaagtatcatgagcactttagcaaagaactgaaaattagtagcacatggtatgcttccagtaaggacatattacctatgaataatcagttattggttgcttggattttataggcaccatcatgtgttcattcaacaaatattttgaatgcccacaatgttccagttgatgttctggatgttgtgaataatgcactgagaacagtggacaagctccctgtgtttaaaaaaattagaatcgagtgcagaagaaactcttcacaggtaaacataaaaataaagagggtaatttcaagtaattaaaggcatgaaaagcatataagccacatgacgggaaatacaatgttgtgaagaagttggtggtggggcgacactgattacctcattaaggaaagcttgcagaaagaggataccctgagtgatgactggctgtgaggcatgctggtagaaaacccttcaaggcacaggccaccactgatacaaacacccagagtaggaacaaatgtggcttgttccaggaataccgaaggagagagcgtctagggctcaccagcaaaggagtcagttttaggagatgagatcaaacaggcttgtggggaccaggaaatgaaggggtccttgggcctcagtaagcactttgaattttattctaagtgtggacgcaattgtgtgcaatggtcttcagcagaaaaaaaggctatgtgacttgtattttggaaaagatcaccctagctgctatagagggaatggaccaggtagtggagtggggtcgcaagactggcgaggagactttttagacagtgcaagagatgaacatgtcttaagcttagaaaacagcagaggagatgaagataaatagtcaaattcaaaggtgtactgtggagacaaagcagacagctgcgtttaacagttggctttggggaataagacaaatcagcaccacggagaactcctatcttgtttcaggaactggatggagtgagggacaatttgctgagagaatgaagccttagggggaaaaacacttagggaaaataaaagatttattaagttttagaatatggaaagcatgttatatctggaatattggacaggcatgtgataaaatatgctgtctctgtggacaatgggaagtgagctgaatctgaatgagaggacatctatcattcattcattaacgtatttattcatctgaaaacatttttgtacacctgctgtatattaagaattttttagaatagttttttttgtttgtttgttttgttttttgttttttgagacggagtctcacgctttcgcccaggctggagtgcagtggcacaatctcggctcactgcaagctccgcctcccgggttcactccattctccctgcatcagcctcctgagtagctgggactacaggcgcccgccactatggccggtacttgaactaaatgtgtgaacaaaacagacacaaattcttgccccctccatccccaaaggacatacattctagttcaagcaaacagacaataagcagaaaaataaataaaatagatgaagcatcagatgttggcttagaccagggtatttgcatgagcaatagtcagatttgaggtatattgtaaaggtggaactattaggatcaaccgagactgaattcatgtctgagaacaaaaaattccagagtgtgggcctgagcaaccagagagatatcattgactgagatggggaaggttccaggaatatgtttggaacatgaagatcaagagtttgattccggacacactagcttgaaatgcttactagagagccaagaggaactgttgaacctggggttcaaggaagagtttcagacaagagacatacattttattttatattttatttttccataagcaatttgggtacatggggtatttggttacatgagttagttctttggtggcgatttgtgagattttggtgcacccatcacccaagcagtatacactgcaccatatttgtagtattttatcccttgccgtcctcctactcttcccataatcctcaaagtccattggatcatccttatgcctttgcatcctcatagcttagctcccacatatcagtgaggacatacaatgtttgactttccattcctgagttacttcacttagaataatagtctccaatctcatccaggtcactgaaaatgctgttaatccattcctttttatggctgtgtagtattccatcacatatatgtatatgatatatatatatgtgtgtgtgtgtgtatatatatatatatataagtttctttatccatttgttgattgatgggcatttgggatggttccacgattttgcaattgtgaattgtcccactataaacatgcatatgcaagcatctttttcgaataatgacttcttttcctctgggtagatacccagtagtgggattgctggaacaaatggtagctctacttttagttctttaaggaatctccacactgtgttccattgtggctgtactagtttacattcccattagcggtgtagaagtgttctatgttcactgcatccacaccaacatgtacggttttatgactcttttattattgtcattcttggaagagtaaggtggtatcacattgtggttttgatttgcatttccctgatcattagtgatgttggcattttttcatatgtttgctggccatttgtatatcttcttttgagaattgtctattcatgtccttagcccactttttaatgggattttttttcttactaatttgtttgagtttgttgtagattctggatatcagtcctttgtcagatgtatagattgtgaaggttttctcccctctgtggtatgtctgcttttggattcttagtcatgaaatatttgcctaaggcaatgtctagaagggtttttccaatgttatcttctagaacttctgtagtttcaggtcttaggtttaagtccttaatccatcctgagttgacttttttataaggtgagagatgaggatccgtttcattctcctaaaagtggctagccaattatctcagcactatttgttgaaaagggtgtcctttccccactttatgtttttgtttgctttgttgaagatcagttggctgtaagtatttgggtttatttctgggttctctattctgttccattggtctgtgtgcctatttttataccagtaccatgctgttttggtgactatggccttacagtatagtttgaaatcaggtagggtagtgtgatgcctccagatttgttctttttgcttagtcttgctttggctatccaggctctttcttgattccatatgaattttagaattgttttttctaattctgtgaagaatgctggtggtattttgatggagattgcattgaatttgtagattgcttttggcagtgtggtcattttcacaatattgattctacacatccatgagcatgggatgtgtttccatttgtttgtgttgtctacggtttatttcagcagtgttttgtagttttccttgtagaggtctttcgacttcttggttcagtatattcctaagttatttatttatttatttatttatctatctatttatttttgcagctattgtaaaagggatgagttcttgatttgattctccacttggttgctgttggtgtatagaagagcttctgatgtgtgtacattaatcttgtatccacaaattttgctgaattctttcatcagttctaggagctttcaggaggagtacttagggtttttaaggtaaatggtcatattgtcagcaaacaatgacaatttgacttcctttttaccagttggatgccctttatttctttctcttgtctgattgctctggccaggatttgcagaactatgttgaagaggagtggtgagagtgggcatccttgtcttgttccacttctcagagggaatgctttcaacttttccccattcagtattatgttggctgtgagtttgtcatagatggcttttattactttaaggtatgtcccttgtatgctgattttgctgagagttttaatcataaagggatgctgaattgtgttgaatactttttctgcatctattgagatgattatgtgatttttgtttttaattctgtttatgtggtgtatcacatttattgactcacatgtgttaaaccatccctgcatccttgctatgaaacccacttgatcatggaggattatcttttcgatatgtttttggatacggttaactagtattttgttaaggattttagcatctatcttcatcaaggatatcaatctgtagttttcttttttggttatgtcctttcctggtttttgtattagggtgatgctggctacatagaatgaattagggagggttccctctttctctaccttgtggaataggatcaaaaggattgctaccaattcgtttaatgtctggtagaattctgctgtgaaagtgtctggtcttggactttttttgttggtaatttttaaattaccatttcagtcttgctgcttgttattggtctgttcagggtacctaattcttcctgatttaggctaggagggttgtaattttccaggaatttacccatcttttctaggttttctagcttatgtgcgtaaaggtgttcatagtaaccttgaatgattttttgtatttcagtggtgtcagttgtaatatctcttgtttcatttcttcgtgaagttatttggattttctcgcttctcttcttggttaatcttgctaatggcctatcaactttatttatcttttcaaagaaccagctttttgtttcatttgtcttttgtatttttgttgttgttctttcaattttatttagttctgctctgatcttggttatttcctttcttctgctgggtttgggtttggtttgttcttgtttctcttgctccttaaggtgtgaccttaaaatgtcagtttgtgctctttcagtctttttgatgtaggcgtttagggttacaaacactcctcttagcactgcctttgctgtatcccagaggttttgattggttgtgccattattgtcattcggtttgaagaatttttaaatttccatcttgattttgtttttgacccaatgctcattcaggagcaggttatttgatttccatgtatttgcctggtttagtaggtttcttttggagttgatttccagctttattccactgtggtctgagagagtccttgatatgatttcaattttcttaaatttattgaggctcatttttatgccctatgatatgtctatcttggagaaagttccatgcgctgttgaatagaacgtgttttctgcggttgttgggtgagatgttctgtatatatctgttaagtccatttgttccaaggtatagtttaaatccattgtttctttgttgactttctgtcttgatgatctgtctagtgctgtcagtggagtactaaagtcccccactattattgtgttgctgtctatctcatttcttaggtctattagtaattgttgtataaatttgggagctccagtgttaggtgcatatatgtttaggattatgatgatttcctgttggacaaggccttttaccattatataatttccctctttgtctcttttaactgctgctgctttaaagtttgttttgtctgttataagagtagctactcttgctcgcttttggtgtccattcgtatgacactcctttactttaagtttatgtgagtccttatgtgttaggtgagtctcctgagggcagcagatagttggctgggttcttatgtattctgtggtttttagtggagcatttaggacatttatattcaatgttagcattgaaatgtgaggtaccctcgcattcatcatgctctttgttgcctgtgtactttggttttttgttgtttttgctttttaacttgtagttttgttttataaatcctgtgtgatttatgctttaaagaggttctgttttgatgtggttccaggatttgtttcaagatttagagctccttttagcagttcttgtagtggtggcttggtaatggcgaagtctctcagcatttgtttgtctgaaaacgattgtatctttccttcatatatggtgcttagttttcctggatacaaaattcttggctgataattattttgtttgaggaggctgaagataggcccccaatcccttctagcttatagggtttctgctgagaaatctgctgttaatccgataggatttcctttataggttacctggtgcttctgtctcgcagctcttaagattctttccttcatcttgactttagataacctgatgacagtgtgcctaggtgaagatcttttggccatgaatttcccaggtgttttttatgcttctcgtattggaacgtctagctctctagcaaggccagggaagttttcctcaattttcccccaaatacgttttccaagcttttacaattctcttcttcctcaggaaagctgattattcttaggtttagtcatttaatataatcccagactttttggaggctttgttcatattttcttattattttttctttgtctttgttgggttgggttaattcaaagatcttgtcttcaagctctgaatttctttcttctacttgttcaattctgttgctgagactttccagggcatttcacatttctaaaaatatgtccaaatttcctgaatttttttgtttttttcttcagttatctaattccttgaatatttctcccttcacttcttgtatcattgtttggatttccttgcattgggctttgcctttctctggtccctcccttattagcttaataactaacctcctgaactctttttcaggtaaatcagagatttcttcttggtttggatccattgctggtgaactagcatgattttcgaaggggtattgaagagccttgttttgtcatattaccagggttggttttctggttccttctcatttgggtaagctctgttagagggaaggtctagggctgaaggctgttgttcagattcttttgtcccatggggtagtcccttgatgtaatactcttccccttttcctatggatgtggcttcctgtgagccaaactgcagtgattattgtctctcttctgagtctagccacccagtgagtctacctggctccgggctggtactgggggtggtctgcatagagtcctgtgatgtgatccatctatgggtctctcatccatggataacagtggctgttccagtggaggtggcaggggtgtgcaatggattccatgaggatctttagctttggctgtttaatgctctatgtttgtgctggtggcacttcccagttgtagtagtgtggagagggaccagcagtgggcgggaccctagatctcccaaggttgtatgctctttgtgttccattaccagggtggatagggaaggaccattaggtgggggcagggctaggcatgtctgagctcagactctccttgggtgggtcttgctgctgctgctgctgctgctatgggggatggaggtgagattcccaattattggagttgtgtacctaagaggattatggctgcctctgctgagtcacgtaggttgtcaggaaagtgggggaaagctggcagtcacaggcctcagccagctcccacaccaactgaagggctggtttcactcccattgtgccctccgcaacagtctgtctccaggcggagggtgagatggcttgaaaacttgccctgggctacctgccttccagctgcggaaaaaaaggtcttggttcttccccgcctgtgaagtctgcaagccctctcccgagttctggccaggaggcttctcgccccattcaaattgttacaaagttcagctaaagaattccttctccatgtggagttttaccccctgctcctctggccaccctccccatagatccttgtggtgccaggcaggaatgggctgcttggggacccagcgagctcccagggcctttctgctgcttcctctacccctgtatttcgcttggctctctaacttgactcagccccaggtaaagttagaaacttcttccacaaacagaccttcagcttctccagtgggggtgtgtgtttgggagaggagggtctccctttcccactttcacagttggggcacccacagtattcggggtgtctcctgatcctgcaggagcagtccgcttccttcagagggtctcatcacttatgtccttaaagtgactgtgagtaatgtgatcacatttctgaattatcaataaatagatgatatttaaagccacaaggaaggatgagatcacccaaggactcgaaacaggcagaaaatctggactgttcagagcagtccagtgtttgtgggatgtgtagataagaagaaacaaagaaaggagatttaaaaaagagaagctcatgaggttggaagaagatgtaacatgcacattgtcccagaacccttggtattccgcagaaggtattgtcctttcctgttccaaatgtcagttaataagctgagtgaggaaattgatggcatgcgaatctcagttatacatgatacagaactgagagttataataaaaatgctctatcacagatccaagatcctaaaatatttcaacaggctacaatgatgatggactgtgtccagtgagatgatattttagagagaaatgccaaatttaactctcaggctcaaaatcctcactgtacaagaacaatcaccatgaatatgtagctgaggaccaggctgtgaaaaggacagagagaaacttaggaattgggagtcaataatgcagtgcacctttccaaaaagagtcacagagagttggctggggttaatcaaaatagggtgctgaaaatgatctgctaaagtctagttcaactctcttctttgtcaatccatacctggaacaccattttcagttctgggactacagattaagtttgggtccaaaactgagactgatagacaatttaatgctgaaaagaagataaaccatcatctctgaggatactaatcaacccaagagtatctggagaagaatgtgcagagtagctacagaataataataattagtagaaccaagagttatttaaacccaagaaagagacattctatgggacactgtgcaggagactactgtgaatttcctaaccctttttaagcaagaaaaactatactttccagttgtctcatagctaggaagggctagaaaaagatgatactagaagagactggaaatgtaggcaggggttagaccacgtaggctaggttttgtttgccatgtgaagtattctggtgtctcatctaagagccaaagaaagtcatagatatgttttaagtatgagataaggacatcatcaaaaatgaagttataaaagattaccatctacagtatagaaaatagtgtggagagagattaagagtagttgaaacatttgtaatggtttacactagaaaaaagaatagtttggagtacaataggggcagtggatacaggaagaaagggatagatttgaaaaatacataaatccatcttttttcaggtaaaatcaacaggacttggtattgggttggatataaggacatgcgaaagaggagtaccaataatgacttaaatgaataataaaatgaaagcgagccacccactagacattatttatacaaatctatctatctacctacctacctacctacctacctgtcatctatctctgtatacataacatttatagctttattatctttttctctatcatctatattcataaccatactttacccacatatttatctattatgtctatttatatagaaaagcatgggtttccctaagaggtaatgcattatttcctgtccccagagaagataaatgaaagctagacaatttcccagtggagatgttatagagagaattccattatatgatggaaaattcataggctgttttaaaacatattatcactgatcttcctaacaaaaagtcaagaattctattaagtagatggggtcattgtgacattatttcacagataagaagaggctgataccaaaatagaaacttcccaaagttactgtgatcaggggtgacagaaacataggtttttcgtcttgagagcctcacttattttctctcgttattcagaaagcttctaatattccatgtccatcacttagtcatgccccagctctgctttgccatcctccattttgaagataaatgtggtcctcacgcctcaggaccatggcatgaggcagatcttttcttttttttttttgagacggagtctcactctttcgcccaggctggagtgcagtggcgcgatctcagctcactgcaagctccacctcccaggttcacgccattctcctgcttcagcctcccccgactagctgggactacaggcgcccgccaccacgcccagctaatttttttgtatttttagtagagacggggtttcaccgtgttagccagggtggtctcgatctcctgacctcgtgatccacccgcctcggcctcccaaagtgctgggattacaggcgtgagccactgcacccggccgaggcagaccttttcagtccatccatgcgtgggacgaatgtttccttcctgctctttgtcggacacacagatatgtctatgtcttttgctgcattggcactgtatattcttactagtatagttccatgcttaaatcctggtggtgtaaaagcatcagtgctggagtcagacatccattttagtcatgtgacttccagtaagttattttctttccaccagccttaattttctcatctgcaaaatagccacgatggccatttctcttgatggtagagcattgatacaatgaccttttcaatctatccatacgtgggacgaatgtttccttcctggtttttgtcggacacacagacatgtctatgccttttgctgcattggccctgtatattcttactaatatagttccatgcttaaatcctggtgatgtaaaagcatcagttttggagccagacatccatgttactcatgtgacttccagtaacttattttctttccaccagccttaattttctcatctgcaaaatggccatgccatgatggccatttctcttgatggtagagcattgatacaatgttttgtgaagaggctgcatggtgtgaaccaggtagcaacatgcaacaactgtccagacacttaataaagaagacattccgtttattttgtagagctgaatcgtttctcggtggttgaattgcatgtttattactatctcccaattttattactacaaggcaaattcctttaaatccaggaaggatttttttctagaaagatatgggttctaggttccatcattacaccaaggttgttacactagaaggctaaatttgccacctgtttgatatcttaggaaagaatttaacttttctgtttttcaaagatgaatctgttgcatacagtaagaggtgtgtaatacttaatactctcacattaagtaaaataattaactggctagtcacacacattttcaaaatgggaatgacagatttaatagataggactctcagatctctgttaacatgctttgcaaaatcctttccttaatcattgcattgcttttccatatgttgtcttattatacttgcatataactgcaaattcatgaggacgaataggctccatttccatttaaaaattgtcaggaaaatagatctgcgtggaaccatacagtgcagtttaagtatttccttccagtttgttgctgacaggtttaggaaaaataagttctgtaaaaagtcactttgaactgtaactaccatatcccttaggtagtaattttaaagaattctactgcagggaggcctttctgttgtttaatgatacagctacccataaggcattaaaatgtcccttcttcccattcctatttaccttactcgtgtttttacaatttaaaaaaaaagcgtaaatagcaacttttcccatcttttctgatctaggcataatattctctgatgcacaccatcgtttcattagagaaattgatataaatccacctgctatagccttggggattaacaccaaactctgtgaacatgctgcaaagagaaaaacaaacagaaaaaaaatatctagcattagatgaattaacaaaccaaaaaaccactgctggtgaaccgaagaaaattaaattgattctgaagaaaagtgctgattctttaggaaaatgtgattagaggtagcctggcctggagcttaagattgtcaaaaaacactgttacatgtttgtcaaatcctttttgatgggaagttcacaggttataaaaaaaatacatttcaaagctttaaatcttagctgaagcctaatcctcaatgttgcatatcaccaaccaagcactttgatttaggtatcaatgaccagctacactggacaggtatgctggcttcattcagggtcacagtgctagccatgtcatcttgaaggcaggagtcatctcttccctgtctagccacgtgtgtttcattaatgaggaatagtgggtaggtcctttcttcacatgcctctctattattttgatttttcaagcacattttctataggaagtaggttttattttttttttttgaaggttttaagatttgttttgtaaataaatggaaaagcagttacctccttcacccaaaattccatataaccatatctgtcctgtgattttttggctgaggattttctttttttcaaacttcatgtgtttcccagcttctgctcctttctattggaagcctgaatttatccaagtatccatcttttactgactgcatttacaggaagctgatcttagtgagttatggtgatactgtccccatggttatgatgagtttaggaagtctgtcttagcctggcctgggtatctggtgattgttaccagtttagggtaggttgatggcctaattggacacagtctgactgttcgcataaccaagcgaatccagtcttaaacagtggaccaatacattctgatttctgcataaaccagtttggtttgaatttgaaaaggtcctaacagatgcagcattttgccatttggtgcctgcctgatagaagagtttagactccacacacacaacacagctattattacttactatgtaaaatatcatagatttatttagtcttttcatccctagaggacattcaacgttacttttaccttaatttcttgaaaaacttgcagaagaaaaaagtgatggtcaggggcagtggctcacacctgtaatcccagccctttgggaggcagaggtgggtggatcacgaggtcaggaattcaagaccagcctggctaagatggtgaaaccccatccctactagaaatacaaaaaattagccagacatagtggcgggcacctgtaatcccagatactcaggaggctgaggcagggattgcttgaacctgggaggcagaggttgcagtgagccgagatcgtgccactgcactccagcctgggcaatagagcgagactccatctcaagaaaaaaagaaaaaaagtgataactactttaatttttttgcatgtgaatatccccaaacatgtcttctttgtcattgctgttaagagcagcacatgtatttactgtaaagccactgagtgtcagaccccgtgctacgtgtttgacttccacactcattacaatttacatcaccctgtgaagtagaggcaccatcattatccccagtttgcagatgacaaaagtgaggtgcagaaaggtcatctacctcacccaaagtctgctcagttacagactttcaggccaggtatctgaattggccccatctgattcattccccagcaccagcatggttactgagcttctgccgcgggatggacagtagtccaagtgctacaaacacagcatgaacacaactacccctattcccttggggatcagacgctggacagaaacaaggtttgttaggtgcaaagaaataccatggagaaaaggtaagtgaggataagggaatacagaatgtggcaagatattctttagacggggtggtcagaaaaggccttactgttgaggctggattttgtgcgccatgatctgaaccacacattacagaataccaaaatcaaattcaccctaaaacataagcctggcaaagctggatggcacctgcaaattaggtggatccaaaggcttgttggaattttgagttaggctttaggtggttctttcttgtgagaaatacaacaagtctcacggatacaagagaggactgtgggcttggcagctggcataaaacctgaaatatgaacccctcatgcactccagccttcatgaaaggtgttttcaccttctggtagttgctgacaagattttagatgctatggagtgagtcagtccttagaaagcaattcaagaggcaaggaatcattggctctgagcaattagtcacagtaggaacctgagaattagtcacaaacatgcccttaaatcagtttccagttctcctttcagttctgccttcaacccttatatgagtttaattcaaaggtcattgccagctacagagcaaacaagctcgacactgtccagtggacaccaccaaagagaaagacgatgaagttcaccaaagaatgtgaggaacattaagaaagatgaaggaagactaggcatcatgagtgctggaggccccccgggactctgaaaggatggaaggctacaccatcgggaggcttcgctcatgacagggattaacaggctcggggctgacctatcaaacctgagatcccttcagaatgatcaagcaaaaatgcagctcaagctacctgccttggttaatcccgtggacactctccatggggtgacatatagtcagaattcatctctgttctccgtggaaaatacacttttctcacgataacactacttttttatttttagggaacccttcattcaaggagataaaagtttatatcataattggggattgtagggggggattttcaacccccagaatgaggaactcaggcctggataagcaaaggctacactgacattagacctgggataggcaaatcacagcctgcaaaagctgtcatttttgtatgtcctgcagctactaatgctttatgcattcatatacgtggttaaaaaaaatcaaaagaagtacactgctttgtgacacatgaaaattatatgaaattaaagtttcagctctcacaaagtttcagctttttattggaactgttacacccatttgcttacatgtttacggctgccttccggccccacatgcagggtggaatcgttgcacagagaccatgtggcttgcgaggctgaaaatatttagtacctgtcccttcacagaaagtgtttgccagctccattgttttcaactctatttgagctattgctccttttatataacaaatatttatgtaacaaataaagtagcacttactttactgtcctgaaataagaaccataattaacataatctaccaatacacatattttaaaaattggtataatattttcactgaattataaactataaataaaagaaaatagtttataataaaataataggtactcaaatacataaattttgggggcaggaacagcaccgtaagtcataatggtgcactcagatacttgcgcctctatgcagaagggagtgaatgagacagctgttaagtgcagactgacacacgtggccgtgttgacaacccaaacatcataaccggcagtgctgctgttgcctagcgagagagttcagtgacaatagtaggtgcttctgatggagcgcacggccatcgacaaactgtgtttattagggaagggacttctatctgacctcctctctcctctcagtgccttacattggctgaattcaagcagaagccagtgggcggggcagcctgttccatgaaatccgtaaaggaaagaccccaggggcacacagcagggtggagaacaacagacagtgggtccgcatggcaagtggagagtataccaaccaccatcatctcagtaaacgatgtgaatttccctgatccccccagccaaacttttagatactgtctaacctgatagccactagcacacatggctgtttatgttaatattaactttagaaattcagttactcagtgacacaatccacatttctagaacccaataacccacatgtggctgtggccaccatactggatggcttagattatagaacgtttatatcatctcggaaagtttcactggacagtgtctagtctagactcacatttgctctctgctgttcaaacacactccttgtccagtctataagcaagtgctggtgctatacttaggaaatacatcctgacaccttccacttatcttcaccatccccatcatcaccctattccaagttgtcatcctttctacctggaccaccaaaggagcccccaaatggtctttctatttccattgtggatctctccctgcaaatctgatctcctcatagcattcagagtgatattaaaaaataaatcatgatcatatcagatataaacatcttgaaccagaaatcccactgcatgtgccatgcctgatggggtctctagtacccagctcccacctaccctgaactcatctccttgtaccatttccccactcactatctccagttgcactggacctttttccactcgaaagcactcagggctggcccctgctttgggcttcggcacccacttttccttctgtctggaaagccagctcctttcacaacttcccaggctgggcccttcctggagcaatgtctgagctcaaatgtcatctctgcaggaacaacctagtctgaaagagcacatctcaatgagtctttccctccatgataccctgttctattttcttccaagcatgtattaattctgaaattatcttgctcaattatttttgacacatttcccagctgcttcccctgagtggcatgagctctgctaaatctcaagacaaaggcaagtgcccagcacaaagtgagctcaggaaatgcttttcaaatggactgtgcttctgcggtacctctaaaatgagttacatcatagcttatttgttcactgatagcaactggttgtacaacagctagggctgtaataaccacacggtgagcaacaaaagcaataactcttctgcatttgttttgtactatgggcctttaaaagcattgaagttcagccgacaccgccatctcattataaatcacctctggagaggatggttcattagggaacatcagaggcaacagattgggctgaaaagaaaaggcagtggctttgtgcataataaataattcattttcagatgactttttctatttcaataagacttctcaatttcatatttttatgagtacacctccttgcatttgcattttccaaagatctttttgcatatggaactgatcaacagcctacgctctgtttcccgtgtgagagggatggagtggactggttatgagcttagactctggagctcatccatctggaatctaatttcagctcagcttcttagctgggtagcttggggccattcttccaactctgtgtggcctcatccatctgtgaaatggggataatagtcatatcaacttcactggttcattgtggaaattaaattctttatatatataaagaatttatatatatgtaaagaacatatatatataaacaatttatatatatgtaaagaatatatatatatataaagaatatactttcatacgtctggaatcagaaatcctgctgctgcaggtaccatggctgatggggtctctagaacccagctcctgcctaccctgacctcatctcctccatatatgtgtagaagttcctagaaccatgcatggtacctaatgaacagtaagtatttggtgtaattactgtgaatgctgtttagggagcaatggctactcaacaaacacacaatgcaagaaggtgctttagagaagagattttttcaagggctgtcttaatttgcacttggttgagaaagtataaaaatgaaagccatagtgtgctgtgcagtgtgactgaattttcgaaaagtctgagtaaaacaacagagggtatctggcatattaattaacaggctctcacaagaaaagaatgctatgaacagtcaaataaaaagagccaagaatctgcttttatgccaaaaattcaacaaaaatattattcaagccaggaaaggaagctcctttccctaatttgacagccttttcttaagtccagatcttagtgggtgactgtcaccacacattacttgtactgacttcaaaactgcagggagataggtggcctgggttaccatctcctcgcaaatccatgtgtattccaatgagggataaggctgttctcttacacgcctttactgagcatctactatgggctggtcctgtgctttctgctgggggatatcaggaggacaggggttgagcataatcacagtactggaaggatgtaacacaaaccaggagaatacgtgtgccaggagaatacatcccaaagattctgaagatgaggggagagtatggttggtgaaaaggaagttcattttatttaagaagagaaatgtacttgattcagtgaagcttatttaaaatgtatttcatcagaagatttacaatagtaaaattatatggttctaaaaatataagttttgcctgctaagatcacagaaatggaaattttctaccgaatcacagatttaaagaacatgccttaatcgagaagatttaggaagatgcagctgagataaggagggaagagattccttaacgattacatgattgtaatcccaagaatcatataaggaaggaactcagcattcaaccaagtaggtggagggtcaggccaagaataatctgcttagcttcacctgtagttacctgggttatggagtcccctactcatgctaatgagaaaacagcatctgagtatgaaatatcacacgtcaggaggggtttactggagtctagcagcttccagtttggaaaaaaggcttggagattggacaggtttaggtgggtgctaaggtttgaatgttccctccccaaatcatgttgacacttaatccccactgtggcaatactgagaggtggccctttaagaggtgactgggccgtgagggccctacactcgtgaatgaattaatccattcgtggatgtgaattaatccattcatggatgtgaataaacccattcatggatgaatggatgaatgggttatcatgggagtgagactggtggcattgtaagaggaggcagagagacctgagacagcacattagcatactctgccccgctccatgcgacaccctgctctacctcgggactctgcagagagttccccaccagcaagaaggtcttcaccacctgtggcctcttgctcttggacttctcagcctccataactttaatacataattttccttacaaatcgcccagtgtcaggcattctgttgtaagcaacagaaaatagacaaatacaccaaggatcaaagaataaaatgagacgaggaaggacttagagtgcaaatcaaagggacatactgagcctatgtcctcccaagcttcttgggtatggctcctacttaagatggctccaaacacatgatctcagccagcaagaataactcaacagtgtcagaatcctccgacttgcccgctgccctcattgcgtgcaaggaaaacatgggtgcacagagtagaggagccaacatggatcctgtctgagcacgaggatcaaggaagaccctgtggtggatgtggcatgggagctgggctctaacgagagaattctgagatgcttttcccctttccatcagaatcacgtttgagaaagagctcagaatgtgatattgaattgcacttcctaaagagcaatggcacatttgattcttcacttttgtttaagagctctgcggtcttccccaggatcttcagggctgggtttggcagatgcgtctgtatgtatccttatgccattgtgaacgccacgtaacaccatcagcaccaggtccctgtagggctggagttctcctttgatttttttcaaggataatacagacattgtctgtcctgaccatgtctcctgattaagttttatctcaagtttcagatccattctaataactaaaacttagtggtcatagctgagacccaaagcaaaatgagaagctggtcaagagacccgcctgggagggcacattcttaaaatcccacaggagagcagagtcattcacctctacttcctgcacttacaacggtaaccacaagtataatatccaaacagccactacccaagaggaagaaaagagtttgttttattttaaaatgaagaggacttgtaactatgttttaaaggactagctgataaggcattcaaaaattgataaagtatatacctatcagtgccatgacccctgaacactggtgtaaacttgaaacacttgttttagccaaaactcaggaggcagttaggagagaaggacgttgaagaactttgagaaacggagacctttctccttggaaagctgagtcactacaaaggggactccaacttttccaagacatgcaaacaccaggccgggtgcaatggctcatgcccctaatcccagcattttgggaggcagaggcgggtggattgcttgaggccaggagttcgagactagcctgggcaacctggcaaaaccccatctctactaaaatataaaaattagctgggctaatatctggagaagagtaaacaccagtctccagattcagacactaacgtggttacagataagcacttgataaatgaatgctaatgcacctttaatgaccttttccctcagaatttgcctccctaaaaacaaaaccatatttacttacaacatagtaaggcatgatttcctgaactgaaaaaacaatgtaataaatctcataaaaacctacaactggattaagaaactaaaaagtttcaagaccctagacattagggggaaaaaaggcaaactattgaagaagacttcaagaaaaaaatacaaaatattaaaaaaaaattgtttctaaaaagtagctttcgatgcaagcacctggcggcatctcatcccagagctttcctggagatgaaattacacagcacacaaagaatggagaggccaccagcttcagctcaagtggacctcagatccttgacaacagccacaactgtgctcccttccagcattatttttgaagactgttgatctacttacttagttgtgctgtgtgtgaatattttaatatttgagattttatgccttttttgtcttggatataattagagggagatgagggatttccattatgcaaaagataatggatttgactacatacaaattacacaaacagacagaagtctgtgcaagccaaaaaagtctgaccagcaaagttagcaaatggtaaactagtaagagtacctgcaatatgtcaatggaaaagttaggatcgctaatatatagaaatagaaatgtggttaccggtgtctggggaggagggaagagggaggaggaatttgtgtttagtagctatagtttcagtttgcaagatgaaaaagttccagagagccattgcccaacaatgagaaaatacttaacattactaaactatacacttacaatggttaagatggtagctttaatgttatatgacttctaccataataaaaaaagatttataacaaaggtctaagaataaattgaattcccaaggagaagagaaaatgggcaaagaacaaatgcttaataggaaataaacatgtcatctaagaagggcaaattaaaacaacattgagatataagttttgctaaattttaatatttcatgttggaggaagctgcaggaaaatgggtatcactatgcatagcaagtggaattttaaactggttaagctttctggaaggcagtttggcaaacattatgaaaaaggaatacaatattgcatatcctttgatttgaatttatttctaaaagttgacctgaaggagttcattaaaaatgtgtgcaaagatttttgtacgaaaatataaaccataggttattttataacaaaaaagctcttaaattttaatcttgtgtggtagtgtcatggagatatacggggaactttttgtttgggactaaagctaggatgcatcttttattcctgtgttttcttcacacctatatccaatgcattgggaagtcttgtcttctaaggcggacgctgctgctccactgctattatctcagccaggacagtccaggacagcaccagacatttctccatgtgcactcccttctcccactgttgcatgcttgcagctgggcatctggctcctggaatagctcactctctccagcctcccttgcagctagatctcagcacttggcagagctcctagactgatggggtgggagcagaggtggggtgctcgggatggagaggagcacactctcccctttcccacttataaaatataaaaaattataggccaggtatggtggctcatgcctgtaattccagcactttgggaagccgaggcaggtggatcatcttaggtcaggagttcaagaccagcctggctaacatggtgaaaccccatctctactaaaaacacaaaaattagctgggcctgttggcaggtgcctgtagtcccagctacttgagaggctgaggcaggagaatcgcttgaacctggggggcagaggttgcaatgagctgagatcacgccactgcactccagcctgggggacagagtgaaactctgtctcacaaaaacagaaaataaataatgaaaaaaatttttaaataatgtttgccttaactgccttttaaataatgtttgccaaactgccttccagaaagcttaacaaatacaaaattccacctgctttgtgtaatgattcccattttcctgcaactccatcaacacggaatgttaaaatttagaaaatagctgcaatgtgggtatggttgtcattaatttggaggaagagtgatggatctaaaatttctttcacatatttctcaataaagatagaatgaacaaaagcaaagtaatttaataacggcaaccacatcccctgcatgacaacactcttttaccaaccaagtcaaggttaaaataaggcaccttgctctgggaagactcagaaccactaccaatacaaaaggtagatcagacagcagtctggctctccacttagttcgaaaggaagccactcagagcccattgctaacaactcagcccaccacgttttgttttgttttgttttgtttttgagatgaagtattgctctatcacccaggctcgctctgtcacctccgcctcctgggttcaagccattctcctgcctcagcctcctgagtagctgggactacaggtgtgagtcaccagagccggctaatttttgtagttttagtagagacaaggtttcaccatgttggccaggctggtcttgaactcctgacctcaggtgatccacctttcttggcctcccaaagtgctgggattacaggcatgagccactgcacccagccccaccaagttttaatccaatacatttaattcagctcaagaatcagtgggtgcctacatactgcctaccactcttcttatgttgtaaaatatgggagctgtggataagtcccttacctgaaaaaatttataacattattgccagagtattgcatatattttaaattcagtagttaagtaatcataatatagataacacttactgtgtgtttgctataggctgggtactctaataagtacttttttttttttttttttttttgaggcagggtctcaccctgtcacacaggctggagtgctgtggtacgttcttggctcactgcaagctccgcctcccaagttcaaactattctcatgcctcagcctcccaagtagctaagattatcggcatgtgccatcacacctggctaagttttgtagttttttttttagtagagatggggttttgccatgttggtcaagctggtcttgaactcctggcctcaagtgatctgcccacctcggcctcccaaaatgctgggattacaggcatgagccaccgcacctagtctaagtacactttaattactgttttatccttacaactttataagtaggtattatccctgtaactccctctacagatgaggaaattgaggcacaatgaaattaagtatggttgcatgaatagctagtggagaccataatttgttatgttattctttttcctgggagactcgtaatgaccaatgaaaaatggaaaacaggtactaagatgagggacctctttgagcctcagtttcctcaagtggaaataaaggagaattgtcgaagatgctgttcattgccttagaataccttttcttttatttccttgtaacagaatttgagcaatctttcatgctaaaaaagtaggtttctcagccttccttacaattagatgtggctatataactaagttttggtgaattggatgcaaccagaaactgtatgttggattcttgtaaagttcttttgaaaaggaaaagagactggccctgtttgaactttggcctttttaagttttgctggtctgcagaatatagatgtgatggctggcatcccagcagctatgttggaccatgaggtaatcatgaggatggaatccatgcacctgactgctgaagtagaaggaaagatggggcctgggtctcagatgtcatggaacaccaaaccagccctagaccactaaccttaggaacttctttacatgaaagaagaaatctgtacttaactcataattagccagagggtaagttagggtgcctgggcagggagctctgttgctctcagccaaatgcaattcctaattggtacacatgtcaagggggtctccactgagatttttgtttctagctctaccattatacattcttagaacattacatagggctgggcacggtggctcacatctgtaatcccagtactttgggaggctaaggtgggtggatcacgaggtcaagagttcaagacaagcctggccaagatggtgaaaccctgtctctactaaaaatgcaaaaattagccaggcatggtggtgggcacctgtaatcccagctactggggaggctgagacaggagaatcaaccccggacggcaaaggttgcagtgagccaagatcgcaccaccgcactccagcctgggcaacagactggcactccgtcaaaaagaaaaaaaaaagaacattacatgtagcatagcaagaacaggtgctgtaggatgggaaatgtttcagaggctgttgaaggacagagagagggctcttgtgggactgaggactcgtataggccatgaggaacgatggggtttagaagaggcaacagcagcatcagggccaccagaggcaggagaaacgccgagtgtggagtgtgggaaacagcatgcagccgggcctgggccgagggcagcagcaggaggtgctcagggagagctgctcagtctcctcagaccagaggtgtggaaaggagcaaattcaaaccactacttgctcaagacaaacggcgttgccattcccagtgacagaaccactgagagtccaaagcaaagggcacggccgtctcacacaaaataataaccagggaggcccagcgcctctcaaataaaacagtaagagcccttgtcaactacagtaacccaaacacctttacatttcctaatgaacaacacagtaaccagtttagtgtcaccgggcagctgtccagttgccttggactgaagacctgatttctggtgttctttcagcatgacagaagaacgctggtcaatattttctaattggtggtctgggggaccaggcgggtgtttgccaaatgtctcagcacatttcactcctatgcttgatctacatggactccagagctgtgtgtgttcgagatccacaggtgtctacatcatatgctacaaacacatctatcgagtcgtcaacaattttcacacaatagcagacccaaatctaatacctggagtttattttctaaataatacgttaagaaaattggtttatatttgtatagatatagatatagatacacacacgcacacacacacacacacacacacacacacacataacgattggctattggcagtcaactttgtggtttcgtttctcactgtcctgattcttggctcctccccttttccccacccagcctgggactcagtgcggcgccggcgccttcccctcccccgagttcagttctaacagcccagggcggggcttgcttaccatagccagcggcacaactccaatcaagtcctttgggctcacatagatcttggacactcccaagtcagacgtgatctctccggggtactcgacctgccacgtgaccagctgtgtggctggcaggtcaccaggctcttccacctccacatcgatctgcatgacctcgtaggaggcgccatccgcactggagagaagacacagaggagaacagctttcagggactgatgaggtatggcacgcttggcagagagtgggcggcccttggccatttctctatgtacctccacatggaaccaagcgcacacatctctgcaaagagcattcagagatgccattccaaaacgaacaaaggagctttaatatgctctgcagcattagcctgggcttagatactgtcactccaggttccaaagtccttctgtttgtgggctgctcagctgccccagagcaggtatttgtggataattatgggaaatagtgattgcatttcttaaacacttcctttcccattctccatttaggagaacacttttcctcactctcacaaatttctaggcaacttccattggattttccaaagccacagccagattgagttggttgcacagaattttaaggatgtctgagggtgacacagttgtgttattggcagtgataagacagaattgcacagaaacaggcaacgtgtgcacaacaaaccagggtcaagggggtcgctgtgatgagcatggagaagtcaccagatattacgtggagatgggagtcattgcgacaaagactggtttctagaccctcaattttcctataagcatacatctagaaacaaatccacctaggactttctggattatttttacagctatttaagtaattaattagctgcctgcctcatcatagtgatttttggtatgatgtctgctcttctatgtgacaggtagaaaaatgtagatttggtgcctgcctctgcctgaaaaggaagtgaccagggtgtagctgagaatgaacagaggaatccgctgagagaggtactttttaaagcctcagtggccaaacaacgtctacgtgtcagatctatttctaaaagatttgaattttacacctttgagaaatgatcactgaactctgacatgtaggagaataaggtttgttcttttatatgtgacaaagctattgacatttttatcacaccgtcaatctcacccaagtttaccggtaagaagctcagagataaacggtggggcttccagggagccttgttctcaataggagggatgagatggaaaactagaagatcaggggagattctaatgaacagagaaggagggcgagagagacagacagagagagagaaaggagggagggagggaaaaatggaaggagagagagaagtagaaagaaaggaaagataaaagcgatcacttgaagtcaggagtttgagaccagcttggccaacagggcaaaactctatctctactaataatacaaaaattagctgggtgtggtggcatgtgcctataatcccagctagttgggaggctgaggcatgagaattgaacctgggaggcagaggttgcagtgagctgggatcacaccagtgcattccagcctgggtgatgaaatgaaaatatgtctcaaaaaaaaaaaagggaaaagaaaaagaaagatagaagaggaggaaggggaggaggaaaagaaagaggaggggaaggagggggccggagaaatgagatgagaagaactgccaaaagaaagaaccccaaatctcttccatggaacggggtagctgcaatgggctgtgagtaatgaaggggaaaagacgacagctggtttttgaatcctacaaaacgcactccctcttggcttttgaaagaaagtggtttaattctttgagaagcagctgctgtgataaaaatcccctaggccacggtgggcttttttctcccatacctttctttacataagaaaagaatgccactgtctctttgaagcccctgactggcatttctagtcacagctagagagaacttggaattaagatgctagaatgcaccttcgtttttgtattcgaacttgacaagaattttggtatgactttcccattgatgaaatgggataatctccgtctccgagtctgtgggcctcgccttctgtttttaatcacaaagaaaggaatttatataacagaattagcattacttgcgtttgagctgtgtgaacaccggcataaatgtagctcattgtacacaataactgcccatatgtccacatcacattctacccctatttccttccagattccttgacctcaaataaaaaccaacaatccttgcccgcagtagaatactggatgcctcccaccccacagccccatacttctgtttttagagtttgttttatcaggaaaaccttatacatctcttcatatatgtaagttcttgccatcctagaagagccacctataatacccttcaattaatagaaggtaataagtgctccctttacttcatctaattttactcttcctgtaaccttacgtgattgttctatacatttagattttccctttttctttagatccctttcccagccaagatgtaaaagcaacaaggtcttttttcagccaactgccctctctatgaagtggtgatgaaaatattctatgttgggaattctttttctttttttttattatactttaagttctagggtacatgtgcacaatgtacagatttgttacatatgtatacatgtgccatgtttgtgtgctgcacctattaactcgtcatttacattaggtatatctcctaatgctatccttcccccttccccccaccccacaataggccccggtgtgtgatgttccccttcctgtgtccatgtgttctcattgttcaattcccacctatgagtgagaacatgcggtgtttggttttttgtccttgcaatagttcactgagaatgctggtttccagcttcatccatgtccctacaaaggacatgaactcatcattttttatgtctgcatagtattccatggtgtatatgtgccacattttcttaatccagtctatcattgttggacatttgggttggttccattactgggtatatacccaaaggattataaaacatgctgctataaagacacatgcacacgtatgtttattgcggcactattcacaatagcaagactaagttgggaactctcaatccaggactataccaaccttcaggaaggttgtaccttgagcttgtggggaaaacgttgtatgcgcgtgattttctggaaagattccttagcttgcatgagttccccaatagttcatctacagtacgattatggaccgagttcctgacaatttcctttataaattctgcacatggtgatctcgttggaatatctcatcacatgtatcttagtgtgacagtgggaatttgaattttaatgcccctttgtaaatatttagcacttaacagctttccaaactcttgcgtagtaggcaatatttatcacttctccatgtttcactctaaagacaaggactgtgcctttgcagtttgtgtgtctgacagatggtacatgtcctgaaaatggtggtcatatttatcttgttgcattttgtgcttacaatagagtgtaattcctgatattcatcagaagggaatctgatgtattgtaggagataaatacagttggttaaagagaagtttataaaacatatctggttaaagcagtgatttttccacctcccatgcattcaaattgcctggaggaactttacaaataaagcaatgtccaggcatcatccttacagatttctgattgttcctgagtggagccagggtcaaaggtgttcaaaccagagcgactccatcctgaatgagggctggaaaatgaggctggcccttgctgggcagcattcccagaaagttaggcattcctagcctctagatgtttacagttaagggaacaaattaataatgtttactaaacagacccagacttgggagtgtccagatatcccaatagctggagaaaaaagacattactgaagttgcttatcagcttgaggagattttgggctgagacgatgggcaggatacaaaatcaatgtacaaaaatcacaagcattcttatacaccaataacagacaaacagagagccaaatcatgagtgaactcccattcacaattgcttcaaagagaataaaatacctaggaatccaacttacaagggatgtgaaggacctcttcaaggagaactataaaccactgctcaatgaaataaaagaggatacaaacaaatggaagaacattccatgctcatgggtaggaagaatcaatatcgtgaaaatggccatactgcccaaggtcatttacagattcaatgccatccctatcaagctaccaatgactttcttcatagaattggaaataactactttaaagttcatatggaaccaaaaaagagccagcatcgccaagtcaatcctaagccaaaagaacaaagctggaggcatcacgctacctgacttcaaactatactacaaggctatggtaaccaaaacagcatggtactggtaccaaaacagagatatagaccaatggaacagaacagagccctcagaaataatgccgcatatctacaactatctgatctttgagaacctgataaaaacaagcaatggggaaaggattccctatttaataaatggtgctgggaaaactggctagccatatgtagaaagctgaaactggatcccttccttacactgtatacaaaaattaattcaagatggattaaagacttacatgttagacctaaaaccataaaaaccctagaagaaaacctaggcaataccattcaggacataggcatgggcaaggacttcatgtctaaaacaccaaaagcaatggcaacagaagccaaaattgacaaatgggatctaattaaactcaagagcttctgcacagtaaaagaaactaccatcagagtgaacaggcaacctacagaatgggagaaaattttcgcaacctactcatctgacaaagggctaatatccagaatctacaaagaactcaaacaaacttacaagaaaaaaacaaacaaccccatcaaaaagtgggcgaaggatatgaacagacacttctcaaaacaagacatttatgtagccaaaaaacacatgaaaaaatgctcatcatcactggccatcagagaaatgcaaatcaaaaccacaatgagataccatctcacaccagttagaatggcgatcattagaaagtcaggaaacaagaggtgctggagaggatgtggagaaataggaacacttttacactgttggtgggacggtaaactagttcaaccattgtggaagtcagtgtggtgactccttagggatctagaactagaaacaccatttgacccagccatcccattactgggtatatacccaaaggattgtaaatcatgctgctataaagacacatgcacatgtatgtttattgcggcactattcacaatagcaaagacttggaaccaacagaaatgtccaacaatgatagactggattaagaaaatgtggcacatatacagcatggaatactatgcagccataaaaaatgatgagttcatgtcctttgtagggacatggataaagctggaaaccatcattctcagcaaactatcacaaggacagaaaaacaaccaccgcatgttctcactcataggtgggaactgaacaatgagaacacatggacagaggaagaggaacatcacacactggggactgttgtggggtggggggatgggggagggatagcattaggagatatacctaatgtaaatgatgagttaataggtgcagcacaccaacatgtcacatgtatacatatgtaacaaacctgcacgttgtgcacatgtaccctaaaacttaaagtataataataataaaattaaaaaaaagacatccctaattttgttttaccgataataatgttgccgggcgtggtggctcatgcctgtaatcccagcactttgggaggctgaggtggatggatcacttgaggtcaggagttcaagaccagcctggccaacatggtgaagcctcatctcttaaaacaaaaaaaacaaaaaaaaacaaaaaaaaaaaacaaatgagccgggcatggtggcgtatgcctgtaatcccaggggaggctgaggcaggagaattgcttgaacacaggaggcagaggttgcagtgaactgagatcatgatcgtgccactgcactccaacctgggtgacagagcgagaccctgtctcaaaaaaatgaagaaagataataatattgattcttgcaaaacatagtaattaagaaaactaatcctttgtcacaaacccttgtagcagaacacatttctccatatatacaagcattgttcctagggtggacgccttcctcctcttactttcgggaatgtcctactctgtctgtggagtagctgtcctttcgccactttactttgttaataaacttgcttttgctttgcactgtggactcgccctgaattctttcttgcgtgagatccaagaaacctctcttggggtctggatcagaacccctttcctgtaacatatttctggtgaccacagatgggactacagtgcagaaagcctggtccaaggactacctttgggtaaatgttggggtcctgtaacctacttctggcaaaccccaaatggatgatactgaagaggcccccgccccaaaggaaaatcatctgcatgcaccaactggctaactttgggtaagtggggtgcatatacctgggtaaagaatgggattgggttagaggcccaacttagggaagtcagtctctcctaagacagaatgggttagaggaacctcttaataaaaggcaaggatgcttgaccaaccttggcttagaggcctgactttgggttaggagctgacttagttgcttctaagatttagggggttggaggctcctctcagtaaagtccctcttggctaagagcaggtttggcaccgcaggctctgctcttcatattaacctgcctttttctcttgctgcatgaatcaatttcttggttgctgtctctgtttcactgtcattttcaggagactttatttaacgggtcttagggattttaacttactcttttcctacgtgcctcccgatttccgtccgtctgcttgcaaaacattgggagcaaaaagcattgatggctccgtctctaaaattgctgattgagatttggtatttaacagctatgagcagtaagattagatagatgtggttacgttttgttgccactatgccgactaggtgtgattgagaagcacaaggatggaaatcaggggactcttccctttgctttttgtttcatttcgcacactgaaaaaacttctttcctttcttggatttgggcaaactggctttgctcatccactattgcccagaacctgcttgctctggtccttctcatctaaatcctcttcatttcctttgccttattcgacatttttgttaaagtccatgttgtggtttatctaagattcatggctcagttcacttacgttatttggataatgtgaataagagaattcaatttttggcagggatcccctcattaatgcagctggccttcaaaacctgtcttaaccttgttagtggaactcggccagtggcaatacaatctcgcaggtttggaacttttctttcagcatcacctgcttccttcatgggaaccacagcatcgattccaaagaactcaccgctagaatgtattctcgaacactgggaccagtttcaacggaatgggcttaagaagacaaaactggtgtttctatgtaatactggtatttggcttcagtattatttggaaaagcaagagaaatggcctcctgctggaactatgggctttaatactatacttcaagtgagtgttttgtaagtgggagggaaaatgggatgaaatatcatatgttcaagcatttttgctgctcattcaggataaaaacctgcagcaggtgtgtgcatgtttgatgagaggaaaagaaaaagagctagacatggttctgtttatgtgatggattacatttattgatttgagtatgttgaatcagccttgcatcctaggaatgaagccaacttgattgtggtggataagctttttgatgtgctgctggcttcagtttgccagtattttattgaggattttcgcatcgatgttcatcagggatattggcctgaaattttcttttttttattgcgtctctgccaggttttggtatcaggatgatgctggtttcataaaatgagttagggaggagtccctctttttctgctgtttggaatagttttaggaggaatggtaccagctcctctttgtacctctggtaaaattcggctgtgaatccatctggtcctgggctttttttggttggtaggctattaattactgcctcaatttcagaacttgttattggtctattcagggattcgacttcttcctggtttagtctttgtagggtgtgtttgtctaggaatttatccatttcttctagattttctagtttattttcctggaggtgtttgtagtattctctgatggtagtttgtatatctgtgggatcagtggagatatcccctttatcatttcttattttgtctatttgattcttctctcttttcttctttattagtctggctagcagtctctatttgttaatcttttcaaaaaaccacctcctgggttcattgatttttttgaagggtttttcatgactctgtcgccttcagttctgctttgatcttacttatttcttgtcttctgctagcttttgaatttgtttgctcttgtttctctagttcttttaattgtgacgttagggtgtcgagtttaggtctgaacatatctcacaataataagagctatttatgaaaaacccatagccagtatcatactgaatgggtacaagctggaagcattccttttgaaaaccggcacaagacaaggatgtcctctctcaccactcctattcaacacagtattggaagttctggccagggtaatcaggcaagagaaagtaataaagcatattcaaataggaagagaggaagccaaattgtctctttgaaggtgacatgattgtatatttagaaaaccccattgtctcagcccaaaaactccttaagctgataggcaacttcggcaaagtcttaggatataaaatcaatatgcaagtatcacaagcattcccatacactaataatagacatggagagaaccaagtcatgaatgaacccccattcaaaattgctagaaagagaatacaatacctaggaatacaacttatgagggacgtgaaggacctcttcaaggagaactacaaactactgcacaaggaaataagagaggacacaaacaaatggaaaaacattccatgctcgtggatagaaagaatcggtatcgtgaaaatggccatgctgcccaaagtaatttacagattcaatgctatccccatcaagctaccattgactttcttcacagaactagaaaaaaactactttaaatttcatatggaaccaaaaaagagcctctatagccaagacagtcctaagcaaaaagaacaaagctggcagcatcacgctacctgacttcaaacaatatcacaaggctacagtaaccaaaacagcatggtactggtaccaaaacagatatagagaccaatggaacagaatagagacctctgaaataacaccacacatctacaaccatctgatcttcaacacacctgacaaaaacaagcaatggagaaaggattccctatttaataaatggtgctgggaaaactggctggccatatgcagaaaacagaaaccagactccttcctttataccttatacaaaaattaactcaaggtggattaaagacttaaaaataaaacctaaaaccacaaaaaccctagaggaaaacgtaggcaataccattcaggacacaggcataggcaaagacttcatgactaaaacaccaaaagcaatggcaacaaaagacaaaattgacaaatgagatctaattaaactaaagagcttctacacaacaagagaaactatcattagagtgaacaggcaacctacagaatgggagaacatttttgcaatctatccatctgacaaaggtctaatatccaaaatctacaagaaatttaaacaaatttacaagaaaaaaacaaccccatcaaaacgtgggcaaaggatatgaagagacacttctcaaaagaagacatttatgcagccaacaaacatgaaaaaaacctcatcatcactgatcattagagaaatgcaaatcaaaaccacaatgagataccatctcctgccagtcagaatggcgatcattaaaaagtcaggaaacaacaggtgctggagaggatgtggagaaataggcacacttttacactgttggtgggagtgtaaattagtttaaccatagtggaagacagtgtggcgattccccaaggatctagaaccagaaataccatttgacccagcaatcccattactgggtatatacccaagggattataaaccattctactataaagacacatgcacacgtatgtttattgcagcactattcacaatagcaaacacttggaaccaacccaaatgctcatcaatgatagactggataaagaaaatgtggcacatatacaccatggaatactatgcagccataaaagcaaatgagttcatgtcctttgcagggacatggatgaagctggaaaccatcatcctcagcaaaccaacacaggaacagaaaaccaaacaccacgtgttcccactcataagtgggagtttaacaatgagaacacatggacacagggaggggaacatcacccaccagggcctgtcgggggtagtgggtaagggaagggagagcatgaggacaaatacctaatacatgctgggcttaaaacctagatgatgggttgatgggggcagcaaaccataaggcacatgcttacttatgtaacaaacctgcatgttctgcacatgtatcccagaacttaaagtaaaataaaataaaataaagaaaagaaaactggccattgggagagggattgcccagcatcccagagggagccattggcacctgaaccaatgatggccgaaatagccaggcaatcctgagtgacggggcccgagaccttccaccacagctcccattggacaactagccatatctctggaggagcctcgggtaacccttgatgtggcaggtaagaatagtaacttccttctggaatgcttagtcggttttcacccattgtaatgggcctcagtcatcccaaaactgtactgtcaaggggacagatggacaagtccatggatgccattttacttatcctttaagctgctcttcagggactttggttttctcctgaatgccccactccctgttgggaaaggatctgttaactcagctgcaaacagtagtatctttttgaaattataaggcagacagaaattgctccttctcctttcctgtgaacaaataaccaggctttgttgctagatgctccggatataacacttgaagtatgccagactttgaatccagctacctatttgcctgaacccacaggcaccctaggtcattcttgtattcaagttatggagcaagtttactccaatcatccatatttaaaagatgaggctctagataatcctgaggtagaatggtttataggcagaagtagctttgtgcaccaaggaaaaaggacaacaaactgttaataccaggtgctaatcagtggaaaatagttaagcatttgcatgactctactcattggggaagagagtccttgtttcaattaatgtcttacctttttataggaaaaggcttatttaaaacagtaaagcaggtaacttgggcctgtgaactatgtgtcgggaataatccaaataaccaaccttcacctcctgctctagtaaggcctgttcagcacacgggaacataccctggcaaagatcggcaagtaggttatactcacatgctcccatgtaaagagtttaaatatttattagtattcattgacacatttaccagttggatcaaggcttttcctatccggtctgaaaaggcaattgaggtttctaaactcttgctaaaggaaataattcctagatctgggctgcctaagggcttacggagcaataatggcccatctttcccagcgacaattacccaaaacatatcttcagccctaggaattcagtaccaccttcacttggcatggaggtcagtcttcggggaaagtagaaagagctaatcaaactctaaaaaggactgttgctaaactatgccaagaaacatcagaaatctggctgtctttattacctgtagccttattacgggttcgagtggtccctaagggaaatctgcacctcagcccttttgaaataatgaatggaagacctttcttaactacaggcctcctaatagacatagataatttcaagctacagatttatgtgatcaacttaggacaagtgcaaaacacactccttgaatatggaaatcaaagacttctcttccccagctaaggaagagaaccttgttacaacccagcagggaagttggatcctattaaatacttggaaggaaagatccccagcagatcaactttctcccaaaatggaaggaacctatcaagttttccatagtaccccaactgcagttaaacttctgggaataaatagttgggtccacttatctcgaattcagcctgtctcttatgaagtcccacaggccaacggaacacaagagacagatcccgtttattcccgtgagccaatcagtgacctccgactcctgttcaggagaaatgaaggggatgggtaacataaatacatggatttgtattctacttttgggtataagttggaatcaggcagagagtgacttatttactgagtgggcccagacttcagcctctctgcataatcagacaaactgttgggtatgtggagaattgccactttcctccacttccagttgccctggcatattcaaccaaccaacccaagttcatggggattttattatgactgggaaactgaacatcataaacataatccctcttttcccatgtatcatagccacacgggccttagccccttcccctcctataaagagacaagaaggcacctttttaacctaattagaaaacagctaaactccaccccaactttaggttatgctatacatgacgaatgagggcaaatgacagctgttccagtgcaggtatcaggcaaagctcctgcatgttttgaaagcctcaataatagtcaccaccagactgaaacccacgatataggatggctgtcacctcaacaatgtaatcagacccttcttctaacagaccagatgtggatgggatggcaagataatctgccaaaaatggatgactacccttctcttcggggatggttatgggcttgtggaacacatggctggcctggccatacttaccttataactggactggaagatgtatgtgaggtcgtgcttatctcccaggatgcatcctcaccaaattggactctctcccatctaactgggaaatggtaaaagctcaccataggtgacaaaaacgggcatctcagtggttctatccgatggctatattttccccacaggcacctacaatcagtatccagttacaagttaaagccttagccaagcacactgctgcagctttcaataatacacgccctggccgtacctcctaactgaggaaacttctcagattaggcaggtaggcttacaaaaccctatggctttggacattttaacagcggcccaagagggaacttgtgctttgatcgaagccgaatgttgtgtgtacgttccagactattcacataagattacccaggctatgaaagctttagacactcacatctctgccattgctgcactatcagtcaaccctatctcagtttggttccaacaactgcccagttcttggaatgcctttctgcttagtttacttggaatgattttactcatcgtgctttgctgttgtggaatatattgtggttgtgctctttgtgtaagaatgaaagacaagttcactcaacgctttcttaaattggaaacttgttaatctcccagatatcaccttttgttggaacttggagttaagaacaaccctcaccataccagtgctctctgactgagcttctctctaccctgaatgcaagacaccctcgcagttaggcaggaatatcatcactcctattcagcctgaagaagttacagaagatggatcctcatccctctgcaactcttcagattaaggatcctgttgtaaagggaagagggagatatgtcagaggcgttcgaaccagagcgactccatcttgagtaagggctggaaagtgaggctgggacttgctgggctgcgttcccaggaagttgggcattcccagcctcaagatgtttatgggtaagggaacaaattaataatgtgtactaaacagacccagagttggagtgtcctgatatcccgatatcttgagaacaaagacattcctaattttctttaaagataataatatcgattcttgcaaaatatagtaataagaaaattaatcctttatcacaaacccttgtagcagaacacacatccccaaatatacaagctttgtacctagggtggacgccttcctccttttactttcaagaacatcctactctgtctatgaagtagctgtcctttcaccactttacttttttttttttctagcatcagagtgaacaggcaacctactgaatgggagaaagtttttgcaatctatgtatctgacaaaggtctaatatccagaatctacaaggaacttaaacaaatttacaagaaaaaaacaaacatctccatcaaaaaataggcaaaggatatgaacagacccttctcaaaagaagacatttatgtggtcaacaaacatatgaaaaaaagctcatcatcactgatcattagagaaatgcaaatcaaaaccacaatgagataccatctcatgccagtcagaatggcgattattaaaaggttaggaaacaatagatgttggcgaggctgtggagaaataggaatggttttacactgttggtgggagtataaattagttcagccatcgtggaagacagtgtggcaattcctcaaggacctagaaccagaaataccacttgacccagcaatcccattactgggtatatacccaaaggattacaaatcattctaccactttactttcttaataaacttgcttttgatttgcactgtgcacttgccctgaattctttcttgtgcaagatccaagaaccctctcttggggtctggattgggacctctttcctgtaactccaggaatcagtttctgtcctttccccctccctccctccctccctgcctccctccctcccttccttccttctctcttctttttatcctggaagattccaacatgcaaacaggattgtgaacaaccatgttagaggtttatcaaagcttaattatatggatatctgtgctcttggaagtattcagtaaacaatagcattagaggtggaatgcactaagtctacttgggggagatgattggtaaaatgtatgaagcaaggaaaatttaaaaaacatgaattttagatgtctgtgagaatgaataaagaggtgacaagaacagagtttcaggcaaggggacatagggtctgaaggaacccaaactgttcaaacatcacttccgaacagtttggattcagaaacaagagtcccatcctgccagcccccctcttctcctccacatcgctgagtcaaataggtagctatcagggtgaacagggcttgatttgggggctccatggagaaggcagcattgcagttgagattgggcaggttttgcttggaggacaaagtgcaatcatcaggagaaaggcacggggctatgtcagacttgtgaacctggaagcattctgggaatgggacctgcctgtagtttagttttgcccactggtgtggttgctattttgtgtttagcacgggtaaaccaaacatcttccttccctgacctgcttgccatcatccattgtatggagggcaatgaaaaaggaagcggagtagtgagcccagcctctacatacagctcaaacacctcctgactgactccacaggtgtggatttggaggcatctctcggaggtctaatcttctcgcacggagccaatgaacagctccttcccaacacagacagctcttctcattccccaataatgctcactagtgcagactcctttgtgcatgggactcaaaatctaaacctttccaccagaaagggatgcacttaaatagatgaagtcaaaactgttggccataagcaacagcctgaaatgtccttttagaagacaagggtccagctcagcccaggcacagacaaggaccctgtccttcagggctgaggcacagagacctgaaaacaaaagctaaagtgaaccttgcaggccctcctcagcagacctcaaggccaataaggaatatcttttccaaaagaataagacaaatcttattttaggattctcctgcatctatttccagagtgatgcaaaaactaaactttattgggtatatatatatatatatacatattttgagtcagagtctcgctccgtcacgcaggctggagtgcagtggcatgatcttagcttactgcaacctccacctcctgggttcaagcaatgcttctgcctcagtctcccgagtagctgggactacaggtgcgagccaccacgcccggttaatttttgtatttttagtagagacgaggtttcaccatattggccaggctggtctcaaactcctgactttgtgatctgcccacctcagcctcccaaagtgctgggattacaggcgtgagccactgcgcccagtctttattgggtatttttttaatgtgccaaacactgctttaaaagctttttatgtcttaccccatgtaatcttcacagtattccaatgaataaggtgacattattactcccagtttccaggtaaaaaatctattctccatgaagctaaacatttgtccagggttacccagctaataaacggaggagtcaagagatctgacagcagaatgtccactcttgatttctgcctaatatgctcccacctcttcttccagtgcaagaacatgcatgcttataagaatgaagaccactgaagcacctttccatcccccactataaatgtagggaagtatgttatgcagagcttacctgagacccagaaactgatatgaatgcttcaaataaattctgcagaagcaaagctggtacatttttgtcacaagagactttgcagttagctttgcctttaaaatcttctaccaactctttaagtccgatactgtgtctaaaaatcaaataaagctgtggaaactaccatattagacaggaaagcttaccattcatttggagagatcaaaaatagacattgtggactttgtacgacaatgtagacactgacctctgagagtaagaactatttagagctaagtatttgagatgcaagtcaatgcatcttaaacctacctgtatgctttttttttccagaatagaaactcaacatagtaggataggtccttaaaaagcacaccaacaatcaaacctcactctgcaaccgcctacgtgggcaactgggtgccagcgcctgtgtgagtgcttggggtaaggtggaggggtgggtgggggaagcggagagtgaaattctatttccaacttaagtttttccagatggtactctaaagcataaattggtaaaattttgaaaacaaaagtgaagttagagagaaggcgaatctagtatctgaacgaccctttccttggagatgttcttccaacaattcagaacaccttccaaaggttatctgaatgagagaatatttatttttaggcagcaaattatggtggatagtgtcagcattccactcaaatctctgcatttcactttaaaaagccgttcccgtgttccttcacactggcttcaatgtgtgcttttgttcttaacaatctgtacctgcaactttccttgatgactctttttagtttctgaagtctccttgcccacaagcgcaaagagcctaaagtgcctgagagttcctggcccttggaggggccctcacgcagagtccgatgctggaggtgacagccctgctcctgtgcctctagctggggtatcaaaggcagcaggatcgcttgccctccagagccacccccgacgggatcagggtgaagctaccctgcacgcgatttcatctgaaacttcatttgggttctccacccattcccgtcgtactttccctgagcatttactgggttctcctggaagcgcttccttcataaatcagttgcacacaaatcccaatctcacagtctgcttctagagaaactgaagggatttttttttttttttttttttttttttgagacggagtctcgctctgtcgcccaggctggagtgcagtggcgggatctcggctcactgcaagctccgcctcccgggttcacgccattctcctgcctcagcctcccaagtagctgggactacaggcgcccgccactacgcccggctaatttttttgtatttttagtagagacggggtttcaccgttttagccgggatggtctcgatctcttgacctcgtgatccgcccgcctcggcctcccaaagtgctgggattacaggcgtgagccaccgcgcccggccgggatttttaaagtaaggcggatgccgaagtcaattaacaaatgctacacgaaagcttctggcaataaataagaaacgaggccgggctcggtgactcatgcctgtaatcctaacactttgggaggcctaggcgggagggctgcttgaccccaggagttggagactattccggacaacatggtgaaaccctgtctctacaataaataaataaataaataaataaataaataaataaataaataaaataaaaatacaaaaattagccaggcatggtggtgtgtgcctgtagtcctagctactcatgaagctgaggtgggaggatcgcttgagcctgggaggtcaaggcagcagtgagctgagattgtgccactgcactccagcctgggtgaaagagtgagacaaagaaaggaaggaaagaaaagaaagaaacaaaacaaaggaaggaaaggaaaggtaaggaaaggagaggagaggagaggggaggggaggggaggggaggggagggcaaggccgggcctgatggctcacgtctgtaatcccagcatttcgggaggccgaggtgggtggatcacgaggtcaggagatcaagaccatcctggctaacacagtgaaaccccgtctctactaaaaaacacaaaaagttagctgggcatggtggcaggtgcctgtagtcccagctacttgggaggctgaggcaggagaatggcatggacccaggaggtggagcttgcagtgagctgagattgtaccactgcactccagcctgggtgacagagtgagaccgtgtctcaaaaaaaaaaaaagaaaagaaagaagggagggagggaggaaggagaaagaaagaaagaaggaagaaaggaaggagggaaggaaagaaaaagaaaagaaagaaagcgagcaagcaagagagaaaggaaggagggagggagggaaggaaggaacgaaggaaggaaggaaggagaaagaaagacggaaggaaagaaaaaaagaaaaagcgagcgagcaagcagtagaaaaaggaaggaggaagggagggaaggaacaaaggaaggagaaagaaagaaggaaggaaagaaaggaaagaaagaaaagaaagaaaggaagaaaggaaagaatgcaaggaagggagaaagaaaggagagaaagaaaaagaaagaaagaagtgaagtggcaaggagtttgtcattatttcagatcgaaagaaagagaaaagagagaaagaaagagagagagagagaagtgagtgatgtggcaaggaggccattatttcaggtcccaagaggtgctagctccactttggaagaattttccagactgcgtcaatcttcgtcggcaatggcactttggaaatttgcatcagacatacccataggctaccaaaggtctccccagtggaagatctgctgtcatcctctcccattcccgccttgacatctcattatcaagatgaaagtcaagatattactcaaacaaattgtttcctcttggacattatcacaggattaaagtttcccattactgacatcctttttctgaccttttcatcagcattttcagtataaaaacttttcattatgaagtcaaatatgcatgatccttttaatgtacgtactttataatgagatttttgtcatcataaatttgtcttcttgtgtcctctatttctatcttataataccctgaggtctggtaaccagagtcattctggaaaaaaacaactggaaaggttgtagcttgagccaagtcgtgctgcacatcttccttttatttctgggtttcattgctcggttttcctttattttcctcgttcattcaatcgttcagtcattccaatgacatttctggaacccttgttgtttgttggttactgttcttggtgatggagatataggttaaagatgagctaaagaagatgaagatcaggtggtggcctgggactggctcctgggcgctgattctgcactctctctacagctccacgtgcagcgacattactttggtagtttgaaattggccacggtggagtatttatactatgaaaattggcagacaccacaaatcagggcttctttattccagctcccagaggacactgctgaagactgtcacttttctagagcatacagtctgtaggggaggtgggaggtggacattaaataaacaatcacatcaaccaacataaattggcaactgtaagaaaagaagagcagaggtatttggtgaaataacagtctatctcagaggacctgagtgtagccaaggaggccaaggacagtttctcagaggagaccatgcttgggatgtgaaccccaatgaagaatgggtagaggcaaagggaattccagggagaaggaactgcaggcacaaatgctctgctgctggagagaggaaaatggaccagaaaaacaaagacaaaaaaacccaggtggctgaactacccagagggcttgggattgaggaaggagatgctgttgagctgtgggtagaagaaatttcaagctttttttttttttaaatgtccattttaactttattcacagtatcatagtagccaaaggtgaaaacaacctctctattgacagatgaatggataaacaaaatgtagtatatccacatgatggcatattattcagttacaagaaggaaagaagttccgagtcatagtactgcataagtgaactttgtacacatcatgggaagtgaaataagccagacacatagtacaatattgtatgattccactaatatgaaacatcaacaataggccaatccatagagacagaaagtatatttagaggggctgggccgggggacaatagagttattgctgatggttacagagtttctgtttggggtaatgaaaatgtttcggtggtgatggtggtacaacattatgaatgtaattaattccactgaattgcacacttaaaaatggctaaaatggcaaattttaaggacatttcaagtcttttcaagtcacattgagcgttgtgtctttcacagtcagcaaactctggccagtcaaatccaagccatagcttgtttatgcgcagttcctgaactaaaaatggattttatatttttgaacttaaaaagaaaagaatatgcagcataaaaagtatatggctcacagagcctgaaatattgctatctcaccccttccaggaaaagctggccaatgcctggccttaactgtataagaaatggaaaattattaaaactttaaaaataaccaaataacatttacttcaatatgaaatgcttcactaggagacattatgaggtagtcaaatacttactcccactgagaatgaataagtttaattttaagagttgacttgagagtattctgaataagaagaaatggaaaataaatgaaagggcagaagtcacacaggcactggaataaaaattgccataaggataagaattcagagaccaggcttatttgtatagataataataagcacaaaataatcttaatttaaacaggaaaaaataggccaagctaaattataacttgttgcagtgggaaaaaaatgagaaaaaaaaaaaaccccatttttttcagatgagctatgggtcctacaaaactgtccataggaaactggaatgtcacacagagtaagggacaattcttcatgatatgaaaccactgcacatgctgcaggacacctgtcaacccaggccctgcctatctataatggccaacaggaaaccccggtgatgatgacagccagagacacaccccacaacctccaaagagatgatcacagccagagacataccccacaacctccaaagagaagctgaacttgcttcatgtctaagatccgtaggtgagtttaactgtacttaggggggcccttctccagcctgggtgggcttctggtcagaagtggtcattttatgttctttcttccagcagaaaatgctacttttctgcactgagatctttcatgtaaagacccgaaggtgggttcaatgaggatggaaagcaccaggtggggagtctccttgaggaatggatgggttcttaaaagagacgaggggagcaggcagggattctttgctcttttcacaatgggatagtgggacaggctccacatgaaacttgtagccacacccaccttccatctgatcacccagctgggggctctggccagggatctgatcacccacctggggactctggccggggatgctgagtgggtttgcagcgggaatgctctctagatcagtccatggaagggtgaagatcaggaaaggctgctgtcaggaagtccgtccaaacagggatgaggtcaacatggctgccatcctcttagctaagccattcctgacccttttcctggacgtctcccactgtgcaatggcggctttttcctgccttgccctgatgacgaaggtggcttgttgagcctgtgtcgcgacacataactcctccttgtgtaggctcactgctgggctctgaaaaggtgtggccaagcaagcagtcaatctgtgaatgggagcgctcttatctagaaacacaaacgcagcttcctgtgttcacggcatcctggggtgcaccgggacacttccacctgcaaagcagtccccttgagtcctccatattcaaagggatgtccactgagcaattaatggcttgaaaacagtgtttggagtgttgggaatgtatcagaggcaaaccagagaggatgtatgtagagcagctaagaaattcaaatgaaataagactgcaggagagacacaggtgagcttgcatggacagcaggggaactggcaggactgattaatgctcatggtgtatagatatgagattctgtttagatctttctaagctcatgttgatagaatcaccctcttcctgcccaatgtctctctccactggctactgcttactgcagatttgcaagggagcagacaccacagagatattcactgtgcccagccccatcatcacaaaacttttaaagcatagagagcagctttccctgcagaaataaagggcaaatggagaaactgcaggcagggaagacatatgagtaaatacagggttttcttgtatcttagtatgagttatggaatgtgccactgacataaagtcaggccccatttaatgatctcttcccacttagtatttgtaacccaaatgtccatggcaaatgctattgttgactgctgcctctatacacaagacaataacatgcaaatatcacacaactctattgcaaagggatatttagaatcttttaaaagatgtcatatttaataaaaacagtgagtaaaatcttggagaaaaccatttgtactacttgatccccacataaaatgattgacaaacaagaatagggtagaattaaatatgttagggttcaaaaaagaggcaaatcaacaaggatgatgacaaatttggcacttcaaaacacgcgatgtgcctgacaaaagctcaagataagccttttagaaaacttgatgaagacatagattactttttcaaaatcaatcaaaattgaaggagcattcacgatcttgtttacttatttatttatttttctgagaggttgcttctccaacgcaatccatactggtttcacttagtctttacctaggaataaacccatggttctaattataactcttgtttacgataaaataccttatcttttcagtttcaagtgtcatttctaaagataagtcatttctaaagatcggttcccaatcaaatcttgttgattcctgtttttattacactctttcaacttgtcttgcatagagtgactttaaatggtctttcatggatacctattaatcctggttaaagagagtttccaacactcagaagtacaaggcaattggggctgtggtgggaggaagaactaggagcctcaaaagtgaggcaatattctatttaaaagtgaaatgtccttgaagtcctcttggagcagcccccacccacccgcccacccccgtctgaaagtgttttccacacgtgagctggaatctctgctacagacaaatatagaaacaaaataaagctaactctttcatctccacatcatgacatttaaaaaaaaaacatattcgcctggaaatgaagatatattttatttttatatatttcttttttgttgggagtctttttcttattttaaaaaaacaatttgtatgccacagacacattagcattcttgctagggctgcagactgttcgagatcacatcttgcctgcataaacaggtatctgggatgccttaaactctttctgctcagcatctgtgatgaagccctagatgagacttgggcagaaaacacaaaatcagaatacggtagaattggcaaggaatgtaagcaaaccaattatacacaattagtttctgaatatctaaatctctccacttcagggattagaaaaggggtctatctttgaagtaccagctctgcctgcagactccttcaaccttctaactttaattgacaattgcacatggtacagcatttcccagttgacttagttctcaagaatttttaattagaagtttttcatctgctacatctggcaactcagtgcttcttcatacactccttcctccatctttgtttattgtgttagtatttttagagaaaacacattcggaacaatttctctacactccatctaagcagaatacgtcaccaggtcaaaagaaggcagctttgcttgacaagcgtctttggtgtctagccttagggaaagcgacatcacagctcacatgtgacagtaactggactgtctccagcaagcaagtgagcttgtgtccccaaacgtctgcacctgacagctaaattgcatgtggcctctgaagcatgtaaaatctaacaccgtcagctcaatactgaaataagtgacgagcaaagaccattttccttatgtagccacgatctctttaagcatgcagttgaattgctagagtaaaagaaatgctttacattcatttgaaaatgcaaacaggattattaattgatagtgatgatcactgctaaatctactaatggttttctcaactcccatctgatatgacaaatgaaagtgctgagaggctcagatgtttgattcttttgtggtaaaaaaaataattccaatatgtatctagttgattcctcatatgaaagagatgattctgtttctttaggcttagctgttaaattcccaagtgaaaaagctatgccacgtctatgatcaatacataattgtgtttcggccttcaagtgctcaaggtctgaggttgaagaattaatttgctggttgaggttaatagaatgtcaattaatttcttggtataaatgtcaatacattcagttaagccttgtgatttaaatataattaaagataaactttaagtcaatgttggctttttcgttttgggtatggtgagggatttactaaaatctcagaaagccacagggaaaaaggatttgatcaagaagtttgcttttctcatacaaccagttaggcatgtttgttatcagtttcatgtgaaggaaacagaatgaactgcatcttcttttatctcaggcttcaaacatccatctattaaccttaacagttcatgtcactcacgaagagtttttagtgtggaaagtcatttgttcatcatgaacactctccagataagatagcagaataagcagtgaaatgtagtggttgagtaaatggactttagagtgaattacacttggaatagaatcccgatatggtattagttgtgttatacaatacttaactccttgagcctcaggtttttaaacaataaaatggtcaataattgtaactctctttgagtgatggtcagtcctctgggtatagtgtgcagatggtacactgaacaactctaggtggtatcattcacgtagttcatgtggtacatctttaaattgttcagtgtacaacctgtacaactgtatgaggcagtcctagcactcgcagtgttgatgaactgagatcatttatgcaaagtatttaggactatgcctatgcaaagcttgtagagggatttggggagacgtatagcgtaattttgtagttgcaatcgggaatcaagcctgaaataagttttgttagtgtttatgggggctaaggtgatgttaactgctattcccaggaaagttagtgcttttacctcactttgtctggcattggattctgacatctcccctcaccatgggcccttatacaaaaatggaaggagtagacctcttactccttgaagaaggtgcattcattccaggcatcattattgcaggtgttgttcaagctgctggaatgaccacaatcggaaaggtctctgcactcatggagaccacattccagtggatgtgagaactctgatggaaatacactgaagggaaaaacagtctcacctagactggagagggtagcttatgtttatacaaacactttcactttcatttgtcatgtcagatgggagttgagaaaaccattgttagatttagcaatgatcatcactatcaattaataattctgtttgcattttcaaatgaatgtacagcatttccttctactcaggcaattcaactgcgtgcttaaagagatcatggctaaagaaaaatcaccttttcttgtcatttatttcagtattgagctgatggtgttagattttatgtgcttcggagtccacatgcaatttagttgtcaggtgtagatgtttggggacgcaagctcacttgcttgctagaggcagtccagctgccatcacaggtcagctaaggtatcttatctgacctgtgaacactaaaaactctctgtgagtgacatgaactgttaaggttaatagatggatgtttgaagcctgagataaaagaagatgcagttcattctgttttcattctcttaggtgcctaatctttccctaagattaggcaccaaaaacccttatcaagagagaatttgtcttaagagacttgactagtcctatccaaagctaaggccttaagaacaaattggagaataataaatgcccgtcttaggagggtttcttgaaagcagtcaacggggtagcattttggatgcaaggtgtttgttagggataatcacatgtcaaaggaagaaagaggaaccaggatggagcagggggagaagagaccccttctgcactgagatgcaagcccaaccaagcccctgtcaccccgcagggagccttggagcaagaactgcgtgtaagaggatcccagagggcgaggaggcaggcaggtctttctaccttacctcaatgtgtcaatcactgggtgtgtgcttctctggaaagggaatgaccttggatgaggcagctcctggcactagaggtagaactgatgtctgagaggagctgaatggaggctgtctgctgagcacacgtgccgcaggggggcagcccagccttcctggacagggaatccaggcagcgcatctccttccccctgcaatgtccacccagcactgtccacccgccccgcacacccacacctaccgagagagcagtccctcagagggaacttccctaaactttagtcactcagggcttgatgtactcattctatattttaataattcatataaaaataattcttaaaaacttcttaaaattactaaataaataaaataattaaaattcttaaaataaaaaaaacactcacccggatattatcatatcatcttgtatattttgttttagtaaacacagtcttagggaaaagccctgtgttattgtttggtctgtgtccccgcccaaatctcctgttgaattgtaatcttcaatgttggaggtgggtctggtgagaggtgattggatcataggggtggatttctcatgaattctttagaaccatccccttggcactgtccttgcaaatatgagtgagttctcacaagatctggttgtttaaaagcgtgtggcacctccctgctccctctctcttgctcctgctctggccatgtgacacgcctgcttccccttcaccttctgccatgattgaaagcttcccgagacctccccagaagctgagcagactccagcgttgtgcttcctgcacagcctgcagaaccacgagcaaattaaacctcttttctgtataaattgcccagtttcaggtctttctttataggaatgcaagaatggactaatacgccgtgtgagctctaggaccaggcatcgctgggatgctcctgtcctaagacgtgatttgacaggcattaactgaggtcttctggtgtgaaaggagccacaagtatgcaaagacagggccagcatggctttgaatgagaggcagggcagggttcaacaggagggggccgagaatccttcagcagagaacaaatgaacctctttctcggggaaccacacacacagagagatgggctgtcaacagatgggatgaatctctaggaagatgctgtggttttggggatttagggtggaattcgcactatgcccagtgggaacgcttgcctgctcacaaaagagctgcagtcccggaggaagcacgcagcgagaagacaaggatcttcagcctctgagacaacgaatggactgtgccacaccatgctgacaggcactgaaaaccaactgcatggaggacaccggctgagcacagggtggcccatttgacggatgcgactagcaagacctgcacaagacgaccctcagccaaggacaaaacatggtgctgaagcctcagtacaattgacgccttcatttgctggtgtatagaataaagtgcttattgtttgtgggatttatttacttatttatttgcacattatctgtctgtctgtctatccatctatctgtgtacttaccactttcaggtggctagtggcgggcaggaaggtatgagtgagagaggtggcaagagaataaacactacacacatttgctttcttgagtgtccatggatcctttcctttagggaacttcccctccctgatgcatgtgcctcaaatgcagcagccaattgcattacaggtgtgggcatggacccaggttgtcccaaagaccctgccccgccagtcttcagagtcccatggggaatacgacactggtgtgtgtgccgggggagcaagggtcttcttcaggtgtgacgggctgcaaggtcaaatggatggagttgcttgtggccatctccgcggccaagaggatgagtggtagccagaggcagagagaaaggcctggggacataatttgaatacttggatccagccagcactgatgccagtcccagccctggatgtttttcgttagatagataggttaaggaagctctttctttttccatttcttttctttttttttttttttttcgtttttttgagacagagtcttgctctgtcacccaggctggagtgcagcagtgcaatcttggctcactgcaatcaccaccttcccggtgcaagtaattctcctgcctcagccttctgagtagctggaatcacacgcacctgccaccacgcctggctaatatttgtatttttagtagagatggggtttagtagagagcctggttggccaggctggtcttgaactcctgacctcaagtgattcacccacctcagcctctcaaagtgttaggattacaggaatgagccacagagcctggtctctttttccatttctttaaaatttgggttgctgttgtttataattaaaataccgagtgacactcctgttatctgtctggtggctcaaagctaaagaaatgtaatgtctgtcatatgcagttaaaactccaactgaagatctacatatgcaaaatgtgtgtgtgtgtgtgtgtacacatacacaaatacatatgtatatatgcacacatcatgtataaatacaccttacacatatgtctgtatatctgtgtgaaatattccttaaccccttccacattctccatccttgtttgagcttataaactgtgtcctataaccacgtcttttgcattaccattctgttcatttgtttaatttaaatacctatttgcatattggcttcttttagcagcgagtgaatgctttgaggatagggagtctctctccctctctccctccctgccttcccttcttcattcctctccttcctttcttctgaactgttacttattattattattttttttacactccaccatacagaccccataagttctgggtcctccattgacgagcattcagtgactacctgattcgatgactgtgggcagtgttgcaaactattgactcaaaatcggctccctctttcctccttaccaacagagaccaattcattcaagttgtcaacctttccaccaaaaaaaaaaaacccaaaaggctctgacatgaggtcatgtgtatatttctggccaatcggctgtaagcagaaatctacttcacgtaattttcagaaaacaagttctttgcctgataaagaggtgcagttttagaggacatgtatgcctcttatcctccctgtttcctcgttcccacctggaatactgatgtgatgcaggaggctcagctgccatcctgtgacagcgaggcggcacagcagaaagatagaaggttgagaccctgtggtatcaatcagctgtgataccagccaaggagtagctaccttcatcttcttgtctgagataaacaaatcccaaagtttaaaggctattcgacttggacctttgttctatgcagctgactgacatccaaacagcatagagggcacatgcctctctctgtatctgggcatatctgtggtgtctgtgtgcagacctgccaaaatacaggaaacaaagctgggaaaataacgtgtgtcttccacgacagaaggtgacaaagagctcactgcccacctccctaatcgatgatccacctctttaaaatttcacttgattaaatttatctgttcctcatgctgctttttttttttaaattaattcagatatcagtcctgctgtattcacagtcggacacctcagtcttgtcaagtggattaggtaggaatcatggcactcatcctatgaaacactacattcatctttgctggaatgtttggggatatgatgataggaattgaccatcaggtctaaaatgctcacaggaagctgggtctcatcagcggaagctggctgcctctctgtcttttattcttgaaacatcccacctagccattgagaggctgtttggggcagatttaaatagtggggctctgtctgccagagggctaatttgcaaagattgctgcatgatgaaagtgacatgagacatgacaattggatctttcagcagcaaagagaacaactgaagtacaaactgtcatctgaagctacaaataggaaaagggagggaagaggcttctcttaaaaaagagattaaagccaggtgagatcaagcaattttcgcatgcttgtaagctctctgtgccttgtcacacatataaggatatggtaccggggaagggatctcaaattcaaatgctgcggaagccaggtgggtcacacagtgggagcacagccagcgtgggacagtggcaggggtgggggctgtggccaactgtggccctgattcatggggctcccctacccagatccacctgtcattcttggatagaatatagggtcagtgtcttctggtgttttttctccaggagaaagtcacaaatctagttctcaaacattgaaagccttgatttttaaacactgttcacaaattcaaattttcttaaaaacaccatgcaggccaaacaaacaagccttcacacaggaattgacacaaagtcctctggtgtgcaatgtcttcagagagacattgagaaacatttcatcctctgttgccctggagccatgacagttaatgatttttaaagaattgtccttattttcacaaatccatggttcccaaatgaggcccgcctgtttggtctttcgtgtgaatgaatgaattgctccttcactctatagtggcagctctgccagctgtgaggcttggtgggaggcgggaggctgggattcagagccccttgcacacagaacaacttgtatagtcaggttcatttatgaatggcctccattaggttccagccttagtgttgaaggtataatctttcccctccagattttatatgagttcactcttcttcataaagacttctattcacaatagcgaaaatatggaatcaacctaagtgttcattaatggataaatggataaacagatgtggtttatagacacagtggaatattagccataaaaaaagaataaaattctgtcattttcagcaacataaatggaactggaagtcattatgttaagtaaactaagccaggcagagaaagacaaatattgtgtgttctcactcatgtgggagcagacatagtgtctctcataaaggtagaaagtagaataatagtcacatggggctggaaagggaagatgggaggggaaataaagagaagttggttaatgaacacaaaaatacagttagatagaagaactatgttttagtatttgatagtacaatagaaaaattatagttaacaataattaattatatgttacaaaaaaatagccataggagaagaattgtaacattctcaacacaaaaaacagataaatatttgatgtgatagacccaattaccttgattcgatcattatattgttgtaggtaccaccaaaatatgtacaactatgacaaatcaataaaaaagtacaaaagacttgctaaaacaaagtcacactgactaagttttcaaaaatattactttttaaattattgttgttactgtggtgatgatggtggcagtgatgatgatgatgaaggtggtgttggtgacgatgatgatgatgatggagataatgatgatggtggtggtgataacgatggtgatgattataatgatggtgacaataatgatgtgatgatggtgatgatgaatgatgatggtggtgattatgatgatgatgatggtgataatggagatgatgatgatgtgatattgatgatggtggtaatgacgatgatgatgtgataatggtgataaagatgacagtggcaatgataatggtggtgattatgatgatgattatgatgatgatgatgatgatggcgatgatggtgacaatgatgtgatgatagtaacaatgatcatggcagattgtggtgatgatgatggtggtgatggtgatggtggtggtgatggtgatggttatgatggtgtggatgatgatgatggtgacaatgatgatgtgatgatagtgatggtgatgatgatggggtgtttagaactggaaaacatggaagtctatacatagctttacgtatctgctgaacctagttcagtgtgtggtgatatcaagagactttccaagtcttgtctgtccccatgtttcttgctgtgtcacatccatgagttgtgaggcatgttctggggaataagatatatgctacagcccagatcctgagatgccagcattcttgttgttgtgatagttagcatgtggaccagtgtgatggtcattttatatgtcaacttaagttagctaagggatgtccaggtagctgataaatgttgtttctgggtatgtctgtgaagatatttctggaagagattagcatttgagttagcagactgagtaaagaagatggacccttaccagggtgggtgggcaacctccaatccaaagctggaaatgccaaggaaacagattcttcctcagagcctctacaaggaagtagctctgccaacagctttcctttaccccaatgagactgacttcagatttctgactctagaactgcaggagagcaaatttgtattgttttaggccaggggtccccagtctgtgcaccatgggccagaaccagtccatggcctgttaggaactgggccacaaggtaagaggtgagtggtgggctagcaagtgaagcttcatctgtatttacagctgctcctcatcgttgatgttaccacctgcattccatctcctgtcaggtcaggatcagcagtggcattagaggccacatggtaggaggtgagtagtgggctagcaagtgaagcttcatctgtatttgcagccgctccccattgtttatgttaccacccacattccacctcctgtcagatcaggatcagcagtggcattagattttcataggagtgcaaaccctgttgtttgcactacagggatactatgctgtagtgcaaactatgcatgtgagggatctaggttgtgtgctccttatgagaatctaatgcctgatgatctgtcactgtctcctgtctcccccagatgggaccatctagttgcaggaaaacaagctcagggctcccacagattctatattatggtgagttgtataattatttcgttatatgttacaatgtaagaataataaaaataaagtgcacaataaaggtaatgtgcttgaattatcccagaatcatccccaaactccactggtctgtggaaaaattgtcttccacgaaactggttcctggtgcggttcctggggactgctgctttaagccactaagtttgtggtagttacaaaggtcataggaaaaaacccaggaacccacttgttgttagagagaccgacttcctggttcaaagcctgggataacacactattgcaaatacttagaaagtcaggtgccaagctcctgtgcaggtgtgtgtacttgaacaagaacatttgaaacagacctttggaatatgacagcacttcatcctttctgtgaacaaatccttctaatggacttgactcacccccaccccaccttccaaccctcattccaataataactgcatttaagtgataaaagtttgggcctcataaaaagttagaaacagactgggaccttgctctgagaatcataattttgttttaaaaaatttaagccaggcgcggtggctcacgcctgtagtcccaacactttgggaggacgaggtgggtggatcacgaggtcaggagatcaagaccatcctggctaacacagtgaaaccccgtctctactaaaaatacaaaaaattagccaggctcggtggcgggcgcctgtagtcccagctacttgggaggctgaggcaggagaatggcgtgaacccgggaggcggagcttgcagtgagctgagattgagccactgcactccagcctgggcaacagagcgagacttgtctcaaacaaacaaaacaaaacaaaacaaaataaaaaaaacaacaaaaaaacatttaaaagcggcaggaagcatgtttaaagcaggcatacacatttccttcttatgttcagtggttcatctgtactgcatttaggctaagtctggagagaaaagaccacgtgcatccttaaaaactccaagatataaaataaagccaaacggcctaagaatttggtgaagtaacattttggaaaaactgattatcattcgatttcccattctttcctttgctgcattggggcagaaaagctacgtggtgcttagtgcttctgggaaggcaaggaaaaaatgagtcaattcctggcttctaaagcctaaggccttagggaaatatcaacataatacataaatgaaagaaataaagaataaaaaggaatgtgtaagaatgagtttccctcattccccaaagagtaaagatgctgtcttagtcagttagagtagctaatgaaataccatagactagtggcttataaacaacggacatttatttctcagcattctggaagatggaaggtctgagatcagggtgctagcatggtcaggtgaggattagggctctcctggcttgaaggcagtgccttctcactgtaacctcacacatcagagagagagagagagagagagagagattgccccttctagtaatgattctaatcctatcataatactacggtccaccatcatgacttcatttaaccttaattaccttaaaacagctctatattcaaatacagtcacattgagggttagggcttcaacagatgaatttggggatggacacattcagtgcataacagatgccttgggctgggagtggaaggggattcataggtgaatttagaggggattcggaggtctctgtggtgagaagtgagaggctggagctgaagggagcaggtggaggaaagaaccacggcatagatgttcagccttgttttcaggaaacaaggtgccacccaagggctgtgctagacattttctagaggctgcccgtgagtacttcccttgacagccacagcatgaggccttccacgtggccagcaaggacaccaaattttgctccgagactgttagacacagcttgccttactcaacgtatataacctgcagacccgacaatatgtcaagaagcctcagagaaagaggatggaggctggtatggtggcagtgacttcgaacacactggtgtaaaaactgtacttgggtggggccttaaggtcactccttggagaacagcccacccacaagccatgagaggtgaaatatttctagctacaggacatcagagccgtccctacctggcaccctccctaccggggcacatttctcagggacctgacctagtctaaacacttaggttaaccatgtccctgcatggcagaccagaggaattttcaaagcggggtaaatctcagccacaacactctgctccgggaacttgggctgcagtacagctttctttatttcacatcatttcttccacaacaaattcaacaggaatgtgccactttatgcaagggagatgataaatcaacatcaaatatgttatgctcagccttataataattcaataaattattcagtacagcagttactaaacacagaacaatttaccaacagcccattcatgagattttatggttcaggttaaacatctgtggttgtgtctacactgcagacaaaattcgtgtttagaacagtggtttatgatgttgggtgcatattgggaatcatctgtgtcataaggtgatactgatgcttggagtcccaccctgaatagagtttgacttaattggtctggggtatgcattgggcgtgccttggtattttaaaaaattcctcctatgattcaaatgtaaagcagttgagaactactggggttgtgttttagctgtaaaggaaatcaaactgtatggaggagttaatcttatgagatttgtggagtaagtatggagagcatgccctttaaatcagttgtcctcaacctggacggtccagtagaatcatacaccaggacatcagaacatacagcaaatatataccatgactcagcctgggtctccatcccagaagtattgatttcattggtctgagatgttacctagcatcaggatttcaaaagcatctgagtgactgcaacatggagctactgatttaaactgtggttctcagctcactcagcatgttaaaataagctgagagttttacaaactcatgtttgagccccagccccagaagttcttattttaaatcgatctggactatagccttgacaataattatttttaaagcttcccaaggaatcttacaagcacccagagttggaaacaagtggtgttaaacatttttgggcagaaacagtgatgcttggttggaactagggtgagaatgtgatgttaacatttcagagataaatgtaggcatcagggctctggttcctggagaaaaaagacagctataacttttcagggggaaatacaacaatcccatttttaatagggtggccaggaaaggtgccatgggctctgtattagtccattctcatgctgctaataaagacatacctgagactgggtgatgcataaaggaaagatggttaatggactcacagttcagcatggttggggaggctgcagaaaacttaaaatcatggcagaaggggaagcaaacacatcctttcttcttcccatggtggtagcaaggagaagtagaatgagtaaaaggagcaaagccccttctaaagccaccagatctcatgagaactcactatcatgagaacagcagggaggtagctgctcccatgattcaattacctccaaccaggtacctctcacgacacacggggattatgggagacacaattcaagatgagatttgggtggggacacagccaaaccatatcaggctgaatttgtaagcttaagccctaacccccagtacctcagtatgtgatgacttagagacagggcttttaaataaatcagggtaaaggaggtcattagggtagggtgtgttaaaagtaaattaaaatggagactagtcctgaataatccctgagcagacagaagtggaagtggttaggcttcataagtgaccttaatcttgctgggtgtgcaaacgtaagtgaaacttaacgagttatttcttgtaaacgtgtgttaaagaaaaacagaacttaagttcaaccagtcagaagcaaccaatagatatacaactaggggctttccactggaatggaacaaataaggcaagtatacaaatataacccattaaatgtttcctttgctttacttccttgtgtgtcccataagtctccaccttgcgtttgctcagtggaattcctgaaccacttctggtttgaagctgcccaattcatgaattcctgttttagcaaacaaactctttaaacattgtattgtgtctcagtttacctttttaacaagtcctgacctaatgtgactggtgaccttaaaagaagaggagattaagagacaggtgcacacagaggaaagaacatatgaaggcatcgggagaaggcagcatctacaatcttcagagagaggcctcagaaggatccaaacctgcctgtaccttgattttggccttccagcctccagaactgtgagaaaataaactcctgttggtgaagcactcccagtgtgtggtgctttgttttggcagcccaagcagactcatacagaaggcttctttggggtttgggcatttccaaggtgtcataattcaagatggggtgtgagtcaaggggaggtcttagagaagagcattccaggctttgaaaaaagcatatgcaataatttctccatctccatcgagaaatgctgttaaaacaaacagcagaataaaattaactgttcttcttacttgctgagatgttgcccaggggatggtctaccatattccagtgtcccttttgtgagaatccacaaaaggaatcttgttctggtcctgatatttagaggaactgtgtatctctccaggaaccagtttggtttcattttgtggtgagtgtaaatctttgactcaattgccttcttttgtctgttgagtatttacaaagaaatacgtggtccaccttccatgactgtgcagacccacatgctgtgatttctgttatgcatcctgacttagttttcctttttcccatccatattttccttccatgtggacacccttaagtaattattttacttttctatggttaaatatggtaacctagtcactttaaatcatttgtggaatgaagtcaggtttaagcgataaaagattatcttagtatttttgacctgggatcaccatcttcacagaaagtcaacacatcatgttatcttgtcatcttgacagcttctgctattgatgaacaaagtcctgaaatttgcacatacccctttcaaagacatttaatcactacagcctcttttctcttttaaggccatattgaaataatcatttcctcaaagtgaaacttcaaaatatactggagaacaattaggtgccctgcacctgaaaggggattgtaattaaaagatgagaagatgtttcactggtgagaacatgcacgtggtcagctcagttttgtagaggcaggcgaggccagcctttgaggcatcttccatgtctaacgtggatattccaacgttgatcaaagcaacactactttcagctaggcagctctctgggagcagtttcaccacccagcactcttgaaactaattgaaagctgtggtcaggctgtgttctgaaatgcagacacttttaaagttctcaatagctaggagtagatttctcaggagctaatcaaaggttttagggggaacctgagatgaataatttcaaagtagttgaaagctagagagctttggttgaaacagaaaattaaataatggggtctctccatgctttgctagttccttctcaggtctgtctgccctgaagcacatatggtcacagctcctggctggttctcaatggaagagtgacgctccatttttccattcagccacctgcaggaatccatttacttgctatagaagctcggtgaactgtggcagagctgagtgattttaaaatgtagccatcagcaccattattgcttcttgtactttttcaatggggacttagattccattggaaagttcaatcaacaggaatggcggccgttgacggtgtaaattttgaaatgtcttaagcagcttcagagaggaaaataacaaatgcaatgtctcggcgttcttttcaaccacaatgtgcctgcggattttgtcaggaggttatcactcaggaagggggggacacttaatcagagaggcctcctgagaatatgcttttaattcatcaatggattaactttaatgaacctgattatgggtaataaatcgtgttaaatatgttatcctggggaaagttctcattctaatatgtgatttaatgtcatggaaatactagttagtcctgtctttcagtactgtttatttgagatctgaatttggccacgactctgctgtcaatgataaacacatgcacacacacagagtcaggaatatatgggtggttaaattacaggcttaatcactgtacttgataagaacagaagaaggaaagagactgcacagtgtttacagcagtgcctgtctcctaggagacagcaaccactaatgaactatgaataaatgaatgaatgaatgaaactgtgataaagatgtctctgtccgtagcaagacatctggactgataataactgggaaacacaactgttgagctatttgagaattaagcgtaaaacctacattacctgacacgtctgtagtggtaatgacctatgtccagatttcagtatatcctggcctgtcctaccctggcatagttgagtctttaacatctgaacctggcacgatgacgtctttgtgcctgtgtgagtctgactgtttttactggtgctgtcactgggcaactatgaccctttgacaatgtaatcatcaacccactgcaaggaaactttcagggaggagcacaagtcctggtatgctctgaaatctgtctactcacatctcctgttaataccaataaagtgccaacatctgacctgcaggagtggtaatttctgggaaagaaattctgaagacaatagtcgagaatccttttcacaaaatgctgcctgttgaggtaagagggccacactttgggaaatgggtcatgataatttacatttgtgattcagaaaagttatactcaacgtggagaggttggaaatgccataagcaattaactttgctttttattttactttcatatatttataagagtgacatacgttttaagaagttgattctaaatgagtctaaaagagaccttttattaagtataaaaataaaacatggtgtcatagttgaaatgacataacttttgtcttattggtgatcaaagtaacaatgcattttattattgatggcattttagattcaatagaatatggtaataacaacatccatttacatgaaactgcaattaataaacacagccttaaaaacttatacaaatgcatactaaactgctcattagcctcagaattcacttagcaggcaaacgtctagaaaaaaaacttccatttattataggaagtgattttaaaatgatcgatactcaaagtctccactttcatcatattgataattaagtttttaattgtaacttatattgatataattgtagtttcacatgatcacgtaagaaatattagaaaaagacccgtttgccctttgcccagcttctctcaattgtaacatcttctagaattctagtgcaatatcacagtcagcatatggacactaagataatccacagatcttagatttctcggttttacttgcagacgttgtgtgtgtgtgcgtgtgtgtgtgtgcatctctatttagttctataccatctcatcacgtgtgttggtttgtgtctccatcaccacagtcgagacacttggcagttctatccccacaaggctccttcctgtggcctttccatagtcacctcgccctctcctgtcccccatccccatccctaatccctggcaaccgctattgtgttctccatctctaaaactccaccccatttcaaaaatgttacgtaagtggaattatacagtatgtaaccttttagaactagaattttttttcactcagcataactttctgaagattcttccaagctgttgcatacatcattagttcaatcctttttttgttgccagatgaaatcttttcaaataaataaatggatattgaatcctatgagaattgtgtcagatggctgtttggataagggtgtaaagaatgtgatttgtgtgggctcctaaataatcaaagacctccttcaagcctggtagtagcaactttgatacaaatcattccagtcatttgatcactccagtgaaatgagaaaaggagtaaaggatagggataaaaatccaggtaattccagaagcccactgtattcaaagccatcgttgctggctctgcattttctgtttaagccaaagttgatattaagagaaactatgccaattagtattttatttcttcttttctcctatgagctcttatagctatacaaataagcagtgataaagttgccaaataaaacctagaaaaagagggagattaggctctgaatgactgatgaaaggattatctaactttgagaatactggaaaacacttcttttcacatttccaagcaacttgaaattgcagcttttcactgtaatcaggtttgggacatcctttttgtttttaaaactttactaaagaaacacttccagagagcctactgccatctcataggtaaatttttattgattcccattttgcatgaaatgtaaactcaaacacaaccaggttgcgagattttccccaacattctgtggctttgaagtggaaagccaggattagattccacgcagtctgactcagagttctctgcacactcctttgtatttctgacttttttcttttctttttcctttcctttctctttctttttttctgaggtatattaaacctacaggaaggcacatgtggtacaggtatggagcttgacaaatttgcaccaaatgaatttctcttgtaatcagcatctgcaccaaatcacaggaaattaccagggttccagaggctcctctccactcactacctgctgcccagcataaccacttcctcggcttctgaaagcatccactggttctgcctgttttggtactttatgtaaatgattacacagaccgtatgctcctgtgattggcttctttcactgaacatgagctattgctgtgtgcaattgtagatcatcaattctcattctaccgtgtcctttaaaaaactgttgctggtggtacaagtctgaaaatctattaaatttcagcagcaagtgaaatttccattctactaccaaaaaataatttaaattcagcagtccatttaaatatcaaatcctctcacttctatctggtaaccaaacaaattcagagactggtttacaaggctctgtctttgaaacttaccacctttcaagctgctcccattttaatcaagattagaagatgtgtcacagtttttttagcacttaaattccttcccgtccattaagttgacaaggagtattcaattaccaagtattactataatcgtcactggaaaagcatctctaggcaatacttacagcttagagacttgctccagcaaaataataattgttagttgtccttcatattgaaagacggtgccagatctgaggatcctccagcaagatggcttttaggtaggtggtttgtgaaaggtgcagcccgtctactgcagaaatcctgaccatttgataacagacaccatacagtcctaaatctcaagtgtaaaagaaaatattgattcaagtgaaccggccaaagagggaagagggaggccctaattctgagcaccaaaagtccatttttacaccatagcatctcattcgtctaccttgcaagggatctagaaagctgggctcttttttatgaatacagaggcttttgaaaaagtcaaaagtgagatttgaggtgaacacatgtttagaccccaatctattgcactgagagccatatacccaaagacagggggagaagtcctagtttgattttacggctggtggtgctgttgcggtccgtgtttccgctcagtcttttggtagaattgttattcaatctgtaccttcctgtttgtgttttctgttggtctgggcttagtggcagaggacataacccactctgtttgtggaaaaatattaatgacacacaggatcattgggtcgctaggctgcttctagcttctaggagtaagtcccaaagcacactgaggagtttgctactctgcttctgaccccattacagagctgtggagtccagcaggctacccaccaaatcaggagctgcccatctgagccgcccactgtcgtgtgcaccatcaacggaagatgtgctgcctctctccacatgcaacctacgttccaaatgtaaatttgtatgtgtgcatctggttggggaaatctaaatcacacccagaatgcctcactgcaagggaccctgggaaatgcagttcttagatgctcactagaaaggctgaagaaccctaagcccaccagccctcagtgtgcaggatttagacacacaatcaacagaaatacagaaatgcccgttttagcacctcatgtaaaccctacacttttacatttcatgtcaatcctctagataatctttttgttgttattgaggcggagtcttgctctgttgcccaggctggcatggagtggtgtgatcttggctcactgcaccctctgcctcctgggttctggtgattctcctgactcagcctgggattacaggtgcatgccactacacctggctaatttttgtatttttagtagagacagggtttcaacatattggccaggctggtctcgaactcctgacctcaagagatccatctgccttggcctcttaaagtgctgggattataggtgtgagccaccatgcctggcctctaggtaaccttttatttgaagttgagatttgccttgattagtacaatggttcttgccctcactgggcgtcagattcacatggataacttaagaagtacagaagaccgggtcccaaatcccagagagcctgattcactcagtctgggcaggcccaggtcatccctggataattcccataaggacccggaatgaggaacactgggttagacaacaccgcagtcacccagtatcctctgcctcccgaaagctgtagaacctcgtagactttgtagaagactctcattgagctcaggactgaattgccgaaaatacataacacatcgtaaaaaaagatctgagaaatgctccgaaggctggaacaacacatgctcatcacgagcaaagagaagttgcaccaacagtggaggacattttaattagccaaaccttatgtataaaaatgaaaatgcagcactcagctgccaagtcaactactgaacatttaaaagagcttattgaaactttaacagtgacttaaacaaaacaaaacaaacaagtgaaaataaacaaatggcggctggcaacacattgtgtcacagatggatgggctccaccacgctgtccgaggtaaatcacaaaagacaaaataaataaataaatacataaacaacattaggcagaactcccagggctgtagaccactttttaaagtcttcagacaaaaattaaaaaaagtctcagaactcaaggtactccatggttcctggaaaacaaatgaaataacactgctctgtgctttttttttttggctccgcagattgatgatgaagtggcccaggagggactttaaccacgttcgcattattttagaagggaaaggagacccatttcacttcttcccaagctaagcccctggctactccaagtgtggtccatgggccagcatccctagacctggttagaaaggcagactttggtccactgcagacctcctgagtcaggatctgcattcaaacacagtctccaggtgatgcgttcacacgtacgcgacagtctgtgaagcacagggcaacactctcccgtattcccatctgtttagagcacatgcttccatgtcaaaatcctagttaagaatttgtagtttaagaatttctagttaagaatttctgagtttctataaaaggaagcacctttcccatttactagatttgagcccatcagcccacctgcaacagaaatgtgtgtttactcacgcagtctgaaacagtcccattcacctcaaattgtctattataacaaaacatccctgaatccacagttttgtccatcctgccatccaaatgagcattttacactgttaaagttcttttttttttttttttttttttttttgagacgtcgttttgctcttgtcacccaggctggagtgcagtagtagtgcagtggtgcgatcttggctcactgcaacttccgcctcccgggttcaagccattctcctgccttagcctcccgagtagtggggattacaggtacgtgccaccatgcccagctaatttttgtatttttagtagaggtggggttttgtcatattggccaagctggtctcaaactcctgaccccaggtgatccgcccacctcggcctcccaaagtgctgggattacaagcatgagccaccgtgcttggccctaaagtgcttcttaaacatactggattatacatttactaggacacttagaggaaaagacttttacatcttggttattcccagtgacctgaaaataaacagactgttcatttacctcctggccaccaaccagcctagtaagtgctatataactggttgatttgcaagagaataaaattggaatttccttcttcctttaaatatgcagcaagaattagttgaaaacacatatcagatcttctgtgttctgacaagagagtaaggagataagattaactgctaaaaatgtctctccactttatctttaggtttaataatttagagtttgaactgtttgctcagaaggcaaacaatatcttctgctgcatattttatgactgaatttcagaaagcaacaggccagcagccaaacccctggtgcatacttaacttactctccagagaaaagatctactggggaagaggctggggatcaattctgacattgcacacagaggccccagaaagatcaaaaccttagagtgagtgctgggacctcttagctaacatccactgcagacggggcaccttgtgctgcacacagttccccacctgctcctgctagctcctgtctctgatttgtctttacaaatggcttattgggacagtcactttcctgctggctcacagtggtaatggcctgagtgaccagctagcttatggcagcatacacccttgatctcatgttaacatcaggatatgtgacactctttaatggaactgagaacattctcttgcccaattaatggaaactgttatcagttactaaagtaccatggaataagaacaacataattgtctacttctcaaccctaggagggtactaacaccaacaccaaaaccaatgctaacactaatgctaatgccagcactaacactaaaaccaatgctaaaactaatgccaacactactgacactaacaataacaccagctccaatgctaacgctatcactaatcataatacaaacacaaatactatatgccaacaccaacaccaatactaacactaataccaacgccaacgccaacactaacaccaacaccaacaccaccaatgctaacagtatcactaatcataatacaaacacaaatactatatgccaacaccaaccaatactaacactaacaccaacgccaatgccaacactatcactaacaccaacaccgacaccaccaatgctaacagtatcactagtcataatacaaacacaaatactatatgccaacaccaacaccaatactaacactaataccaatgccaatgccaacactaacaccaacaccaacgccaccaatgctaacactatcactaatcataatacaaacacaaatactatatgccaacaccaaccaatactaacacgaacaccaatgccgatgccaacactatcactaacaccaacaccgacaccaccaatgctaacagtatcactaatcataatacaaacacaaaaactatatgccaacaccaacactaacaccaatgccgatgccaacactatcactaacaccaacaccaaaaccaccaatgctaacactatcactaacaccaacactaacaatatactcacactatactaacactaacagtagtactatgtgccaacactaagacaaacaccaaacaccaacacgaacactaacaccagcaccaatgtaatactaacactaacatgaatgccaacaccaacactaatactaacaccaacaccagtggtatgtgccaacactgacactaactccaacaccaacactaacaataataccaacactaacactaatataacactaacactaatgctaacactaataataatactaacactagtgctaatagtatgtgccaatgccaacaccaataccaacactaacaccaatgccagtgctgacactaacgctaatactaacataatcaccaacattaataccaacactaacaaacactaacatcaacatcaaccatatcactaacactaacgccaacactaacagcaatactaacactaacagtaatactatgtgccaacactaacaccactctaacactaacgttaatgccaacactaacaataacactaacaccaacactaatactatgtgccaagactaacaccaacgccaacactaacactaatactaacatccatggcaatataacactaacactaatgccaccactaacaataatactaacgttaatgctaatgccatgtgccaacactaacaccaacaccaatactaacaccaacaccaatccagcactgatgataatattaacaccaacacgaatcctaatataaacactaatagcaacaccaatactaacaccaacaccaatccagcactgacaataatatgaacactaacacgaatcctaatataaacactaacaccgacatcaatactaacaccaacaccaatccagcactgataataatatgaacactaacacgagtcctaatatagacactaacagcaacaccaatactaacaccaacaccaatccagcactgacaataatatgaacactaacacgaatcctaatataaacactaacaccgacatcaatactaacaccaacaccaatccagcactgataataatatgaacactaacacgagtcctaatatagacactaacagcaacaccaatactaacaccaacaccaatccagcactgatgataatatgaacactaacatgagtcctaatataaacactaatagcaacaccaatattaacaccaagaccaattcagcactgataataatattaacactaacacgaatcctaatataaacactaacaccgacaccaatactaacaccaacaccaatccagcactgatgataatattaacactaacatgaatcctaatataaacactaacaccgacaccaatactaacaccaacaccaatccagcactgatgataatattaacactaacacgaatcctaatataaacactaacagcaacaccaatactaacaccaacaccaatccagcactgatgataatattaacaccaacacaaatcctaatataaacactaatagcaacaccaatactaacaccaacaccaatccagcactgatgataatattaacactaacatgaatcctaatataaacactaacaccgacaccaatactaacaccaacaccaatccagcactgatgataatattaacactaacactcatcctaatataaacactaacaccgacaccaatactaacaccaacaccaatccagcactgataatattaacactaacactcatcctaatataaacactaacagcaacaccaatactaacaccaacaccaatccagcactgatgataatattaacaccaacacaaatcctaatataaacactaatagcaacaccaatactaacaccaacaccaatccagcactgatgataatattaacactaacatgaatcctaatataaacactaacaccgacaccaatactaacaccaacaccaatccagcactgatgataatattaacaccaacactcatcctaatataaacactaacagcaacaccgatactaacaccaacaccaatccagcacgataataatattaacactaacatgaatcctaatataaacactaacaccgacaccaatgctaacaccgacaccaatccagcactgatgataatattaacaccaacacgaatcctaatataaacactaacaccaacactaacactaatattaatacaagcactatcaccaagactaatacatgaacagtaaaaccagtactaagaacaacactaatactaacaccaacactgacactatattaatacaaaccttaaggctaatactaacaccaacactaacaaacactaatattaacacaagtaccaatactaatactaacactaacaccagaactactaacagtaatactatgtgccaacactaagtggaacacccacatcaatactaacaacaataccaacactaacaccaatctaatactaacactaatgtcactgccaacaccaacactaacaccaacacaaatgctatgtcccaacactaacactaactccaacaccaacactaacaataatactaacaccaacactaatacaaacaccaataccaacactaacacttaaactaaaactaatattaatatgaacactaacaccaacaatgctgacaccatgccagcactaatgcaaatgcaaatactaacagtcatgccatgttataaataataacagctaacagagatggaccctttcctgtatgtggtctagggctagctgagtatttactcacttcattcataaacagctctttgaagtaaggactattacttcttccactaagagttgaagagacggaggcagagagtggctaggtttttgtccaaggccaaatagctgaccaggagaggagtaaagattgaaaaacagtccatttgattccatggtgagacttttagttgctcttctaccacgggcagtttgagctgtgccttcatcgcactgactcgtttctaggagagctgtgatatggccgttcctgtcggcgcacactggcgttttgttgtcatcctgtcacgggaccagctggggagggagaagactgtgtgacagggattgtcgctgttgtgtgcggcactttcaagtgctcctggaagctccttatctttccagttgccaatagcttttctgtagatcatggtctacaccagtggctgactgaccttggcccacgggccagttcgggtcctccgtctttttttgtgcctgaagttctattggaacactgctccacccttccatttacagatcatctatggctccttattacaatggcccagttgagtagctgaggcaggaaccacgtgccccacaaagccccagatatttactctgtgaccacttcttgtctacaattacctggctgaatgtccatcccctcacctcccacctttccttctatggcaagctggctggagtccacactcctaaccagaaacagctttctgatctttctgaatttgctagaaagcatatggataaaaggcccatcaactcaacttaaactggcttcaaccataaagaagaactgagtgctttgtgttcctgagaagttcagggttatgctgattttggatatagaaggagccagaaggtcccctggtcaccacaagcctgcgattacctcctatttgctgcttccaaaggcctctctccttggtcctccttcttcttgctggtgactctgggaccactcgctctgccctgtccatgtcacctgaccctaccttgattaaccccctccatcccagggtgctgtatggagaggaggcctcaggagtgaggacatgaactcaagggccttactgcattctcaccctggctctatactattggttggatgtaggcttcataactttcattatctccatcttagtttatttgtaaaatattgagcttaatattccctccctcacaggatttgtgagatttaaatgatttaaaatgcactagtactcatacacactcatgcatatctagcacacagtacagtacgtactctataactgttcattcttataactattgaatcattagatcctcattctcttcacagctgcttcctcccttgttctaagtcattcccaatcttttgtcgttaatgcacttcttgcaatttcattgttttccttaagtgagctcgttcattccccagccctcacttttcctcacacgatgataacaataaggaaataataataaaatgatcaacagatcacatttattgtgtgcttgcaatatacctgtttaaacttgagtgcattaactgatttgattcccacaacaaacttcgggagatgagggaaggcagagaaagagacacatggaataggaggagaaggtccactgtgcctctaactggagttctagaaggggagaaggcatgtgaagagggactgagagtttttagaaagtaaagaaatggcaatcttcagatttaggccagagcaatgagagacagagaacctcaccctcgaaaggttctcctgcacgggcggtgcctggacaagcccagtgaggtctcagaattcagaatttctccccccgccctgtggactaagatctcatcatttgttataccccagtccagtagttctcaatactggttacacattaaaatcatcagcagtgctttaaaaacaaaaacaaaaactcaacatatccttttgggtcctactccaagagattttgattaaattattctgggggtagagccctggcatcagtatttctttttttattttttttagatagagtctcgttctgttgtccaggctggagtgcagtggtgctatcttggctcactgcaatctctgcctcccgggttcaagtgattctcctgtctcagcctcccgagtatctgggattacaggcgcccaccaccatgcccagctaatttttgtagttttagtagagacagggtttcaccatgttggccaggctggtctcgaactcctgacctcaggtgatctgcctgcctcagcctcccaaagtgttgggattacaggcgtgagccaccatgcctggcctcagtatttcttttttttgagatggagtttcactcttgttgcccaggctggagggcaatggcacaatctcggctcaccgcaacctctgcctcccgggttcaagtgattctccagcctcagcctcctgagtagctgggattacaggcatgtgccaccacactcagttaattttatatttttagtagagacaaggtttctccatgttggtcaggctggtctcaaactcctgacctcagggcgatccgcccacctcagcctcccaaagtgctgggattacaggcatgagccaccgccccctgcctggcctcagtatttcttaaaagttcccagctgactgaacaacaagactgggggaatcagagttccctggagccatttccagaatctgcacactggagacctttcctctgatccttcctcctcaaagagattctggtctcatgggcctgcacatccacatgcagcatgcgcttgttgacaacaccctccctgtaaaaaagctgagaggtcagtggttcacaaagtgtggtccccgggccagtggcggctgtgttgctaggaacctcgttacaaatgctgactcatggtgccctaccatatatacaaaatcagggaccccaggccagggcccaccacccttgatggaacaagccctcccccaaccctcaccccagtgattttgatgcacatatattctgggaccattgtgatgtgatattcccatttgtaaacatctgcactacacccaatatggcaaactcgaatgtctacaaaaactaccaggtaattcaagtgaacagacagggccagatacaaggaaaataaaagacaagacccatcgaggatgcatggccctcttgttgtcaatgtcaattatgataaacttggagggtatgcatcccacctggagagagcaacctctacttgcctccaatctacgttacaggtgcaaagatagtcctagaacgaacagacttttttttccctaaggtgctagaagctcagatatttagagggaaagttcctgatttttcaaacaaggcatgtaattaacatttccaaatggctcaaaccacactctgtaggccagtcaaagctttatctgtgcagcaaattcagcccgtggctagaaatttctgatttgaaggcaagggccatgtcttccttaccatgtttgcccagtgtgtgtgcttgtgaaggtttgcaatacacattggttgaatgagtgagtgaatgagtgaggtgagtgaatgaatgagccaatgcttgccctatccaggatgttgtttaaaagtgtcaatcatcttttctggggggcaactggtttaatggatcaaaatttagatgcagtggcttcttggggatgctttcctgtttctttccagaatcacaggggctgaaggtggtggctgagagtgcgttaaggggtttgctgaaggcacacttaaccctcttcagtttagacagcaacaggccagtctgtgactttcctgttttctttttgaggagagccaaattcacataattgccttaggctgctgctcagaaacttggctcaataagaaccactctctttcacctcccctaagaaacttttcaaaaactcgtcctgaaaagtcctgagtggcttccgctcatgaagatgaataaataaactccagcaagcttaaacacttgagcaagcaacccacgccaaactgaggttgttttcctcttgcaggtaatattcatcactcagaaatgcccatcaaaacttgcagtgacaggtgtacaacagaaagagccaagaaatgttattgaagttactgtggctgagacattccctgggaaacataaacatccccccagaaactccgccactcatctctcaggcttctcagaaaagacatccaccccactgtcaagtagaaatatttttcctgacaggatcatcattttaaaattaatatttaaaaaagcaacgatgttttcattgtcaccatttcccccttaacaaggcaaaattagaaacggaattaaacagcttcattctcaaagtggttttgtggcacggcacgtttttcagcaacaggcggaggatgctgtgccattgatcaaactgtacaatcctcagtgatgggtgggaaaaaaacctgacctctgagcgggagttgcagcttttactgtcaattacagtttctgctcagatacatgaagagattttatcctctgctgtccactgttcccgtcaatacatttttgtaagagctgggaatacaaaccctgaacatgaagggagcccgtgaggactgcctgcctgggcggaaacactaccctgaagcccaagtccttgacccagttggtcaatacaattattgagatcagttggctcgaaaatgacagtaagtgtttttctcactgatctctactaaggaaacagctacacctctccgggcctgcgtgagttcttagaaacgattgtgaggttcctgtgagaggtagaataaagaactcccaaatataggccatcctggagaagggggagacagagggacacccgtgaggaggactgtgagaagcagggtctagccgcgtagacgctgggtggcgtgcaaggctcagcggggctggactgtgcacatacaatgcccacaaatgaaattaatgacatgtgacaccacgccagctcaaacacatcgcattaaaaagaccacatactgtatgatttcattgacagaaaacatccagaagtggcaaatctatcacagaaactttagtggttgcctggggatggaggtgacagatgggctgcaaaagctcacgggaatcttttgggggtgacagaaagcttctgaaacggaattgtggcaataggtacactcctctgtaaacacacgaacagtctttgacttgtatactcagaaggggtgaattttatggaatgtaaattatgctttgataaagctcttaaaaagaatcacatggaggctatccgtagtccttccgccatgcctctgtataagtgttcctccaaaaatgtgagtacccccaaattacctcaaaacttccatcagcaaatataatgggagacacaaaagagaaattaattttcattatggaaaactagaggtagcaatttttacccattagatgggtgcaaatggaaatgtttgacagtattaaggatagcgagaatgaggaatggtgcttgatatgaggctgatgggtttttgaattggtaaagccactttggagagcaatttgtcagtatttgataaaacagaaaatactcataacctgaagtccagtaactaagtatatacccatttcttatgggcatccacaattaaattagatttaattgtggtcttgatgcccaatctgaattatttcttatgggtatatatttggttactggacttcaggttatgaatatttttgtaatgttcttatggagatttgcacaaggacgttcactgcaacgttttatcctagtgaaaaagggataacaacaaaaatgtccagacaggcaaatgtgcaataaaagaatgggtattcttttctgtggattgcaaatgaatatatatatttacatataaaaaggatatgagatgtacttataagataaaatactattatgtctgtatatgtatatctacatagatatatctgtatatctacatctacatacatgtacatagatatctatatatctatagataaaatatatatctatatactaatctatatatctagatatatttctatatagatatatctataacatactgctatagatatatctatattgatacattgatatgtacatatggctataaatatatatttatataacatttataatatactatataatacattatattatacacatactatatataatgtattataaaataatatataatatatatcatataaatatatattatataaagtatataatatacagtatataagatatatataattatatagctatacactatatagatattatatgtctatatattatgtatctattatatctagatacagatataggtatgtcttggtatgaataaatctcaaaaccaaattcaataaaaaatagtggaatatgttcactatcattatttatgtaaaattagcataaacacacttacgtaaaggacacacattaaacatactggcagaagtgcccaatggaacagcgggtagaggcatgggattggagatgatggttgtggcggacactcttaattatctcccacattttatttcccatcctctcttttactactaaagcccccacattgtagactggacacacatgcactacagtcacgtggttaggggtggacccgtgaccaagttcaatggaagatgagaacaaacatttgtgcaatttcaaagtcacatccataagagaaattggcttgtgtgctacttcctcttttcctttcctactggctggaaggaagactcaacgctgctgggccattgttgtctacgtggacaaggtcactaagagactggaggagacccgcaggatgcagggaactggggctttggaagtgcatggagaatagacatgctttcctttggtgggggcttagcagcctgggtttccctaagagacagaagtaaacctgtgattttcctcactcattgctaatgattctttcttaaagcacctaaactcaacactccacataaaggcatggcatgtttaaagatgactttatacccccaattttttatttcttaaaaatgtccaaaagcaaatacaaaaaagccatattcttgttaatttttatggaggcaatctatgcctatcttgcctatatgtttgctatgtctttaggtttttgtaacctgacaatgtatccaagaagtatgaaggcagtcacattgcttgtacacctgagatggtgacttaaaatttgttttcactaggaatatatcacctaaacatacttactggtttatgggtgaatctatttaatatctcatatcttctcctaagtcccgagcagaaaaataaccccattcttaatctcataggcatatcgacaatattgtcctgtttttctggttcaaagatgtagatagagcccattttctaccttcaacagctcacctctctcagaacatctcaacatagagaacttaatagatgtttattaatctcttcaaatggtcttttgtaaattcttctttgccctgtgagctttcagaagagagtattgcttgtctgggagactgagtttgccatacccatcactcaccaagtgtgcgtttgtcacttgggttcagaaattagatttaattgtggtcttgacgaacaagagtctttaaaacatgcccagtctaaattatgttatgcatgtaaactttctgacgaacaccgtaaaactacatgaaatctagctctggaaagcgatcacactggaatccatgagaaacttcacattttctcttttgggtccagatgattgcattaagcccatctttggatggaagacaagcagagaaaggaaactgggaacttagaattcaggaaaactataagaatggtatctttctatttcttctccgatgcccagaaatgtgtctaacataatcagtgattgtgattggttgattgaatgattttcacaaataattttactgtcctttatctgtcaaagcttttctttccaaagttttcctagaatagaactgaaaggaaaggtccacagtagtatccagttttgagcattcacacctgcactggctgcactgaactctactttgattcatctcaggctgtagagccagaaagcattcaagataccaaaaactcacaggcagaggcagaaccgacggcctttgcaactagggacttttctttggggccaaaacctctctacatgggaaaatcctagaaaaacaggtgtatgtagcatctgaaagttaggtgcttcagttctctcagccagacccaacaccccatgttgcttttatgccacaaacactaattgcattcctattgtttgctaagcactgtgctgaggacaggagacacgtttgtgggcaaactgatataaactctgcccacctctgacacttttggctgcaagtaagagaaagcacaacatatggtggcttaaatcatagagaaattttttgtttaaaagaagtctggagataaatggtctcagctcagtgataccatcatctttcccttcctctgaactactatctttagtgcctgttttcctccctgtgaagcttgtcacttcatggttgcaagatggctgcctaagcgccagacatcacttctcacttgattgtgtctaaaactgtagggagcagagcaagagagagctcttccctggggctcacttcttgtatgtgggaagcacaatctttccaagaagacaatcagcagacatgcctttatatctccttgggcagtaccaggaaacttgttcattctatcataagggatgatagaaaagtatctgggttggcccaaataatgtggacaggcaaaggaggagggggttggctatgcatgatgaggatcacatcttcaccttagggaaagacacacgatatataaattgtaattgtagtaaatattatagctggggaagattggatgtccaaataaagatcttctgttacatcctagccaccaagcaattcattccatggggaagctttaattatgaaaaaatttaatctgagagtttactcctctctccctaaggagaacacttcttagacaatgcatatctatttatgtattcatccatccatccatccatccatccatccatccatccatccatccactgattgtcttagtctgttttgtgctgctataagagaatacttgagaatagtaattcgtaataaatagaaatctatttggctcatggttccagaggctgggacatccaagatcaaggggccacatttggcagggaccttcttgctgcatcatcccatggcaggatgtggaagggcaaaggagcacacacatgggacaagggcatggggactgaacttatccttgtatcaggagcccattccagtgataaccaacctacttctgcagtagctaacccattcccatgacaatcaactcacttctgcaatagctaacccactccagtgataaccaacccacttctgcagtagctaacccattcccatgacaaccaacccactcctgcaatagctaacccactccagtgataaccaacccacttctgcagtagctaacccattcccacaacaaccaacccattcccacgacaaccaacccactcctgcaatagctaacccactcccatgataaccaacccactcctgcaatagctaacccactcccacgataaccaacccattcctgcaataggtaactcactcctgaaataactgcattaatccacttgtgatggcagagccctcatgatcttctcacctctcaaaggtcccacctctctacactggtgcactggggattaagtttccaagacatgagctttgggtaacacattcacaccacagaacgtatttacctgtctaataaagaatgaggacgtctcaaaaaaaaaaaaaattccagtaagattttacaaggaatttgagaaaaagtggttataacaattatatacctgaataagatatgcagttctactaagaattacacgaattttgaaaatagaaagcaaagagagaggaattaacatatattgcaaagccataataggtaaaactgtgtggctcaaaggaacaaatatacactgatgaacagggaaagcagtttggaaagagttgtgtgtgtgcgtgtgtgtgtgtgtgggggggtatatacatttttcatataatgaatatttatattatagaaggtgatatcaaaattagtaggaaaacattatttcataaatatttggtaaagtgtgattgtgatgatagatcattatgcaaaaagaaaaattacaattttctcaaattgcatacaacaatacattctagacagagaaatatggtttcatctagtattttccaagaataggttccaaggaatgaggagagccctgacagcttaccttgtgtcccagaaataagtgaggccccaaattcagaatggggaaaaggccaagtagagggtgaggtgggaagaaacacaaacggtcaaaactccaaaaatagtatccagtcgcagacacattagtcaagagcatgtcctctgaattttaaaacctgctggtatctgctaggcctggcaaacctgtagcctgccagtgggtttacagcgccaagcttgtcaaacccagctaattttgttcttgttgctctgttttgttttgttttaggcttttagcagcctgaagccatggtttttagtttctgtctccagtgataagtggaaaagagggatgaggaaagggctttactggtccaaccagaaacagaaactaagaacccatgactgtattctctcctctggacatccctgccagacacggtcctccatcctcttcacatggagagctgcctggactattttgacgacaaaaactactggttctgcccctcaaaaatccaattaatgaacctcagcatccaatttactcaacaccaccattttccaatcagtatgataaaaagagagttgtaaaatttatactttcttaaagaaaaattcttggggaaaatatgtaatctttgtgccaagctaaatatataatatttttcaaattaactataagttgttccatttgagtgggaaagcaaccaatatcttggtgtgaaaaatgtgagtcatatcacgttggtcatttagaaagtattcaatgaagaaaaatatagcaaaatgtattcaggtgtgattttgcaaaggtgaaaaaagtttagcacacacgattaagtgtgtgtccatttgtggccctggagtgaggggctgtgagactctcctcttccattacaccactgaaatgcaccctgaatctcaccatccatttccctttcccacactgggcctggccatcacaaagctgcatggtttttggctgcagaattaaagcatgtcattctcaaactgccatgtgtgaccactacaatctactggggaggctacagtgaaaggcttgagattctgcagataccctcagagcaggtgtttacataaacgcaacagttacaggaccaccccatatgccagccttggcataagatgtggtttataaggacagggcatggtggctcatgcctgtaatcccaacacatgaagaggccaaggcagaaagattgcttgaggccaggagtttgagaccagcctggacaatatagtgagacttcatccctacaaaaggttttaaaaaattagctgagcatggtggcatgagcctgtagtcccagctacttgggaggccaagatgggaggatggtttgagcctgggaggtggaggctgcagtgagctgagatcacgccactgcactccagcctgggtgacagagcgagacgctgccttaaaaaaaaagaaaagaaaaagaaaaaggtgtggtttaggtacatcaactcatttaatcctcaccctaaccgtgtgaggcaggttggctattctccactttgcaaataaggaagtgaaagcacagagaggtgaagctgctcctccaaggtcacagagataatgagctgggattggagcccagccctctcgctccagtctgtgtgcccttctctccactcctcaacctccacctctgttctcctgcctcctcactctcagcatctagcacagggccctgtactctggaggtgttcgataacgtgtaaagatttgaattgatccagccagggcagcctgaggaatgacatgcttcctctcctctccacaggtcccctggctctgtgacaatgagtggctgcaattcaatacaaccaggtacatgagggagggtggcacgttctcagtgaagcctggctacgagggctgcattttcttccatttcaacaacccaagctctccaaaggcaagaagtgactcctttaggctgccagggtgaaatgtgctgttgaagcctcaggtttcctatgcatacctcgataatctgctgtcggaacttgatgttgctgcatggctagagaatggcagagagaaagacggggaactcttctgagagtcttggttatgaacttcagcagctttcccagaagcacgtccctgaggtctgcacaaaagaaatcaaatccaggtgttgtctagaaacaaacctttgtttgagcctgtacagctctcactcgacggcattttcacaggaaagtaggaagattggctgtaatcatccgtcccagtaggaagatcggctacaatcatccctcagaatccctctgaaaaggtgtccagtgagggatgggtcactgcactgtacacgggtctgtgagacttacttacttcagcactcagctggaaatgttacatctcagctcatcagcatgccctaaccctttggtacaaggacaggcaccatttctttttctttcttgtcttgagacagggtcccgctctgtcacccaggctggagtgcagtggcgcaatcagagctcactgcagcctcaaccctctggactcaagcgatcctcccatctcagcctcctaagtcagttttttaaattgaagggtagagaaattctttctttctcactgatggtgatgtcaagaggatgggtgaggggtctggtgggacagccaccatctgcagcaatggaagagcttgtgtgagattgaggactgggtcctggggtgggacagccaccatctgcagcaatggaagagcttgtgtgagattgaggactgggtcctgcagggtgtttctcacagcacccacagtcacctttatttctgaactttgacttatgtaaaacagtaaattctgctttgttttgcttgtttgggctgtgttttctgccacgggccactgaagaagactccactgacagaaaagttttccaggattgtggcaggcactttgcaaattcaaactcagtactacatacaaataattagaggaattaattataaccaaacaatattcttcatctggaactttccttccaaaccaactcagtgcccagaggaaagaggtcccatgacttgagtaattcctctccattgatatcaaagacttgtcagcgaaggtgattgctccagcccgcggaggttagaacattcatctagaatgccggaaaacaactggctttcgaaaatactcccaggcatgtctcacttaggagaatttagacacatactttagaatacacacataactcgctggaagaagagagtacagcaaggactaaacttgcaacacagatgttaggggtgactgcaaagcattcatgtggagtgagtaggaaacggcattaatgcatttaaaacagattttaacctaggaaaattcagctcacacacaattttggaggaacacatctgttgcggaaatgcaatgaacttgaaatggcaaaagcaaatctgacaaaagcaaggacccttcctgagcaatctgctaatattcatgaaattaccattcattgaccctctactttgtgccagggaagaacacggggaaaacgagagcaacaaggcccctgctacagacattctgttgactcgcatggagttagaaaattaattttaaaaaactagtaaatgatagcagtacatgtatgaagaagaaagggaataatgagggtgcttactaggaaggtaggcagaggagactctgcagaggtgacatttaagcaaagacctaaatgaggtgaggggtagccaagggatatcaagaagagctggttccaggcaggaggagtggcgagagctaaggccttgaggttggcatgtgctttgcgtgttggagggtcagcaaggatgcccgtgtgcatggagagaaatgagaaaataagagatggataggtgatggggtcagagaaaaaatgagccagaaattgtacagccttgagaaagacttgaggttttacttgagtaacacaggatggggatgcagttggaggtttttctttcttttttaaaaagaaaattagtagggaagggtattaggccattttgcatcgttgtaaatacctgagactgggttatttagttatttatttatttattttgagacagagtcttactctgttgcccaggctggagtgcagtggtacgatctcggctcactgcaacctccacctcccgggttcaagtgattctcctgcctcagcctcccaagtagcagggactacaggcacccaccaccatttggctaaattttgtattactggtagagatggggtttcgccataatggccaggctggtctcgaactcctgacctaaagtgattcacccgcctcagcctcccaaagtgctgggattacaggcgtgagccaccatgcccggccaagactgggtaatttataaagaaaagaaaaaggtttaatcggtttgtttctgcaggctgtacaaacagcatagcaccagcatctgctcctgtggaggactcgggaagctcccaatcatggcagcaggagaaggagccatcacacggtgagagtgggaacaagggagagatggcagggggcaggggggtgtaggggagatgccatactcttttaaacaaccagatctcctgtgagatacctgagcaaaaactcattcatcaccaaggagatggtgttaagccattcgtgagagatctgtccccacgatctgatcacctcccaccaggccccacccccaacactagggatcacatttcaacatgaggtttgcagggacacagatccaaaccccatcaggaagctgcctgacttgcatgctaaaaagatcatttatttttttaatatgaacatggatgtcagataagcatagggctataagataaactgactgcgggaccacagggtggatgtgaatgaaatgaggataggactcctccatgtatatctttcaatatcattttaatttttgaaactttaaatgtatttgtgttcttgtcagctcaggctgctataacaaaataccagaggctcggtggcttaagcaacagaaatttgttccttaacacctctgaaggctagaagcctgagatcaaggttctgctgatttggctcctggtgagggctctcttactggcctgcggacaggtgccttctcgtgtgctttcacaggggagacagacagaaagctttctggtgtctctccttataagggtgctaatctcatcacggggctctaccctcatgaccttacctaaatctaatcaccccaaaggccctcatctccaaaaaccccacactggagttagggcatcaacatgtaaatcttggggagacacaaacattcagcccataactattagggattgaacaaatacataaatatgaggatcccctggctgctgtggggcaagcaggctgtgggtccccgacagaggcatggaggtgggtcgggaggtcctgagtggccccactgcaggtgctgtagtgtggactaggggtgctgttgggaggagatgatgaatagcagacttggggtatctttttgggagcagaagcagcaggattttctgtgggcttgggtacatggagtagtcaggatgactccttcaaagacctccagatttctttctggtgcccttatgagaagagatggaggatttcataaggaagactagtcctgcttccattgcaacccctcccatcgttcattactataatatttaggtgactgtccttgaatcttaaaaaaactggggggcaagatttcatgaaagataccaggtctttttctttagtaagctttcttttgcctgaagggaaaatctcatcagattctcactcattttttagataatagcatgttagacaaatcaattaaatccctcaaacatctataaaacccaattcattaattcactccaaaaccttacaaaaatagaagtattctttcttcataaacacacattcatttcatgatgattcgattaaaataaaatattgtacatgttaagacataagtcagatatttgcatcttagaacaactcaacttcagctttacaacatacaccttttgaaaacagcacgtttgtatacattcaccaagtgaatgagacacaaagaaagttttgtaagtagtcttcaagacgtattttttacaaaaatatatccatatataaacacacatacatgagcatatacatgtgtacacatatgtatatgcaatgtagataggaacacacgtgggctgggcgtggtggcttacgcctgtaatcccaccactttgggaggtcgaggcgcgtggatcacgaggtcaggagattgagagcaacctgactaacatggtgaaaccccgtctctactaaaaatacaaaaaattagccaggtgtggtggcatgtgcctgtaatcccagctactcgggaggctaaggcaggagaatggcgtgaacccgggaggcggaggttgcagtgagccaagatggcaccactgcactccagcctgggcaacagagcgagactccacctcaaaaaaaaaaaaaaaagatatgtacacatgggtacacacatacacaccatgtactgggcaagcacacggactttcactaaagagataacagaaaatgggctacttcgtatgcctcataggctatgccttgtgtaattaaattagactccagtgtggatggcagccctgcgcctccactcactctgagctgtgcaagtgcacggctatcctatagcctgtacgcccagcagaagtatccctggttatgcacgaaactgaaagattttgtctgcagcctcttaattttcctccctgtctcgtatctgcctgcttccaatccaccgtgcatattaatgacagatttattttcctttgacaatggtctctgttagataaagcagaaggtacttgatcaaagaataaccgctacaggaaaaggctactctgaatgaattttaaaccaggttccaacatttcaaagtcaaaaatgaaaagaaatttttaaagctttgattaagacttggacaatgaagctaaaattattaaattagcttgcttcatagcacttcagcaacattagcttataattacaaccgcaggctaattcttaggaaaaacacaaagactgcagcccaactccatatcgaattaatataatgaatacagaggagaaaaatgttaatctgtgaagtataaacctttaaaatacaacacaacacttgtaacactctttgtcacttcttcgtctgtcagaattctgggatccttggaaatgggaagtgatcctatcctctctccgtctctgggaagcctagaggaaaagtcaccaggtggagctttaacttccgttatttattttatcagaactaagtataaaaatttctaaataaccttagtggaatgaccttcaatatcaccactaatagatactaaattattaaaatacatgaatctgtttctggattttgaaaatctaagccagggacccatttttcttaatctttaagttaaaaatcagctaattttggccgggcatggtggctcacacctgtaatcccagcactttgggagaccgaggcaggcggatcatgaggtcaggagatcgagaccatcctggctaacacggtgaaaccctgtctctactaaaaaaaaaattagccgggtgtggtggcgggtgcctgtagtcccagctactcgggaggctgaggcaggagaatggtgcaaacccgggaggcgagccgggatcgcaccactgcactccagcctgggcaacagagcgagactccgactcaaaaaaaaaaaaaaaagctaattttaaggtaaatgaccacagatggacagtggtttccatactggaaaagactggagagctttcacctgtagcctaacttcaccccacctccttcttaccctggggcttcactatactctcacagtctttctgctgcctgcgtccctccgtctgcctgtattagaatctaagtgatctcccccctctggtttaatattaggacccaggatagcacctgacatgcattagcctttaacacacatccaccaaacaggagtttttctatccctgtatcaatggcatgaaagcatgtagttttataatttggagaaactgctttttcttcattatgcctattctataactaattgtggctattttaagcatctgtttttctagaggaattttagaattattttgttatttttctgaaaaccctgctagaattttttaaaattatagtaagaacactgaactgctagcatttgaatgagtgtcatattgcatttatagattactttgtggtgagtcaatcactttttgatagtagctttttttttttttatcatttcagaataggaaatgccaatactgatgtcttaatccttatcccctttagcaaagttggggagtgctttttttctactgttttcaaaaagtttttcttgaggttattctttggtagtttaaatttttacacaaggcaatttttatataccattgagagctattcagaaaaaaaaaatgctccaagtccatgggtcctaaaatttctgggtcacgaacctatttgagaataagagggtttacgatatttatgaactctctgtaataataaaggtatgtatatatctatctgtgtttgcatatacactcatgtgcacaaatgtgtgtttgtgtgtcatattttgtcagagtttcatggattccaagcctatttatctaccacacttaggtaaatctgctgcaatactttttaaggagagagactgggacacatacaaagagagaagttctctctgtttttgtttttgtttttgtttttcattttttgtttttttgagatggagtcttgctctttcgcccaggctggagtgcaatggtgtgatctcggctcactgcaacctctgcctccagggttccagcgattcttttgcctcagccccccaagtagctgggattacacgcacccaccaccatgcctggctaatttttgtattttcagtagacacggggtttcaccatgttggccaggctgggcttgaactcctgacctcaggtgatccacctgcctcagcctcccaaagtgctgggattacaggcatgagccaccgcacccggccagagaaattctcttttatttgaagtgttcattacataggtctgtctgtattccagcctactcaggtctctcctgggacaaaagaaaggcataaagctaaggtaaaaatctgtgtgtcggacactcacacaacactacattcccttatacacacacacacatgcacgcacgcgcctagaagaggacaagcctctgacgcacttctggagaaaatgttcaaagaatgtgtaaaaactttctacgttttttaatcatttccgctctagcagctaaacacaccatgtgagagaaattttcatcctgtgggagctgagaacctggtgggtgaatcattcgtgtaaattatgaattaccactttcagcaatttgagaggctgatttgtcaccaacattatgagatgctcctatattgttcaattcctataaaataaataaaagcatttctttgcatatagagtgtgaaaacaagaggtacttataaacagtaaagagtaaatacacatatttgaacacaatattactttgtattgttatgttaccgagcttccccattgcctattccagggagcgtaaatacctctgatctgcataatcttgcatgaggaagctgcatcatgcttgcatgagaaagctgttccatgtctgcacacgtgcagacatagcagagactctgcttgatggggactatgagttaacgtagacttctgaatcttagtatgtgtatgcctaagaacgtcacttaaaggttctaaatgcttcattagaacatagaccctcctctaaagagaaacatggattcctctgccttgttccttctggagcactgctacccagtggaactttgtcccatgatgggtgtgtcccaagtgtgcccatccactatggcagccatgagttccatgtggatcctgagcacttgagaggtggccagagccaccgaggatctgagcttttcattctagttaattctaacttaaatgaccacagagggacaggggtttccacacaggaaaacacagtacagagtttaccggcatgcaacattagtgtattcgtccattctcacactgatgataaagacatactcgagactgggtaatttaaaaagaaaaaaaggttttgtttgtttgtttgtttgtttgttttcagatggagtctcactctgtctctcaggctggagtgcagtggcacgatctcagctcactgcaatctttgccacccgggttcaagtgattctcctgcctcagcctcccaaatagctgggattacaggtgcgcaccaccaaacccagctaatttttgtatttttagtacagatggggtttctccatgttggccaggctgctctcaatctcctgacctcatgatccacccgcctcagcctcccaaagtgctgggattacaggcgtgagccaccaccgtgcctggccttctcaatgaacttctaatgtacttgtctgactccagaaaaaaaatttgatgttaattttattggaagtgaattgaatttatatatttttttaacttttaagttcaggagtacatgtgcatacattacatgtgcatactttacatatataaacttgtctcatggggtttgtggtaacttaagaattgacaccttcatgatattaagacttctaattcaaggacatgaatatcatctcatttctagcagttttgttggacatttaagggtattttattagtttcttatatttaggttttcaatttttttaagtttatgatgaagaacttcattttaaatttttttatcattttaagtggggtcttgttaactgttttgttgttgtttataaatatgaatgctgataatttcatgcttatctttatcaactcattattttattaatttttctgtctgctttttaatgtttcccattgattcctggcaattttccaggtacataattatgtcacctgtaagagagatagctttacatttcccttacccattcttatgcctataattgcttttaattatctgattgatgaattcgttatcaccaacacagtgttaaatgatggtggagagagcagatatctttgttatgttcctgactttagtaaactactctgctttagttagttatcggtttagctttgtttggtttgggcttgttttgttttgttttgagacaggatctccctctgttgcccaggctggagtgcagtggtgtgatcttgactcactgcaacctccaccttccaggttcaagggatcttcctgcctcagtcttccaagtagctgggaccatgcccagctaatttttaatttttttttatagagacggggtcttgctatgttgctcaggctggtcttgaactcttggactcaagcaatcctcccacctccgcctcccaaagtattgggattacaggtgtaagcccccatgcccagcctaattattgctattttaaacagcagatttcagctagagttgatatttctgagccataaccttctctgaggctctgaggggacaaaacatctctcagctcttgtctcccctcattctgtgacatcatcatctcgctttcatcggcagtccgtcttccacaaatatttcgagatcacttcttccctaatgttctcactcccattgttttcatcgtgttatcttcattgctttcttcctttctttcctatattgcatatggtaccttggccgggtaagatgtgaatagggttgtttaatcctcctccttcaactagaattaccaaatgaaattttgactgtaatgcaatactctaataatccacattttttatttttttgaaaattactctgttaccagtaatctacattagaatgttagaacaattagccaagatatcagaaaatcctatttcaaagccactttaaaaaaatacaaaatatttctctgtcattcaaatttatttaaaaaaaaaacacccattgcttgtgcagagtccagattcctaacctgaagacaatatgacgggatatgatggggttgtctcctgaagcatgaacagcttaaataaattgatttgtttattcaggaaccttctgtagaaggcatcgctagctgtctatgcaaaatccattttcttattttccccttactaaatgaacattaattttgtttgggttggcaatgaacctagccttaagaaaagcaaacaacaagtgccctctttatgatggggggtgggtgtggctttgcctaatattttaaaattcagaagtctactgggaattttgaaaacattttgctttcctgctataagtgccacccctcctcctcattcttcctacagagaaggaagaagagggagagatcttaaaaccatgaggggccgggtgcggtggctcacacctgtaatctcagcacttcaggaggccaaggtgggcagatcacttgatcaggagtttgagaccagtctggtcaacatggtgaaaccccatctctactaaaatacaaaattagctgggtgtggtggtgggcacctataatcccagctactcaggaggctgaggcaggagaatcacttgaaccctggaggcagaggttgcagtgagccaagatcatgtgattgcactccagcctgggaaacaagaacaaaactccatctcaacagcaacaacaacaacacatgaggaagaaagccacacttttaggatggaagaatggaaaggcagagccaacctccaatgacattgaggaactcatgtgcccgttctgagcagtcctcacctggactcatttccatgagaaaaataatctcttacgatagaccacagtagtccagtttctgccactgagagtcaaatagtatataattaacacattctctagtaattattcaatattcaatagtttgagatttaacatttctaaggaacataagtgatatggtctggctgtgtccccacccaaatctcaccttgaattgtaactcccataatttcctcatgttgtgggaggggcctggtgggagataattgaatcatggaggcagtttcccccatactattcttgtggtagtgaataagtctcacaagatctgatagttttataaggggaaacccttttcacttggctctcattttctctcttgcctgccaccacgtaagacatgccttttgccttctgctatgattgtgagacctccccagccatgtggaacagtgaatccattaaatctatttttctttataaattacacagacttgggtatgtctttgtcagcagtatgaaaacagactaatataataagtgacgtcatttccaacaatttgggcataaaatggatttgggggatggtgtgattttctcaccctagagaaatatagttgatattggagagaattagatacatccttttctttttttggcaagcaccttcctagtaacattagtcttttgaaaatgataacacatttcctaaggttttgagttccacaaatatttactgtgtgccaggtactttgcaaaatgagtaagaaactcttaccttgatcttggggagcttacactcaattctaggggacaatcaaaccatatggtaaattttataatagaggtttgcacagtgcactattgaaatatccagaaataagtaatattcctttcatgaaaagtcatacaaaatattagaaacatcttagctgggcatgaacgaacaatacctcatactcagtgtgtgctcacacaattaaatgaaattaaaatatttgaccctacttccagccagaacacaaccgacacaaatctatgagtgcaagggcactgtggtgctttcttatgcagaaacaaaatcaggtcaccaaaattaaacttctttgccttgctaacttcaactcagttaccatgtgagcaccctgctgaatctctccgcataaagtgggcggctgtgttattctttctctcaacaccatacgcttttttcttcttagcacttattggcaattttaaattatacatttgtttttgtgatcattaccctaattaaattgaaacctttatgagagagagaatgaatcttccggctcattatggtttcctagcagcaaacacataagatgcattcaataactatacggtggacaaaatgaattaatttcaaagttgtgaatatgtgatagtcattttttaacttattcagaagtcactccttcctttgcaactagaaggtcttgtttgacacagaggccatttcccccagctttactaaagaatgattgacaaataaaaattgtatatatttgggttggcaatgaacctagccttaagaaaaaccaacaagtgccctccttatgatggggggatgcagcatgatgtgctgatagacacatatgttgtgaaatgatgaccacaatcaggataactgacatattcatcacttcacctagttaccatttttcttttggtctggtaagaacacttgagatgtcctctcttagcatattttaattttacaatacatgactattaactatcgttaccatgccacacattacatctccagaacttactcattttacaaccgaaaatttgctggacactttgacgagcatctccttgtatctgttcccccaccccaccgcccagtctctggtcaccaccattctactattctactctctgtttctgtgaattcaactcttttagattccacatataggtgagatcatgccgtatctgtctttctgtgcctggcttatttcccttagcacaatgtgctctaggttcatccatgctgtcacaaatgacatttcattctcacttcatgctgaataaaattccatcacatgtgcacactccattcctttatgcatcatccactgatgggcacctaagttgtttccgtatcttgactatggtgaattatgctgtgatgaacaatgagtgtgggagtggaggtgtcccttcagcatgctgattttatctcctttggaagtccacccagaagtcaaattgttggatcgtatggttgttctagttttaattttggaggtaacctacctaccattttctgtaatgcctgtaccaatttatattcccagcaccagtgtacaaggcttccctttccccacatcgtcaccaacacttgtttcctctgtctttttggtaacggccattctaacaggtatgtgaggggctatctcatagtagattggtatacgggccatttttgatagaaaaattgtccaggccgaaaagaagttctgttcctaccatttgaaaaatacataagaaacacaagtgagcggacatagatatctaatattttctgccagagatgagatttgcttctcaaaccacatctgacccacaggaactgtgactcacaagatgcctgctgtgatcaggccaaagtggaagtgcttttctttctcagcagagtctacctgtgcacatcccatctgctcaggtcagggcttaggtggtgccacagaaacacctcctctgcaatgatgttgtctatctcggtttccagtcaggccacaaagctcactgaggatggcagggagggcaaacaatgcccatccttaaggaccatccacacagggaaatgcattgatcagactggcatggtggctgacaccagcacccaaccctccctttccttttcaaccagagcctggttctcctttggggagttcagatctttgctcttctctgttaatcattggccattctcagcttagagacacattctgctcggcttaacactgctattcttcccccttctgtactgaggtgcatggtgtcttccaaatagtcatgcctactcaggacctgagaatgaggccttatttgaaaatagggccttgtgaaatttaaagtacatttttctaattctgtggagaaagtcaatggtagcttgatgggaatagcattgaatctataaattactttgggcagtatggccattttcacaatactgattcttcctatccatgagcatggaatgtttttccatttgtttgtgtcctttcttatttccttgagcagtggtttgtagttctccttgaagaggtccttcatgtcccctgtaagttgtattcctaggtatttaattctctttgtagcaattgtgaatgggagttcactcatgatttggctctctgtctattattggtatataggaatgcttgtgatttttgcacatggattttgtatcctgagaatttgctgaagttgctcatcagcttaaggagtttttgggctgaaatgatggggttttctaaacatacaatcatgtcatctgcaaacagagacaatttgacctcctctctttctatttgaatacgctttatttctttcttttgcctgactgccctggccagcacttccaatactatgttgagtagaagtagttagagagggcatccttgtcttgtgccggttttcaaagggaatgcctccagtttttgcccattcaatatgttattggctatgggtttttcataagtattttgagatatgttccatcaatatctagtttaatgagtatttttagcatgaagggatgttgaattttattgaaggccttttctgcatctattgagataaacatgtggtttttgtcattggttctgtttatgtgatggattatgtttactgatttgtgtatattgaaccagccttgcatcccaggggtgaagccaacttggtcatggtggataagctgtttgatgtgctgctggattcagtttgccagtattttattgaggattttcacattgatgattatcaggaatattggcctgaaattttcttttttgttgttggtgtgtctctgccaggttttggtatcagaatgatgctggcttcataaaatgagttaaggaggagtccctctttttctattgtttggaatcatttcagaaggaatggtaccagttcctctttgtacctctggtagaattcggctgtgaatccatctggtcctgggctttttttgttggtaggctattaattactgcctcaatttcagaagagcccctatagccaagacaatcctatgcaaaaagaacaaagctggaggcatcatactacctgacttcaagctatactacaaggctgcagtaaccaaaacaggatgatactggtaccaaaacagatacgtagaccaatggaacagaacagaggcctcagaaataacaccacacatctacaaccatctgatctttgacaaatctgacaaaaacaagcaatgggggaaaggattccctatttaataaatggttctgggaaaactggctagccatatgcagaaaactaacactgtaccccttccttacaccttatacaaaaattaattcaagatggattaaagacttaaacataagacctaaaaccataaaaaccctagaagaaaacctaggcaataccattcaggacataggcatgggcaaagacttaactactaaaacaccaaaagcaatggcaaaaaagtgccaaaattgacaaatgggatccaatcaaactaaagagcttctgcacagcaaaagaaactatcatcagagtgaacaggcaacctacagaatgggagaaaatttttgcaatctatccatctgacaaagggctaatatccagaatctacaaggaacctaaacaaatttacaagaaaaaaacaaaccccatcaaacaataggcaaaggatatgaacagacacttctcaaaagaagacgtttatgtggccaagaaacatatgaaaaaaagctcatcgtcactggtcattagagaaatgcaaatcaaaaccacaatgagctaccatctcatgccagttagaaaggcgatcattaaaagtcaagaaacaacagatgctggagaggatgtggagaaataggaacacttttacactgttggtggaactgtaaattagttgttgaactaatggttgcattgtggaagacagtgtggtgattccttaaggatctagaaccagagataccatttgacttggcaatcccattactgggtatacacccaaaggatgataaatcattctactataaagacacatacacgtgtatgttaattgcagcaccatttacaatagcaaagacttggaaccaacccaaatgcccgtcaatgatagactggataaaaaaaagtgacacatatacaccatggaatactatgcagccataaaaaaggatgagttcatgtcctttgcagagacatggatgaagctggaaaccatcaccctcagcaaactaacacaggaacagaaaaccaaacaccacacgttctcactcataagcgggagttgaacaatgagaacacatggacacagggaggggaacatcacacaccggggcctgttggtgggtgggggacaaggggagggagagcattaggagaaatacctaatgcatgtggggcttaaaacctaggtgatgggttgatgggtgcagcaaaccaccatggcacatgtatacctatgtaacaaacctgcacattctgcacatgtatcccagaacttaaagtataataataataattaataataataaaagaaaagtggggcctctacagttgtaattagctaagttaagatgaggccatgctgtatacgggtgggttccaaatcaacagtcagtgttcctatacgaaggccaggtaaagatgcagagatacagatagagacacagggcagagggcaatgtgatagcagagtcatgccgagtgacaatcaagtgaagcaacgacagccagcacaggccaagggctgccccaccgcagcctgaggatgcagggaaggaacctcccaagagccttccacgggagcagggccccgctgacaccttgatttcagacttctagttttcagaacagtgagacactaaacttctgttgccttttcccacccagtttgtgggacttcgttatgtaaaaaatgggtggagaaaactaatacaccctatttcttctatttccttgagagtccccaactccaagctacaccttcaagtttgggtgggactcaggctgtctccatgttcttgggggtggggtcaccgaacctctgcctggccaatcagtaatgactgtgatgggttcagaaacgggaatgtgaccagtttcagccagcaagagtaaatcctagcaattccatgggacctcctgcaagaggctcttttccctgcgtattaggggatgaagatgagcgtgcaggaacagcagcaaatattttgccaccatgagggagacaggtactaggaggggcactgtgcacagtgtaaggatgaaaactttagcagaaggaggatggtaagggacagaaggagagagagagagagactgttcctgataacatcctttaaaatattcattaaagttttgctggaaaccagaaataccacttaacttctcagttgcataagctaataatataattctttatggctaatctgcctccggttgcattttctgctacttacaatgaagagaatactaaatataatgtcttttgaataagtctatattgtgatgtctttactgcatctataattgaatcctgccccattggaagcagttgtctgctatatgaatataaaatgccaagtctatggccttttgttttagatgtggcaagttatgtttagagatttcatataattgtgtctcaactgattttaaggtaaactaatttatgtgggagggggtgggtcacttgaggctaatttattttctagggaagtttttaaaatattcccagttgaccataggtcatcatctgcccaaaatgaactcagaaaattaacattattgtaaatatacatttaaggcacattgggtgaatcagtttcatcttaaaaggccacacttggagcttggtactgaggtcccagagggctgtgttgaggaggacctgagcccacaccagctcagaggaaaggtgtgctgtgggcagttgctggtgtctgcgatagcatcagcaggaagaatgctcccaccgatggtgtcccggctatagaaaacacacagccaagacactgtaccgtgtttcatattctctaagtatcccaaacaacattatgaagttaatttcaaattattgcacgttctctgttttttttttttttttttttttttgcagtatctgggccactgccatttgtaaggataactgtcaatcatctttcctacaaaacctgcttctgacaggtttacaaatgagtgctgtccggtcccaaaccatctcaaataccgtgaagcacagtttccagacagagtatcatcgaaggctgtcaaataaatgaagaaaacagcaggggaaaaattctacccaacaggacagccgcaacaggcaaaaggaaagcaatttcttgtgctgggttggttgtgtgcttctcaagaatctgaagtcctgcaggaagttacaaaggcaaataattaaccccactgccaaggatgtgtggagcccaaccaacgctcagcaagctggcaagcgataaagacccctggtgaacaccttcattttttgcttcactctgaaatctgtctccaactaaaatcacacaaagttaactgcaacctctaataccttttgacattgaacacttcgtgggaatgtatttgctggtgagacaacccaggaatgtttttgtgtttccaatacaattgttaggtatggagtttgatgtgggttttttatataatctctaactggctaattcccctctacttttatttatctaacagtccgagctgttggtagatctacctttttttttttttttttgagacagagtctcgctctgttacccaggctggagtgcagtggcgcaatctcagctcattgcaacctctgcctcccgggttcaagagattctcctgcctcagcctcctgagtagctgggattacaagctcccgccatcacacccagcgaattttcatattttttggtagagatggggtttcaccatgttgttcgggctggtctcgaactcccggcctcaaatgatccgcctgcctcagcctcccaaagtgctgggattacaggcgtgagccaccatgcctggcctagtggatctatttttaaagtgaggagatcatagtatgtatcacaagacaattgtattcagcatccattaaaataaccaaaggtttcttcatttacttcacaaatcagctacactaatccagtggttctcatgtgagggagatttttgctctccctagagacatgtctggatacatttgtgcttgtcgcaccccatgggggagcatgctatgacattgcttgggtggagaccagagatgctcctaaacatgtttcagtttccagaacaactatcctcccaacccttagaaacaagaactacctatttcaaaaggtccacagtgctgagattaagaaacctgaatcaatagattttctactagcagccctgatgtcctaatgttgacttcctaatgggctacattctaaaataaactttacttggctatatttttgatacactgctggatttgtttgttaatgttttatgtatggcttttgtacccgtgtttataaatgacatagcaaacatttttcttcatttttgaatgattgccaagttttgtcatcatggtaaagatagactcatacaggaatggaaaatctttcctcatctcaaatttatttaaagcaagttttaattagcatgcaataaaattcagtctgagttgtggcaaatgcacaggtgtgtgtctaccaaagtgaaggtacagaacaatgccatcgttcccccagattctttccttctcctgtgccttcgcggtcaaatccttccccatcttccctttttaaaactatagtttcaattataaaattcactcatgctcattgcaattaaaccatacagcaatgttaaaaaaaaaaaaaaagcttttctacttttcttctcatctcctactgacactaatgttaatatttaagggaacgtttacatatttgggtttgacgaaacattctaagcaagagacaaaaaaagaatatctatacaattttttaaattttattggcgaaaatcaccataaacaaaacagaaagaggggtatattattgctgtatcaatgtcacaaatattgcttctcacataataagaagagaacacctccaaagtgataaagataaacaacttgatagaacaaaaaattagcagaggatgtcaatgggcaagtcacagaggaggagttgctaaaggccagtaaacatctgaagaatgctctttctcatcagtggtcaaataaatgcaaaataaaaccacaaagataacagttccctcatcagattagcaagaattagattaacatctaggtctgaaaaggttgcaaataaattagtgtcttgccaacaatgtcaggcaaataaattgcattaactttctggaaattaatctcgccatgtctatcgaagtcaacaatttacatattctttgagccataaatctcacttgtgaatttatctacacaaagaaaatcaccagtaagtaaggataagtgcagaattatttatactgataaaaatatcaggaaaagactactgtcaacaggtaaatgattgaatacattatgataaaatgattctgtttattatgcaggtatttcaaagagaaagaattcaatctttctctatacatacatatatgtgtatatatatatatatgtatacatatacgtattatgtatacatacatacatgcagaataaaaccaaggaaaactagaatcaacgaaggaaagtaagccacagtggaacaacatggctgtctacaaccagtgacaactgtgtcttcactgcctcatcagagaaagcacatatacatgtatatacatatatatatatgtacatctttatataaatatagatatttctatatatttacctggaagagtacacagaacaatttctaaattaaaaaaataaatctcaattcatatgcacacacatacacacatatacaaaccctcatttagagtcacatgtctgacattttaagtctgaaatctatcacgtgatgatttcctttgttttccttttcctacacataaacaggaaacagtgctctgcaaactagaataaaactaaggaaaatcagccaaggtggaataacttggctgagtgcctatagccgctgataactgtgcctgcactgccttgtcagaggaagccactctcttctgcaacatccggcaacacgctcactggggatctggttcttctagggttgggttagcaaatggatttcaagagccaaatctggatgatttgtaggggatgtaggggttgtagggctctatggaaaaggacaccatgattaattatcaatgtcttccacaggaggggaaggggactggtgaatgagagtctgtgtcactcacctagcccaagatgctgttcaggtaggcattctatgacgggaaagggaagcgcttgtactcatgagtagaagagctagtatgctaatacggacagacccttagaaaatgccttcctcaacacgaactttcaatattatttatggtaatacccattgactcggactagaaatatgtcacagcttttgacaaggaaagctaccacccactgcttcctaatttttaaaaagcaatgttttccaatcagagcaatttagagcatgaaataaatttcattaatgacaaagaaattataaatcttaaattccttcagttcgtaacagcctcataggttaggctgcccaggtagctttggctgagaaaatatttgacatttttagaaaatgacataaaaattttccagccttttgttacccgttcagcaaagaagcctttattgtcttctataagtactacattttttgatactaacgacagttgactattattaacatatatcattataactataattcatactaataattctaatgaaatgtaggagcatctctctgtatggatgatttactttcaaagaagcgatctgtaaatttttttgtaaaaaaaaaaaaaaatctatgacaaatatcgcatgagcgggaagcatagtttttaaacactgtttctcaataaagtattagtttctccttagttcacaccaagaatgtaggtggtcacattctctagtcacgcactcaaaagttttcccatacatcctcttttccttctccatgatttttgcttaggaaggcattttccacccattggatgatactctctaccttgcaggatgctttctgttttcaaagacatctcgggaggccgagacgggcagatcatgaggtcaggagattgagaccatcctggccaacatggtgaaaccccgtctctactctctattaaaaatacaaaaaaattagccgggcgtggtggtgggcacctgtagtcccagctactcgggaggctgaggcaggagaatggcgtgaacccgggaggcggagcttgcagtgagctgagatcacgccactacactccagcctgggtgacagagcgagactccatctcaaaaaaaaaaaaaaaaaaaaaaaaagacatctcaacacacataatgaactcctcactttgaatctgtttgaggattataaaacaagtgtattgagacatatttagaacattatttacttatttaaagcgtataaaaagactttaaactcgtcaacttgtaaaaccatcatcctaagtgaattttaggacgttttcatcaccctagaaagattcctaatgccaatttacagtccatcccgctccccacctgcagcctcaggcaaccactaatcaatctactttctgtctctatagatgtgtctgttctggacatgcggtctctggtgtctgcttctttcccttagggtaatgagtttgaggtcacccatgtcaaaggacgtataagtaatccattattttgtattgctgaatagtattccattttatggatataacatacatcagctgaaaaatgtctgtgttcgttccagttttcagctattatgaataatggtgctaaggacgttcatgcgcaggtttttaggtagatctgtaatttcatctgttgtgcagatatctagcacttgaaactgctggcccatatgggaaatttttgtatttaatgttttaagaaactgaggaagcttcccaaagttgctgcactattttccattcccaccagcaacatacgtgggctcctgtttccccagatgcttgcactttttttttttttctaatctctgcttttgcttccatcatagtagaaacatttacagtcttcctgactttacgttaattgacatgactggcttaatgttctttgcaaaacatcttggaaacacaataaacacgcatatgactaatgaacaacctggcagtcaagaacaaagtggccacacaaccccctaatacatcctaaaatgccttctgtttctggagtggaatgttgctcctatctgacacagccaatcaatagaggtaacactggaacactgatgttggggagaggatgtggtatttgcagctgacatttattgaacattttctaagagcaggtttctactgaggtcattacctgcttcattgtgcgtaaacaataaagatccatgtgaagtagtgataatcgtctctagtctacagacttggagactaatgtttggaaaagttgagtcgacttcccaacgccacataggcaatggagcaacgagccaacatggaaagaaaagctgttttatcacgaaagctttggcaggacaatatgacaaatggcagatgctttgagaataggatgttgctatgggtagtgcccagtatttgcaggacccacaacactggcagcagaaagataaccacttctccagccagctgcactgaagatcgctatttgtattagatggagattgtgttcagctgcctgtaactcaaatcagaggaagaattcatttttctcgaagggtctgcatggcagctccttctctcttcatgtcctgctgtcttccctgcatggttttcatcccatgactgcctcatggttatgagatggctacaccatctccctccccctgccaatatttaggaagggaaattatgaggaagaaaacagcaggagaaaggaggttccctaatcagacaagcaaaacctctccagaaaccgctggggaactgtttcctacgaccacacctaggagcaaggaggctcagaaataaatcagtttaaatgcctattattctcctgcacacattcaggattctgtaagtaagaagaaggatagcagagtttggggaaagcaattggcagtggttgccacactgatgtctcagtcaggtcatcttcaggctccaaaggtcctagaactatctcaggaatctccatcactgtgccaagaggctgagcacactccctctccatcatgtctcagatggttaagacattggagcaagcgcttattgagcataaggttcgaaataataataccaacattggcagctgacacatgtgcttactctaagccaaactctttatatatattaactacatttaaatcccacaacaatcacaggagggaaggattattatcaccgtttttcaaagaggaaaaccgaggcacagagaagtaattcccccaaagtcacacagctaggaggtggcagaagcgggagctgtggcactgtgcatgcagcacgccttcaaagcgcatgtgttactcattctcacccgtggcctctcataggtggaatgtgcaggctagcttagagatacacagctagagagctatagggccttgggaaagtcactttcctttactaaagcttaatttgctcctataagacaggggcagtggagccaacctcaaaggatgtttgcaagaaataaatacgatcccatatgggaagcacacatgctggatgatccttgtcttgtcagtgctcaaatatactcttgtttgcatgtttaccatctatatgtatggatttgaatcctagttagagttaaaacaaaactatatggatggtaaaagacaggaaaacaaataacatacggggtgaagcctcaggtggggcatcataatcacgcagcatcattccttctctttttcagatgaagtccaatgctaaggacgcatcaagaaaggaagcctccttctcactcataggtggaaactgaacaatgagaacacatggacacaggaaggggaacatcacacaccggggcctgttgtggggtcgggggagggggcagggatagcattaggagatatacctaatgttaaatgacgagttgatgggtgcagcacaccaacttggcacatgtatacatatgtaactaacctgcacgttgtgcacatgtaccctaaaacttaaagtataataaaaataaagaaataaataaataaaagaaaggaagcctctgtgttgagactggtcctagtcattcggatgcactatgcatcccagtttttgttagtaaaaggtaaaactaaagtgcactttaaaaaatcacattcctggaagaaagaaaatcttgtaaattttctagaggaggaaaattaaaaaaaaacaaaaccaaaatcaaaatcaaaaccaaacccaaacaaaacaaaaccaggtcttagggtaccgcaatgcaatagatattaaaactgattttactttaagggaaaattttactttaattgctgtattaacagatctttcaggtattaagtcccgctgagttgatccgaaacaccttatcttatcttatctctcctgcagttgctctgtgttttcaatcctctctcggataaacagaaatttctccatgggaaatttacacttctataaaaattcatatataataatgaatgattccacctacccaataaacaaaaacacaaaatccataaagagaagagaggaaacagggaccacaagcaaacaaaaacaaaagagaaaaccaggaagatgaaaggtcagaggtgatgtcctagaaaataagaaatctgttctttcttacaaatacggaaacccattttaaaattggatactttaaaagttattgtttaaatgggataattcagcatccaggtgtgctttacataaagatgttacagcacaacagcatctttttacttttatgaatattcagaaaaatctgttgtgtaaaacaccaacaacagtagtaacaacaagaaacaaaaaccatcaaggctggagtgtgaaattgaaaggctgaatgccaaggcactgaaggattccaatttgcatttttctattttgcaactttgtgtctaatgtgacacatgttaaagaattcttaacctgtgttattacttggaggaggaatttcaccactacgtatgctggagagatttcagagactttgattttttatttatttgtttatttgtagccctgggacaaaattcttattttccttagctgagaaatatattagcaagcatcagctctcaattttacatattcatggtagctgatataaaacggtatttggcttccagaggcattatgtgttttatgtaaatgtgtgtcttgggcattttctcaagggaaaagctgtttcatcacttagtccttactccctaagaaagcacttgatgagaaccatgaattaatatcacgactgagcgagaggggaccagggaaaattgcttcagcaattgcttggaaggctcccagaatttggcctgggcatagctgcagaaatctttggaaacagaagactccgtgaaagtaaatgaggaagtgtgaattttgccacttagttgcactaagcagtttatactcactgtagtccacaatccttcaagttactcacagtagtccaaagtccttcaagttactcactgtagtccaaagtccttcaagttactcactgtagtccaaaatccttcaagttactcactgtagtccaaagtccttcaagttactcactgtagtccaaaatccttcaagttactcactgtagtccaaagtccttcaagttcctcactgtagtccaaagtccttcaagttggcctgaccaagtagttgtggattctgctctgcacttgatgggaagagcctggattcagagttagacgagctgaatctgtcagtcaggggacagctgccattcacagaaaccactctagtagtgtaagcagaaagggatttaatagaggaaattgctttatagttttttgtttgtttgtttgtttgtttgtcattggtgttgaagaaacaggctatgggatttagggatgacttctagaaaaaccccaaagaagaggcccccccagggagctggtgccttggcttccacaaggaaacaggaaaactgggaaacctttctcacctcagcctcccaagtagctgagacacaggtgtgtgccaccacacccagctaattctttcttttttttttttttaatatactttaagttttagggtacatgggcacaatgtgcaggtttgttacatatgtatacatgtgccatgttagtgtgctgcacccattaactcgtcacttagcattaggtatatctcctaatgctatccctcccccctcccccgaccccacaacaggccccggtgtgtgatgttcccctccctgtgtccatgtgttctcattgttcaattctcacctgagtgagaacacgcggtgtttggttttttgtccttgcaatagtttgctgagaatgatggtttccagcttcatccatgtccctacaaaggacatgaactcatccttttttatggctgcatagtattccatggtgtatatgtgccacattttcttaatccagtctattgttgttggacatttgggttagttccaagtctctgctattgtgaatagtgccactataaacatacgtgtgtatgtgtctttatagcagcatgatttacaatcctttgggtatatacccagtaatgggatggctgggtcaaacggtatttctagttctagatccctgatgaatcaccacactgacttccacaatggttgaactagtttacagtcccaccaacagtgtaaaagtgttcctatttctccacatcctctccagcacctgtcgtttcctgactttttaatgatcgccattctaactggtgtgagatggcatctcgttgtggttttgatttgcatttctctgatggccagtgatgatgagcattttttcatgtgtcttttggctgcataaatgtcttcttttgagaagtgtctgttcatatccttcgcccactttttgatggggttttttcttgtaaatttgtttgagttcattatagattctgcatattagccctttgtttttcttattttttgtagcgatggggtcccactggtctcagactcctgggcttaagcgatactcctgcctggaactcccaaagagctagattacaggattgagccaccacacccagcccagttctactctttaactagtatgtaacatccctaaatcccactcagcctcagttttctcatctgtgaaatggtgacattagagggttgattatgagaattcagtagtccctgacatcaggcagatacataataaacgctggtgaacttggccttccctgcgcctcagacttccccagttgccaataattgcagtcgatgggatggaggcttacagaaagaaaaaggtgttcttttattcactccttaaaatgggggaggtagatagggaaagagctcaggagagtggggggagacaggtacacttttaaaccaaattagttggataccagcatcatcctctgtctgggcttccaggcgcatgcctgatggagggaatctgctctatgattaaatatcaatcacagtcagctgaggcccattgggtgcaatcccagaaattcagacttgtgttctctgtcttgggcagggggcttccaggaatggagaagagagcggctgctacgcattgttataacagcagctgagatggttcccttccagcctctacctcatttagttctcacaagtagcccttgaggtagctcctgccattattccctgtttaccgataaggacgcggagcttcagtaacttactcgacagttccagcagctaagcctggagtctgtgttgttcccactgccatgtgctacatctctggatttcccaaatcgttctccctctctgcttcagattttccagaagccaaatttcttccctgtttatctctcacaggggatttatggcaaagacacatctgtcgtatctaggctgagagcctgcacatccagatgctcgaagtgtctcttggcttctccagaactatgcacacgggatgccttttggggactgagttgcatactgtgggctctacttcacaaaagtagatccaggttctaaccacatcacaccagcgttatcactcctgccctggtgcaagccaaggtcacctccctcctgcattttacaacagccgcctgctcatgctgcttctacctttgagcccagcaatttaccgttcatgcaacatccatatatgaattctgattatgccactctcctgctggaaacctccatgggtttcccatctcactctgggtaaaaacttaaacctgcacatcctgctcaagtccctataaggtctagtctttgcctatgtctttggtccacctcccctcatgccctgttgctcttctgcaccctcccactggctttcttgctttccttgaacacaccaagcacatgcctgccccaggacctttgcacttgcagtttcctctgtctttagtgctcctctcccacatatatgcaaatcttttagatctctgctcagatgttgcaacgtcagagagaacttcccctatcacttgatacaacatttcaccctgaccacaattctatatcatcaccttgctgtacccatctctagactcttatcactataattatgttgcatatggatgaatgaatggatggataggtggatggatggatggatggatggatggatggatgcttggatggatggatggatggatggatggatggatggatggatggttgcatggatggatggatgcttggatggatggatggatggatggttgcttggatggatggaaggatggatggatcaatggatggatgcttggatggatggatggatggatggatgcttggatggatggatggatggatggatggatgaatggatggatgggtggatggattttatttccatttactataatgtgagctccacgagagaagagtgggtttttgtttgtgttttgttcaatgctgcatctacaagtgccttaaatcatgtctgagacatagcagtcatttgccaaatacgggtgtataagtaagacaacttttcttcattggcatgggccataaaggaatgagagtggtctcagcattcccttatgtgactctgtagtgtgagacatctttggcgtgaaattcaagtaatatataccaagagtagacatttgcagtaaccatttctgggccacctccttttaattaatttaaaaaatactcaagtctcaattacccatagcccaggtaaaagaaatgtgtgttaattctatgtgggcaaattaaggaggatacatgttttctatggaaacttttctttttgtataataaacatataatgcatgaatcattagtgtgcagatggatgggtcagtgcaaggtgaacaatgttacagatcaacacacatacctcaagctgaactctgccagaaacccatggccccttgggtcaccttgcaggtagaacctacccccagggtaaacattaccctgacttctggcaacatagggtagtttcatctgtttaaaacttttatagaagtggaatcacatgatgtgtacacttttgtatttcgctcctttgtactcaacatgatgtctctgaggctcatccatctagattcccatcacttacacttcatctttgctgcatactgttctatgccacaagttacttattcattctactggtcatggactttacgttgtttccaggttttagctattacaaatagtgataccagggacattcttgcccatgtctttggtaaacaaacatacacatttatcttgggtatatatatagaagtaaaattgctgagtaattgagactgcctctgtttaaccttagtaattattaccaaacactttttcaatgtttaataccaatttaaactcctagaagcagtgtatgaaggttccagtaattccgcactctcaattaattggtaatatttgatataaaattgtttatttcccctcattgctttcttttccttcacctggttcaagcatttctcgttgatcctccttgtgtcaggagagcttgacacatgggcaaaaaataacccaaatacaattacaatttttcccttgctggtacttctttcttccagtttgggcttttgtggagattatacttgttgccactaaaagaaacatttagagaagcaagagtatcccccagaaattaaaaatacattccccagaactggggaagcagagagaagaccctgggtctccaagagcaaggccagagcgtggctgccaggaggtgctaagggaggtggtgaaaccccacgaagggatgcccatcagcaggaggggacacacggagatggagttccctagtcttggataacagctgctcatggcaggagtgcatctgagagttactgggcctgaagagaccatatgccaaaccaaactgacagtcagagtctggaagcagaaattaatttgagttgcagaaaacagagaaattgatatttctcgcactgttaaatttgtgacttgagattcagagcttgcaactaaggaagaagagaagtgtcactagggatactttcgcagggaaacaggctggaacgtcattcctcatattatttctaggattatgcaaacatgatcaacattctagatctcgtttataacagaggtgagcgacctgtaggaggaaaaatgttctacttaggttggaagaggaggtccagtgacagaagaagatggaagagacaaactccctcccttctgggatttctccccctaatgaatgagaatgtcaaatagaccaacctgctttaatagtgtacaagagataacatcaggtaacggatgagaacatgaaatttggagtcaggtagcttgagcacaaattgtgactgaatgaacatggccgaatgaatatggacgagttacttaaaatctcggtgccagtttcttcatttgtatttgagagtgccaatagtgataccctcctcatacgtttgctgtgactactacaagttgttctacataaaattcttaaaacacagcctgacaacagatggcatgctaagggggcgtgtctcagtactgacccaggccacctaacccagggctgcagaggaggctcccagaggaggtaagtcctgagacgaatccaggatttagccatgtaaaaaggagacgcagacatttttaaagttgtagttttttttttttaactgtcacataataattgcacatatttatggggtacaatatgctgtttggatacatgcatactttgcataacgatcaaatcagagtaattagcatatccatcacccatatccatcaccccaaacatttgtcatttctttggtgagaacattcaaaaccttctcttctagctattttgaaatatacactacactattgttaactatatcaccctacagtgctgcagcacaccagaacttattcccccatcttactgtaactttgtattcatggcccaatagctcaccatcccccagccccagtaccctccctagcctctggtaacctctactttactgtgtaattctatgagatcagcttatttagattccacacaggcgtgcgaatgtaccgtatttgtccttctgttcctggcttatttcactgactattgagtcaatgtctaggtttttccatgttgcaaaagataggattttattcttttttaatggtggactagcattccattgtgtataatatagaccaatgtgttaatccattgatctgttgatggacacttaggtggtttccatatcttggctattgtgaatactgctgcaataaaaactggagtgcagataatcctttcaacatcctgatttcatttcctttgcatatatacccagaagtggaatttctggatcttacgggcataccattttttaattttttaaggtgcctacatactaatgtccatagcggctatactaatttacagtcccaccaacagtgtatatgtgtcctcatttctccacatctgtgccagtatttgttattttttgtctttttgataataaccattctggggtgagacaatttctcatggtggttttgattggcattgccttgatgatcagccaggtaacctcagcattttctgcttgccacctccagcaaaggaatcctgcttctgcagtacgatgtttacctctgttccaggatgatgaatcccaagcctagtttttctcccctgaagattctccatgcttcttaaccttcattttatggttaagtcattcagtgctgatatttgttgcttgtacttaaaattctgaccaatgcactgcataaaaagggaatgtctatattatttggaatgaggacagtgcagagactacaatatgattatcaaatatcgtttcttcatgtattttctactaggagaattctgattttactctgatcagccaaaaactacattttccagcgtcccttgtagctaggaacaattgtgatatcattttggtcaataagatacaagtggggagaccacactggatggattttaggaacagctctttgaatatggatgactcaactgacatgtgtaatttactcttcagtcttcccctttcttcctgtctgaagtgcagctgtgagggtcggagccacggcagctatcttgagggcacgtggatgagaatctcagcctaaatctggcagaggaaaaagccactatcttctcagaatctggtatcctgatgatttaatgaagaccataaaacagtcctggaatcccttgaaagtttgtatccagactactttcctacgagagaatagtattccatcactccattttctaaaaaattgttatttgggttttctgatacatggtgtcaaaactaatcatagctaccgcatgcatcatcgaaaggtatgacattctcatatatatataattatattttattttatactcaggagtttttaaaacaggataatatggtcttatttgtatttcaaaagaccaagcgtagcagtggtgtgaggcagctgggtgaggatgagcactgatatgcaagacttttagttgcagcattatttgtgatagtgacgattcaacaacactgtaagtttccatcaagaggggacttctgagtggtatttaaacaatttatataatggaatactcttttgcagatgaagggaatgaattagatgcctttgtatccacatgaacagatctccaaaacatattaggagggatgaaagcaagttttaaaatattttaacacgtcacttatagaaaaccaagtgtgtgcgtttgtgatttttctataatggtacacatacatgtataccgacataaaaatgaacttgaagtatatacattcaacttatcatagttacctcctcagcttgggtcaggtgaggaaaaagcaagaatgagatttaaaaagtcttcatttttcctataatttgatacatttaaaaaatagtaaataatgtatttaccacatttatacacagaacaattactgaggataaatgtctatcatagagactgctccatcactaacccctttgtttctttttccttttcatcataaaacctcttggatttaagttggggacatgtcttctagccagagtccacatttcccagacttctttgcagccaggtgtggctgttgagagttagggtcaatggaatgtgagaatttgaatcatttcatggatgataaggtcctttgcccaggaagttgaggagggagatgccctctttctgccagttgggaacggagcaactataatgactttgaagccacaggttaggaataacagagcctccccaccatcctggagccctgaatactcccagggagcagagcccttgcaccttcccccaaacagctccatgacagagaaatacactttgtctgcttagagccactgtatttttaagtatttggggtataacagcctatttaagcacaatgcctaaatgttaatagaggttaagtatgaatgaacgggcatggccagtggttaattctactttgcacgttttcatacttctcaaattttagacataaattttggaaaataccttctgacatgatgaaatgttggtaaggatgtgaagtgatgagaattctcttacactgctggtaggaatgtgaactggcataaccactttggaaaagtgtttggcagtactaaagctaaacatccctataccataggatacagacattccattcctaagtacacaccttcaggagctgaatgctcatttcttttttttttttctttttttaaattataccttaagttctgggatacatgtgcagaacgtgcaggtttgttacataggtatacttgtgccatggtggtttgctgcacccatcaacccgtcatctacattaggtatttctcctaatgctatccctcccccagcccccctccccccgacaggccccagtatgtgatgttcccctccatgtgtccatgtgttctcactgtccaactcccacttacgagcaagaatatgcagtgtttggttttctgtttctatgttaatttgctgagaatgatggtttccccttcatccatgttcctgctaaggacatgaacttatccttttttatggctgcatagtattccatggtgaatatgtaccacattctttttaaaatccagtctatcactgatgggcatttgggttggttccaagtctttgctattgtgaatagtgctgcaataaacatacgtgtgcatgtgcctttagagtaaaatgatttatcatcctttgggtatatacccagtaatgggattgttgggtgaaatggtatttctggttctagatcctgaagacacatgtgcagaaaggtgcagagacaagttatgcataacagtcccacactggaagcaactcaaatatccacccatagaatagacaaataatgtgttgtatattcatataatggatactatgcagcaacaacaacaaaatgaaaatactcatttataaaaaacatagatacatctccctgatgctattttgatgaaaagaaaccaggcacaaaatagtatgtactatatgacttcatttgtatgaagtccaaaaacagagacacaagtccctggatttagaggtcgggatacttcttttcctggggtgggtgtaggtactggcttggaggggacatgagggcatctgttgggaagaaggagatgttctgtcctcggatctgacacctgtataagcgactgcatcatatgttccatttcattgcactgcatattacggcttttgtgcttgtgttgtacatgggatagctcagtgatgagtaattttaaaaaatatccctacatcaccattcaattaagtgtcgaaaagaaataaaactgcaaacaaaacatgaaaaggatcactgagacgtaatttcacagagcaataaatctattcatcagttccatgtacaataggacacatggaatctgctttgaaggtttcttattgcaattctctgcaggatcactttggccatctctgctgtccgtgatcttctcattctaagcctccaggttttatgcccagcataggattaaaaatagtccagtagctacaagatgtacactttccttgcaagactttcctcgacagtcaatgttgctgggagccaggtagaaaagagagtgaaggagcatttgggacattgggaattactgaataaatgagagtagtcagagagtttctgtctaaactaaatgctcatatctggtaacagacaaatcccagtaagaatagctcagccgaaatatctgatggtcaatattctgtttgtattttattatgagtcattatttttaaacatttagtttttccctcctctttttctctttaccccctttctctcctccattcaagcatcaactattctattctgttctcaatgtccagcataaaggtgaatggacataaactgttctccaagcactggagttgttttttgttttttatttttgagacggagacggaatctcactctattgcccaggttggagtgcagtggcatgatctcagcttgctacaacctccccctcctgggttcaagtgattctcctgcctcagccttctaagtagctgagaacaggtgcccgccatcacaactggctaatttttgtattttttagtagagacagggtttcaccatgttgaccaggctggtctggaactgctgacctcaagtgatccacctgcctcggcctcccaaagtgctgggattactacaggcgtgagccactgtgactggcctggagttttttttaagtgttgtaaattttactaaattttattttccaaatatgtgctgacctttctttggtaggattatcctttcctgccttgtggaaatcaggcttggatgtgtgctttgctttaatccatgacaggtgagcgaaagtgacgtatggcatctggggcagatgcttgaaggattatgtcatggttccaagatctctgttttccgtgttccccaagacaaacatgtccccaatgggaggagctattttgctctcatcccagaatgaaaaagaggtgttatttggcgaagcctgaccaagtacgggtgtgcaatgagaggacaacgccaacctctgttgtcatgagcctccgtgattccagcacacttcttacctaaactcacttttaccaaagctagtccaacaggaaacaaaatgctcctgagcacaaaagaagtaaaagattttggagtatccatgataacatgaaagtgggactttctgttctcaggatgaaaaaacacttcctcaaaaggggcaaggtgggtatttgagaggaaaacaagggggtaatggagatggtgagtgtctgaaccaaaaggccagttctgtttctctgtgttccagagactggatgctacaaactctgaagagatctggagagtgaaaagacggccattctgtgactcactttttacttagaagtcagaactcagacaggaaatgatcatgtggcgcgtggaggcaaataagatcttaaacaacagtgtggggtttctctaggctcggtgacctaagagcagaatacacttctcatatatcccataatagcatgggcatatctaagaggttattgggtttggaggtgacttgtggatgggaaatatccatagtgtagataaatctgtaccaacccatagctgaagcccaggcagacacaagatgcctgctgatgtctgctggctacatgacggatgcagatacccttttacttccctctcgaacgctgacaatggcaagctacgcaggatgtatagagagttctacacacaggcttgaagcctgggttggcagggggagtgcgtggaagaacctgagagaatggagactaatgtgcatctgggcaacagagtggatgtttgcaacagaaattaaaaataaccatggaaacatcatgtgaagtcttgctcatgtgggtttttagatcggatttgcatccattattatggcatttaccaattatcgttgaggtcttcacttgtccagctttgatgagtgctttgatgcattgggtgacatataagtcagggtctagtcgagctaccatctagagttcaatagagggaatttaatccagggcactggtttagaagatgctggatgttcactaagatttgcaagattgcatgcacatacctgtatatatgcagcatttctgtaaaaacttccaaacaacctctcacctgaggtttcagcatcaggaaagggtagagtctcgtgactcttaagtgcaggatcatttctccattaacacatatgcaaggagccttctcccaagagcgagtgcactagttacctgggtagatgtagacccaggtgttgcccgcacggtatgagaagaactagaaaccataagaggaactgttaaggccacttgtgaatggcgcatctctagtgatgaaggcaacaggcaggaggtgatcccaaaccagaaactagagacgcctgcgaggagctgaaatcaaaccagagactgtttgcgggagctggaggtacagaggagatacagccactgtgtgagacactgtccaaaacacagagaaggagaaatagcctgacttctgctttctccttgccctttaaactcccactctttgatccagcaatcccactactgggtgtatactcaaaggaaaataagttgttctaccaaaaagagccctgtgcccatatgctcactgcagtactattcataatagcagctacggaaccgacccaggtacccagcaacagtggagtaaataaagaaaatgtcacacatatacactgtggaatcttacacagtgataaaaaaataatgaaatcatcgcctttgcagcaacatggatgcagtgggaggctgttaccttaagcaaagtggcgcagaaacagaaaactcaataatgcatgttctcgcttatgagagcggtgcactgggtactcatggacataaagatggcaacagtcggcctggaggctactagaagcaagagataaggagagaggcaaggcttgaaaaactacccattgggttctatgctcacttcctgggtgacagattcaattgcaccccaacccccagtgttacccaatattcccatgtaacaaacctacacatgtacccccggaatctaaaacaaaagttgcaaaagaaaaacaaaagcctgcaacgcttgtctttcattggccaaatctttccagcagccagtgggcaatggagcctgagaatcagagtttgcattgacacattctgttagattcagagcagagaagggaaggtgtggagaagggatatgtgagcaccgtgcgggcaacacctggtcctacatctacccaggtaattagtgcacttgctcttgggagaaggctccatgcgtatgtgttaatggagaaacgatcctggacttaagagtcccaagactctaccctttccagatgctgaaacctcaggtaagtcactcaagagtcccgacctcctgagagatgaaatatgcaaattaaagggggaagctaggactccaaaagtggttagtgagtggtagagtcttctgaatatctactgcatatgcatcccattctccttccgtcttgtcacagagtatcttgagtggtatgaccagcatggtcatctagtgggatgtgctagaagcggttatagtctcaaagctcagcaaaatctagaaaggcatttatctgatgaataatactggaatccatgcccagcctcatgtaagtcatacttgggtaagattggatatagcctaaaactggaccagaaaggagtcaaatacatctcatggatgacccagagtccttcaaacgccttatgtgtattcatcttggtgtctgcaagaggtactgttttggacgccatggtgtgctgccgaggtcactcctgtaggagggaggtgacggtggctgacaacctctgaaatttcccccagctgaagacagcatacctcgcccaagatcatgctccctcccaggtgaacacatcctccagtgactcctcagggtggggtggagaggccaggcacccttgcttcagggtggggcatctttgaagggccagcccactccagagctccccttggggtcggctgaggctgttgttgaaactgcctcagagttcagctcctgcctctttccaatccggcttcctcctctcctctacaagttgcttccaagggtaaaacccccaaagcaccctgcacacaaatctccatctcagagcctgcttcctgcgcaactcctctgaagacaagtgtgtctttcagcaatgagattctgaaggtgagccgcctccccgaccgtatcccacacctcaaggtctatgtcaatctctgggcatcgcaagtctctagtatttgaactgttaagtcccattctgatatcatcaaaaactgctttatacacactctgatctgatgataaatatgagaagataaaagctgagtttggtgagcgatggcccacagccgaggaaccgtgacgcaaggctgtccttggataccctctccatctccctccctcccactcctggacttgttgtccctggctccagttctggctctcccccttctcccttcctctttctctattctttccatctccatttcctttcacccctcactcatctctctcccaaagttaatatatttcttaatttcctaaacaacattgttctccctttccctgctttcagctcccccttctctggagtgccatctctccctgcttctgtgcacgtagttcagaggatgtgtgtccttctcagatctgaatatgagtgtgcaagccaggcctgatcaatacacgtttcacattctttgtcgataatgattgttttttggtatggccacgtggcccaaatgactgcggtcatcaaaactgcaaattttagttttctgaattgacaaggaaaagatttgctttcttaagaataaaggtacaataaggtcacacacctacaactatctgatcttcaagaaaattgacaagcaatggggaaaggactcccctttccccaataaatgatgctgggataactggctagccatatgcagaaaattgaaactggaccctttccttccactgcagagaaaaattcactcaagatggatgaaagacttaaatgtaaaacccacaactataaaaacccaggaagaaaacctaggcagtaccattcaggacataggcacagcaaagatttcatgatgaagacatcaaaagcaattgtgacaaaagcaaaaattgacaaatgggatctattaaactaatagatcttctgcacaacaaaagaaactaccagcagagtaaacagacaacttacggaatgggggaaaatttttgtaacaatacattcgacaaaggcctaatatccagtattcataaggaaataaacaaatttagaagaaaaacaacaagcaaccccattaaaaaagtgggcaaaggacatgaacagagattattttattttatttaagttctgggatacatgtgcaggtttgttacgtaggtaaatgtgtgccatggtggtttgctgcacctgtcagcccattgcctagatattaagctggacatgcattagctatttttcctgatgctctccccctccccaccctcctctgacaggccccagttgtgttgttcccctctctttgtccgtgtattctcatgaacagacacttttccaaagaagacatacatgcagccaacatgcatatgaaaaaggcccaacatcactgatcattagagaaatgcaaatcaaaaccacaatgagaggccatctcataccagtcagaatggctactatcaaaaagtcaaaaattaacagatgctggagaggttgtggagaaataggaatgcttacacactgttggtggaaatgtaaactagttcaaccattgtggaaaacagtgtgatgattcctcaaagaactacaaacaaaactactatttgacccagaaatcccattactaggtatatacacagataaatgtaaattgttctattataatgactcatgcacatgaatgttcattgcagcactattcacaaaagcaaagacatggaatcaacctaaatatccatcaatgaaagactggataaagaaaatgtggtatataaacaccatgaaagaacaatatcatgtcctttgcagcaacatggatagagctggaggccattatccttagcaaactaatgcagaaacagaaaaccaaataccacatattctcacttataagtgggagctaaatgatgagaacacatggacacaaagaggggaacaacacgctggggcctatgggagggtggagtgtgggaggaaggagagaatcaagaaaaataactaatgggtactaggcttaatacccgagtgactgaataatctccacaacaaacccccaagatacaagtttacctatcctgcacatgtacccctgaactcaaaatcaaattaagttaaattttataaaaaggtactagactgtaagcctctagattctggggactgtcttttcactgccttgtctgtttgtctgagactgaagctaacctaaaggaaagggagatgaaggagagaggtgaaattataatctcatcccatgaacccctggatccagctgtgcctgaagcccctccctctgaattttccaggtcatgggttcattaagccagcatgggttggacttctgtcacttccatcttaaagctctggagttcacccaaataaaccacccatagtcacagttcacagtatcacctccattggcaatttgtattcttacttgttgcaggtcaggttcccaagtagcagacgctgagatgcatttatgtgcaggaagttattgggataaacctctgcaggggaatgaaggaagcagaacaaggtagagggaaaaatcagactgtgatgccggtgcagcaaagtcctcagcgtatccccggggaggtgtagacctgaggtgtccctgcagggttactccaaattggtaccaggggctgggactttatacagctctaccagtcgctggctcagaaaagggagagaagcttgagcaaggtggctccctgctgttgagggcaagtgcaaaagacgggctcaggtgataggtgttggttctcaatgcttctagcagctggtggatgtagggggatttgagaaccagaatactgagctggtggaactgggtggtcacaaagccactcacccatggtatgctgagtccttgagggcacacagaagggggcactgttagagaggatgtggtgtgacttggttagcccttccatccctaattcctaggaatatcaggtatccctgcagaatattgatgtcaggctttttgcaacaggtgttgtgcactgtaccctccggagctgtgctaattcctaagcagaaacactctggcgtattcattcaaagatatttatggagaatacgatgtctcaggaattgggtcatagcaggaatgagagagacaagatctctgtccttatggggaataaaggcattaaatccttacacacataacccatgtttattaattgatatttaatgtccattttgtcccgttaacacttctcaaatctctgctcttgaagatctcagtcctccctacctcctgagcagagatgaatgataaaaatattcacagcattactgcttcccatgccatggtgaggacaggtgctgtgtaaaactgattaaaagagggaaattaagagctgctgtcaaaaatatattccaggctttgatttttcacaatttccccctctcttacttaaaggaggaaaaaatgctgtggtggtgatttctttattagaaacagcgattgtgcctgccaagttttaatcaactcgcctggccgtgagacccggctggcattaactgtctttaggaaataaatgcttcggatatggagcatagtattagcaagcacacagcaaagtccccaagcggaccacacagagcattatctaaccatcaattcaaatctaaaacaagctaatctgcagtgtagagaatcctgctactcacaccagagtccccagagcagaacctgcccttcaccagcccaaaccaaccatctctctgtctctctcctctcatcttccctgacactgggaaagtgacttggtggagtagaaacaattgcagccacactctcaatttgcttttccaaccaccgtccaaaacccagcactttatccaattttttttactgaagaggcatttctatctcaggaaattgtctaggtcagtcttctcacttcagtcattgtaactgacactattatgcaaacgtaaccctttcattcaattcacttgctttctttactaatacattcattttgaaaggaagcattattacactactgttaagtgaaaactggtatcgtttgcaataaatagaagggagccctaaacacaaccaataagaaaataaagtgatgttattaatcctaactacatactgcctgccgagggctccgcatctggactcgtactctcccatgaagaataacgtaagcaaacatgaggatttaaagacatcttgtatggaacaaagcctttctccttgaggtaaccagaatgatgggaaaaaaagctgaaaagaggttaactttcttgccaaaaggttcattgctatctaaatgatgtctgtgcactgtacaaattagctcactctcttttgaagaacactggggtagtagtgaagttttctacatatgcaataaaataaatgcacggtccttccgcaaaccagagtgtgtggtgatgtggaaacagcatcaggttcaggagactttggttccttgtcaactccaccactaaggagctgagtgatgccggcttaatcacttggcccatctgggtactatttatctgatttgttataatctgcaaggtgtctttcagcctccagcaaacagtgagtgcttgacaacaagaattatgtcttatttatctatatcttcaggataagcatgaaatgagatcgtctgtggcgttttcagcgtagtgcttggcttcgtagatgctcaggaagtttctgcagaatgaatgcatgagggaatatggcccacggactgtagtctatgtcagacacttcagcaagcacctcactcattaatctttttattctttacaatcatacagtgtggtgcccattatgtttgacggatgcagaaactgaggcttagactggctaaatgattttttcttctcttttctaagttatggggtatatgtgcaggttcgttacacaggtaaactcatgtcacggggagttgttgtgcagattatttcatcatccaggtactaagcctagtacccactagttatttttcctgatcctctccctcctcccaccctccaccctccagtaggccccagtgggtgctgttcccctcagtgtgtccatgtgttctcatcatttaggtcccacttataagtgagaacattcagacaacttgattttctgttcctgcattaatttgctaagaataatggagtccagctccatccatgttgctgcaaaggacttgattctcgttctttttcaaagctgcatggtattttatcgcatatacatgccacattttctttatccagtcggtcattggtgagcatttacgttgattccaatttttttcaaagtatataataaatagtgaagtacattttaaaaacattcttattttaaaaaactttaatcatacaggaaaaataaaggggctgatacaatgaacacttgccctgcgtgttaacagccatgagttctaccatgtctgctcatctgatgctccaagcctaaagtattttgaagtaatttacatgaagcatattagtaatttctacactatatttactagttgtcccaatgccagtaacgtatcataaatcaaatatttttaaatgctcaaaagtagtgagacatagtaggtgtcctggatctctgaaagaaagataatgcctcctggaattccacccaggcatcagtagtgaataagataacggtgaagactttgcagctctgccttacctgcaggccaccttcttgtttgtttttcttttatcttccggataaagtgagatttcatggttcacaatgggaatggagtattgttaagagggaagaccctatgcattggctttaggagctccagagttcaaatgtgagagcagtcaccgcatcagtgtttgacctggggaaaactgtgtaagcacttggacccttacctactcgatgatataaatgaaaataaatcaacttcttaggaatgctttgagaataagttaggtgatgtttagagccatgcttagtcctgcctggtgttaaggaatgaataattaaggaatgagtaaccaaccagctcagcttctaatcaccgtgcagagttaggtaaggctgtagtctaagtttccactaaacccgccagactttctgagcctgcagagcaggagttctaggtactgtggtgcaacacatattgacagcttcagatttttgtagttctctccttggtcaggctagacagcaatatgggtacacggagtctctgcacatgagtgtttacttgtccaaattcaacttcagatggtatcgaccaccaaatcatacaacaccaggagtgacaggaggtggaattcatgtcccattttccagcgtctcattgtgtgaaaaatctcagcacaccaagtgtgaatccagtattttaaaatttgtaagtttgatatcgtgtggtcctcagggaaagccaactacttcctcaggtacacacacaaaacacagcaaccccgactccccagacagaagcaatggtctgtttggtgctggatgacatatggatatgttggatcagtttgaagtgagtccgtgggtcttgtgatcaaaagattttcaaaaacaattttgactctaaaagagtttcattgtggttttgatctgcatttctctaatgatcagtgatgagcttttttccatatgattgttggccacatatatgtcttcttttgaaaagtgtcttttcatgtcctttgcccacttctgcacgggtttttttctcgtaaatttaagttccttatagatgctggatattagacctttgtcagatgcacagtttgtaaacattttctcccattctgtaggttgtctgtttactctgttgagagtttcttttggctgtgcagaagctctttaattagatcccatttgtcaattgttgcttttgctgcaattgcttttggcatctttgtcatgaaatctttgctgtgcctgtgtcctgaatggtattgcctaggttttcttccagagtttttatagttttgggttttacatttaagtcttgaatccatcttgagtgaatttttgtacagtctgtataacaaacccccatgtcgtaagtttatctatgtaacaaacctgtacttgcacccctgaacttaaaagttttagaaaagagtttcaatgatgcttggatttcatagtctaatcccatgtaagtgaagaggctacatgaaatttcaagtaagagtaaaatgcactctagtttcaaaagaaaaaaacaagcagtactatgcttcaaaaaatattgacatttatgtgctattggcagcatcagctgtgaaaccaggatttgcaagttcgttggcatccctgcaacagggtccccatgagagcccattcaggcaatcactgagcacccagaaggtcatttcagcaaccaaaagtttccatcgcttcttttttttttttttttttttttttgaaacagagtctcactctgtcgcccaggctggagtgcagtgctgcaatctcagctcactgcaacttctgcctctcgggttcaagcaattctctgcctcagcctcccgagtagctgggattacaggtgcctgccaccacaccaccacacctggctaatttttgtaattttagtaaagacagggtttcaccatcttggccaggcttgtctagaactcctgacctcgtgatccaccctcctcagcctcccaaagtgctgggattacaggcgtgagccaccgcgcccggccaattttcatcacttcttatgaggcctccttgggctctggaagtgtgacgtctcttccttcctgatgcactgaaatccaaatgacggtgctgccctctcagaaatgctcaattcatgggcttcctacaatgtgaagcttggctaaggtaaataaaatgcacagatgctagaaaagagtttttaaaaaatatacaacagaaacaaatctgccagaatttacccagctggcaagttagaactctgataagcaggcattaatcatggtagatgagtcgctaaagcctagatctgtgcaactgcatagctgcacccctgcacgtgtcttgctttctcatgtgaacattttgctgtatatctggttcctgcagaatgagcattagttacagtgactagatgctttatagagaagtttgggtagcaatcacagggaaataaatcatgtaaattaatgaaatgttgaaaaatagaactagtatgtggatactaagcaaaaaatctcatgataaaatatgtgaagccaaagactaaatttgaataataaagcagaggtaaagtggatttattaaagatgtcaagaactaaaaacctgaccacagaggcatgcccaaattgacgttattctcatgtgacaagaaatccagagaaaagacagccaggactgatatggcagcttcatgatatcaacagaaacccaggcaggaggaaagggcaaaggcagaaagagtatgccactgaaaactatccctctagaagcctcacctagaaaattccacctgcacttgattggcaagaactgggtcacacggctatactagctgcaaaggaacctggaagttgttttacctgggagcattgctacctcttacagtgagtaaggatgaagggcagaaaagatggtgagtaggcaagtagcaatctgccatagagacataaagcccaggatacacaggacatcttgaatctgggttcctggaggtcagtttaaagagacgaaatgctatttctaagccttggtgaatttttcctggctcctcatgtcctctgagacaccatgcaggaatcatgatagatgatacctttacaccgttccatctggcccactttacagaacagtgaagagaatgattggattttgcctgagaaaagggcagtgcgtaatagcgcctgtcttggaaaaaatgaataacatgccgaacaccggaagaaaggcatttctctgttaattgtgaggaccactatgaacgtacttgggtttggcaaacatttcaaacttactttctagttggtcagtaaaacctggaagccatctctgaaaaagtagctgctgtttcatcttccgtgcttacaaagtgatttggctcacattccttcctcttagttttagtgaatgttaacttaattcttgcaaggggcttcatccttgtcacacctcatcagtgatactctgggagccaagtctacaactgagggtccctgtcaatgtacaggtaaattaagggggttatcaggtcagcactaacattatcctaatgtaaacatcctgggaattcataatttgataattgttctttttctaaaacctttgttgatccatggcttctggtgagagtatttttaaaagaaaggaagaaaaaaagaagaaaagaaagaagaaaggaggggagagagagagacagagaaaagggtaggcagaaatttgcagatttttctgccaatttcgtctgatttacccttctccctgcacttccttcttgtgcaatagttaaatcaggtataacatatagtttctttcgtaacatttaaaaattatctttgtatccccaatcttagtataaatccagacaggttgtagatcaggggtccccaacccccggggccatggacccatactggttggtggcctgttaggtactggaccccacagcaggaggtgagtggcaggcgagcgagccttactgcctgagctctgcctcctgtcagatcaggggcagcattagattctcataggagcacaaaccctattgtgaactgcgtatgcaagggatctaggttgtgcattccttatcataatctaatgataaatgtagtgtgcttgaaacagtctgaaaccatcacccacctctctgcagtccacggaaaaattgtcttccaggaaaccagtccctggtgccaaaaagattggggaccgctgttttagatgatctaagaaggcgtgcctactaaacgaagcccatatctgctggcttttgcagcatgggctactggcttttgcgcaaggtgtctctttgcctggaattccctcccgcagggtcccatcctttctaaatccaaactgcattcaaagaaagggctaagtctgctcctttcaactggagagttccttttctactaacagcacaatttttatattatttggctacaaatgatggaaacctcacactctctgaagtcaaaaaagtaatttatacagggatttattgacatgtgatgaaaaactctagcagtggctggacccaaaggttctggttgtattgaggatgtgctgtcttctctccaacttcacctgtgcacgaacgctgactgctgtgggcaggccccagcagctccaggctccaccttcagtgaacttggatccagggactgaagatgtctcttctttgtttgctccctaacagttttagagttgattctcattgtctctccttgacttggcttgcgtcctacgttgactctttgcctcttgaactaatcactgctactactgtgtgtgcatctgcgtgttcctgtgtctgtgtatgagtctgtgtgtgatgttctgtttggtgtcaccttgctctcacatctgccctaaaacttgtttagtggcagttatcccttaaccagatgaactgagagtaagagaaggatggttttccaaagaccagttggagttatcttctaaaatgggtaccaggcagcaactacagcaatgttcatgttatggcaccacttggcttacaccatgtattataaatctctgtctagtttgattatccttctgcccagaatttaattctttgaggttagcttttgtgtcccattgaactttgtttcctaccgagtgctaagcagagtgcactgaatactatgcacttaactgaatgacaggtccaagcattgctattgagactacactatggaattatggaaaagattagacttcagatttagaggtcttggtgtaaggcactcctctcagtatcaaagttccatttccatgttaatggtgtagagggtgtggctcaggtgacagatgtgggaaccaaagccaacaggatcaataatgtcagagaggaagtcaaggcaggggtttcttattcagatttttccttgtgagaacatcccataaggggctgtaactggctttaagaagtctcctatttttcttccagttgggggataaaggagctgtcagatggttaagctaaggcatccaagacacaatgatactttacaggcaagtggacaatatttttaacaacatgcaaaaccaaatggcccttgagttcatgtgtaagtcaagcttaagaagccttgcatttgcatttcaaaacagtaagaggtttctcttcagaaatcacctttttagctgttgcaggaaccaaggacagcggggtctacaaaagaactgattccaccataagaggattgactttctgtccgtgtctctgcctctcatctccagtttgtcatcacttagctctgagccatccacaagtgccattacaatccaagatggcaggcagtcagtctgttttccttgatgaactccatggctgtatatcctggtagtgacctcccttctctagttaaggacaaccaaatgtaagtggaagaaacccaactaattaacagtcaacccgaagaaagcttaaaaagggtccaaatcaacactcatggttcagccccgtctctcaggaccacatgtggtacttctgcagcagacagatgcatgtgaccaaaagctcagagtgttcaccaatgaataattctgctgctgattctggaagggaaactgcgtctatccaataagcatgctattaggttccagcattatgaaagtgtattcaaagacaggctataaagccatgggaataagacactcagagcattgagacaagaacaatgccttaaagtagtaggaatgagcagagctctggaggtagacatcctggatccagaccccaggtccatcatgtacaggctttgcatccttggacaaggtacttaacctttctgagtctctatttcatcaactttaattaaggataatcatagcatttatcttatatcgtggttttgaaccaaatgagatgatgtatgtaggatgatagagttactcttttaaaaaacacagatttgagggggaagcacacgtatataacgtgattataatgcaatttgatgacaaaacataaatagtagtaaaaacatgaaagagaatgaaaatagctttgggagaaggagctggggaaggcttctaaggagggcaccatttcactgggtattgtattattaccaggaattctccaaggacagaaagggaaggaggggactgtagacaggatttacagtgtgtgcaaaggcacggtggctcaggagcacattatgtgtcttggaagaaggtcaatgtacagctggagcttagaaagcataaaagagcatgtctggagatgctgcttgtaaaatgggtttagaccatattagaagagaccatgtctaataaaaaggaggttaaactgtgtcctctggggagccagagagttttaatacagggttatacactgactccattttttaattaaaggacaaccctactctctatgtgaagaatagactcaagaggagagacagtggaggcagggggatgatttaagtggctattgcaataatccaggcaagatacaatggcaggaggtgaatagtttcaggagatgttagcagacagaaccatgtgaccgggtggatgggcaggtaggatattggagaagttaaaacaaaacctttgaagtaaaataaaaaattctgttttagactttggttttgccagttgttaatcatgtgtgtatatattactctccccactaatgccatttctgaatgtctaaactagagataactttagtggtcctttctcaagatcaccaataagagagtatatgagcacagtgccaggtacagggacatcactcagcaaacgttacctgctgttaccaccaattttatcactgttgtcattattattataatccagtgaccatggctgaggagagagaacagatggaagttgagtctctagttctcccactactggtgaagctgtctcccaggatgctatggcttgacattgaccaacccaaatatcttcacttctttcttaccgctgacttcccagtgtctgccagattcttccaggggcaaatggagctgtccctccatgtggctctcatgatgcaggtagaataaaaactgttctttgttcacaaaattgacaatctgagtttgtcccagaaaagggaagtggccaaatcaccaagccataggtaaccatgtcttcttcatctgctctcttttacccataaacggcagatggaactgtttgtttctctattgattcctcatccacccaatggtcatcccagtccactcttgttttctctcctctacgagctgcatctctcgggttcctggttttgtgtttctggttggtttcagccagaggaaaatactagcaggatattaacaggtaaaagaaaagagagtagggagcatcgtattagacttttctctactgctataaagaactacctgagactgggcagtttataagtcaggaaacaacaggtgctggagaggatgtggagaaataggaacacttttacactgttggtgggactgtaaactagttcgaccattgtggaagtcagtgtggcgattcctcagggatctagaactagaaataccgtttgacccagccatcccattactgggtatatacccaaaggattataaatcatgctgctataaagacacatgcacacgtatgtttattgcggcactattcacaatagcaaagacttggaaccaacccaaatgtccaacaatgacagactagattaagaaaatgtggcacatatacaccatggaatactatgcagacataaaaaatgatgagtttatgtcctttgtagggacatggatgaagctggaaaccatcattctcagcaaactattgcaaggacaaaaaaccaaacaccgcatgttctcactcataggtgggaattgaacaatgagaacacatggacacaggaaggggaacatcacacaccggggcctgttgtggggtaggggggaggggagagggatggcattaggagatatacctaatgctaaatgacgagttaatgggtgcagcacaccaacatggcacatgtatacatatgtaacaaacctgcatgttgtgcacatgtaccctaaaacttaaagtataataataataataaagaaaaaaggtttaattgactcacagttccacaggccatatgtgaagcatggctgggaggccccaggaaacttacaatcatgtcggaagggcaaagaaaaaggaagcatgtcttaccatggcagaggaggagagagaaagagagtgaagagggaggtgccacacacttgcaaacaaccagatctcatgagaactcactcactatcatgagaacagcaaggcggatgtctgatcccatgattcaatcacccctcagcaggtctcccctccaacactggggattacaatttgacatgagattggggtggggacacggatccaaaccatatcaggcatggattccccacttcctccctggtgcattgcctgatcttggacagaagctgtgcttctccatggttagagaaacacctacccacgggcacttcctccaggcctccagctctgatgagcctctgataatatcgtactctcccctgtcctttcagacacaaaggagacagctcctctagtctctggtgcctcaacgtcccctcttgggtcttacatggtgcccacatctctgtaaatagtccctccactaaattttcctctattccctagctgagtgtctcttctcttctctgctgagttcttgactgcaacaacaataaaaggagcaaaagtctcagctgggctactaatctttgggtgtaagtcctccctctccactgcaaaggatataaaaaatttaaacaataaaaaatggtgttggcctttcacaagctagcatttgcctatatcagagtgggcagaggtttttttttttttgtcttttagatagagtttaagttcactgataatgataccataagacacaagctaaatttgttaagatttgctgctttttctaagaaaagaccgtctcaaatggtttaatcagatgtgtctggtctgataaggataattacacagtgagactgtgggcatcacacagagagagaaatagatctgtaaaaaccgctaatgaaacttggacctaaggggatttgaactcacaacctgacagctaggaattaaatagtccaggaaattggcagtgggctaaacaatggaattcagacggggcccctagcaggtgctaaattatttccctgagcaggctcatattcggccgatgcgccgaagacagggaaggaacacacacgtaaatcagctcttgatttctgacacggtttcacccagttgaagtggagagagatgacactcagctcacggggtggtatccaagacccattgaaccttggatgtcagagctggaaggcatctcagaaacctcagtctccactctctccattatacagaaaaagaaaaggcatttttctcaattaccaagaaaaatcctaaggctagcttttgctgaactagatttggaacatcacatgcttccagaataagcacatcagggctctgtgctcagcgggttgtaatggcaccaggaacacttcttccctcctccctgaaggtctctgtgactttcccttcaccttggctcatggtgagaccctgcttgactaatgttccaggatggctcagcactgcacctggaaatgagggcagagtgaggcctggtaatcgctggactttcatgagaggagcctgtctgcagtgaaaatatcaagaaagcatttgttttgtgcagtcttcaggtttagaaaatctttcctcttctgcgatgatttctttggacacacttaacaatgagtcatgcaaattcagtcactgatctctccaacgtttatggagctcagagaacttcccaggagttgttctaggtactgatgctatgcaggtaatgagacagacagagcctttctctcctgaagcttccattccagtgagcaagacagaccataataagatgcgttccatttcagatgggaatacttattttgaacaatgacaaaagtgtgccaagaggaattctagagaagtggccaggagcaaggctctgtgttcaagttagtgtttctgaattttaagggatgtaaatatttggaattcagagaagaaaaggaaattcccgggaattctcaaggattcatgaaatcatgggttattcgtaaaacatttttaatgtttttcatattttttactcacttttatccatgtataacagatcagaaatattcagttaagttgcatttacaaatatctgtagcctatagtgaacaggcaaacactgtaaaacaccagcacgcattcaaacacagtaaaacatcagtttctagaaaacatccgattaggatttcatattaagattagcagtgatgcatagaagcatagaactgggtgtcaaaattgccaatttagggacttacttgcttccaaggtgtgttatttttgatacatccttcctggagtgtgtataaagtatactatgactgcaagtgtattagcttttcttttatcagcaacaatgactcacttttggcagcagacagagccaccagcagacatcatagtacggccacaactacaatcaagactgacccatgaaatcatacgggttctacttctacgtgctcctgtcccagtgaccccaaatgttaactttgatgctggatgcccttctctgtgttccctgtgcttgtgtattcccgtgatgtccgtggattcttctgatctagacacatctctgtggatagttaaggtttcattcacacttgagaactgccacacatctcctcaatttctccactgattatttccaggattggagatttgaaaaagcggataaggtccttgagaaatgtcaggaagggattcctgcataggaacatgaactcaggctgccgggatctgagtagcagctgtgacatctattagaacacacccgctttgtgatgatgggcttgttacctacctctgtgtgactgttctctcatccatgagatggcatcataattagcacatgtggcatgagactgcagtagattaaattctctaatgtatataaatgagttctaactgcattgggcatccagttagcgctcaaaaaaatgttagctcctattaaaaagtttgcattcgggagagccaaataccacatgacgatgaccagggatggatctctgaagacagagtgctatatatgacatgtttcttatgtgtttctatgtgtgtgtgtgattagtccttatgcaattcagttagttaatggcttaaggggatcatcaagaactttttttttcccactggggcactgatgggcaccttcatttacagatgactgtggatttaaaggcaatccagactgccagagacagagaagccaaagtgcatctgggaagcaaatgtgtgactgcacatcactggacatcaagtgtggattatgtgggttatgctgatactggcagccagaggtggactttagtgacccttgacatgggtataggttcccagtatgggttagaataatggcggagctggaagttttaatgctactctgctgataagggttgagggtggtggggaccacagtcaacatgaactagaaagagtagaggtgcagaaggaatgagctgggtggaggaggggaagaatagaaaaatccaccacagaggcttgcagctcaagagatcttacccagggtgaaagtcttagtccagaaagatgacaagagccaggagaaggacccagaaaggggactctgggaaccaagcccaggtatacaattgtacctgagaatctcaggggatgcagatggcaaagaacaggagtagaaatgtggactgagaaaccagacggaaaggctctgctagcccagccacctaagaggggagaggaagggtttagtttgtagaaagatgaagatggactggtatgaaaaactaaagaagacaaagagagcccaggaaaacaagacagattatttttccttgtatcacatgaatagactgatctaggatctcatcattgttttgacttattcatcttcttacaggtcttcacatcaaactggaagactagagaagctgaacatatgagtgagctcagctaagagaccaaggaaagaggagaaaagaggaaccaagtgataggtgattgaaagatatgactaggcgggaaggtaggtagagaggtgggtgggtgggtgggtggatagatggatggatggacgggcggactgatggatggatgggatagctaattagtagatagataatcagcaggtacatagatagagaaatagccatatgggtacacacatgcatgaacactgttaccaaatacggataagttcaggaagactaagaaagaacaaggagacattctaggaattccacaaaggttatctcctttgatgattgaaaatcgtaggggataggtattattatctcatgttacacattttaaaaattgggcaaaaagatttaagtaactcactcaaggccacagagccaacaggctgtgagctgtgatttgagtaagttctaaataatagaaaaacccaggcttttctactgtaagaaaagtccttagacaggaatggtgggagagaaggggagaaataaacaaactgaggcagagtgaatctttggggtaagattattaaaggcgcttcttgttctgaagttattgacgaaagggagtgtcggggatgtggaataaagacgcacttaggaagcacactgcattggaagagacgctcagggaaacacagagacaggcagatagactgagtcagagataggaacacaaaaagagacgctcaaaggtatcctgaagaaaggagtatggcttgattttcaccttagactcagcaaggagttttagaaattgaaatagtattacagacaaaaaaaaattgttacaatctgagttctaattttcacatatgtaagataaaaattccacagtgcttaggacaggattttaccactgctcctacaaggacattattatcaaagctatgtagttaacaaacactattcacactaccactctgacagccctctgactattgtggggggagaagtataactacccaattaatttcacaatggcactaaatattcctctttgttatacagaaattgcttgcacaaacaaggctctggcaattaagttttggctacccttgggatatggtagtaaataattattttgtctaattaataatttcaaattgattacaaacgagactttgagaatgggaggttgaggcaatagagaattaacccattggattccaagcctttcaagtaataagacttgtcttccatacgcaggccagtctcgtgtctcccactgcttgtatgagaagggcaaagagagaggtaggttcttttgcctgagactcaatgaacccagcctgggagtcctcggagcccacaataaactccagagatttcaaactgaccctaacatttgaaagtcttaaagaatctgatccaagggacacacacaggaaaactgaatctagacagcatcacttgtttccaagacagtctatcagattgttctggagaagagcgctgaacctacacagtgctgtccagaatcaaactctgcttttctctcttatgagcttctgaataagtgtatctacttagaagatgcaggaactgtgtgaagttgcacaacatcttggagcctcatttccttattttattttatttattttttttgagcattcatgagtgccattttattttgggtctccagaaatactgacagatgtagcaataatcattatctttaaacttcacattcacaggtaagcctatctcagctttccatatggcaaaaaacataagcaacccaaaacagcctgtgtcctgggatccctgtcctatttatttatttatttatttatttatttatgtattattattattattattatactttaagttttagggtacatgtgcacaacatgcaggtttgttacatatgtatacatgtgccatgttggtgtgctgcacccattaactcgtcatttagcattaggtatatctcctaatgccatccctccccgctccccccaccccacaacaggccccgatgtgtgatgttccccttcctgtgtccatgtgttctcattgttcaattcccacctatgagtgagaacatgcggtgttcggttttttgtccttgcaatagtttgctgagaatgatggtttccagcttcatccatgtccctacaaaggacataaactcatcattttttatggctgcatagtattccatggtgtatatgtgccacattttcttaatccagtctatcattgttggacatttggcttggttccaagtctttgctattgtgaatagtgccgcaataaacatacgtgtgcatgtgtctttatagcagcatgatttatagtcctttgggtatacacccagtaatgggatggctgggtcaaacggtatttctagttctagatccttgaggaatcgccacactgacttccacaatggttgaactagtttacagtcccaccaacagtgtaaaagtgttcctatttctccacatcctctccagcacctcttgtttcctgactttttaatgattgccattctcactggtgtgagatggtatctcattgtggttttgatttgcatttctctgatggccagtgatgatgagcattttttcatgtgtcttttggctgcataaatattttcttttgagaagtgtctgttcatatccttcgcccactttttgatggggttgtttttttcttgtaaatttatttaagttcattgtagattctggatattagccctttgtcagatgagtaggttgcaaaaattttctcccattttgtaggttgcctgttcactctgatggtagtttcttttgctgtgcagaagctcttgagttttattagatcccatttgtcaattttggcttttgttgccattgcttttggtgttttagacatgaagtccttgcccatgcctatgtcctgaatagtaatgcctaggttttcttctagggtttttatggttttaggtttaacatttaaatctttaatccatcttgaattaatttttgtataaggtgtaaggaagggatccagtttcagcttcctacatatggctagccagttttcccagcaccatttattaaatagggaatcctttcctcattgcttgtttttctcgggtttgtcaaagatcagatagttgtagatatgcggcgttatatctgagggctctgttctgttccattgatctatatctctgttttggtaccagtaccatgttgttttggttactgtagccttgtagtatagtttgaagtcaggtagcatgatgcctccagctttgttcttttggcttaggattgacttggcaatgcgggctcttttttggttccatatgaactttaaagtagttttttccaattctgtgaagaaggcattggtagcttgatggggatggcattgaatctattaattaccttgggcagtatgggcattttcacgatattgattcttcctacccatgagcatggaatgttcttccatttgtttgtatcctcttttatttcattgagcagtgagttgtagttctccttgaagaggcccttcacgtcccttgtaatttggattcctaagtattttattctctttgaagcaataaaattcaacaacccttcatgctaaaaactcttgataaattaagtattgatgggacgtatctcaaaataataagagctagctatgacaaacccacagccaatatcatattgaatggacaaaaactggaagcattccctttgaaaactggcacaagacagggatgccctctctcaccactcctattcaacatagtgttggaagttctggccagggcaattaggcaggagaaggaaataaagggtattcaattaggaaaagaggaagtcaaattgtccctgtttgcagatgacatgattgtatatcagaaaaccccattgtctcagtccaaaatctccttaagctgataagcaacttcagcaaagtctcaggatacaaagtcaatgtacaaaaatcacaagcattcttatacaccaataacagacaaacagagagcccaaatcatgagtgaactccttattttattttatgagacagtcttgctctgtcacccaggctggagtgcagtggagctatctcagctcactgtaacctctgcctcccaggttcaggtgatttttgtgcctcagcctcccacgtagctgggatcacagtcacgtaccaccacacccagctaatttttgtatttttagtagagatggggtttcaccacgttggccaggctggtgtcgaattcctgacctcaagtgatccacctgcctcagcctcccaaagtgctaggattacaggcatgagccattgcacctggccctcatttcctcattttaaagtggagacattcataatatctacggcacaggattaatgtaaagggtgtttgagacaatgcaagtaaattgcgtggcacattccttagcacataacaagcaagaagaagtcatcactatagatttattattgataatgcttttgttattgttatcattattttctgcagattcattccaaataaatgacaaagaagaatgtttctgctctctcatgcaggtcactagaaagttggtgttacacggagaactggtataacagtggctggtagatttttcctttttttttttttttttttttttttttttttttttttttttttttagagatgtggtctcactctgtcacacaggctggagtgcagggagtggcacgatcatggctcactgcagccttgaactcctgggctaaagcaatcctccccgcccccgtcctaagcctctcaagtagctggggccacaggcacgcactactgtgcctggcaacttttcctttttaaataacaattattttagctaagcctcaattaatcattgctcctcataacaactgttatgaatcctctatcacctataataacacttgccaataatgttcactcattagctcattcacttaacacacacttattaggtacattccctggagaagacactgttcgacaggcacttcaggctccaagagggaacagcacacagtcttctgactatgatgaatgacttgcagtttcccattcactctgctcattgcttacttgttctcatgtattatttccttaggcttgaatgctctttccatccttcccctgtagcttgtttccggagctcatcttcatccttcaacactcagcttcaacgtcaccatctccaggaagactatgcagatatatccaggtttgcatgaacagagtaagttctccaaggtgtctattgacctactctgcactgctgtaattatttacatctccccttttggttggatgaatagtccttaaaaggcaggaacagtccctcagagctgaatctgtgatctgacacacggtaggtgcctaataaaaatatacgtcaaatgaataacagaataaaatttaaaatatgcatctgtaattaaagtccaacagataaaataagtactgtttttgtaagtgcttgcaagaaacagacactaatgcaactctggcttagaccaaagaatagtaatttgttggattatatgactgggaaattcaaagggtgggtctggatccaaacatggttgaatccaggattgaaactttatcatcaggacatattcttggctctgcttttctctatctcaatttccaagcagactctcaaagatggtgaaaggaagctgggggcttaagagaaaccagttccaggtccccactggaaagatgggtggcttccctatagctccagccaatgtcctgggatggaatttcattggccatgcttgagtcacatgaccatccctgaccaatcactgtggccaagaggttgagcattctgattggctggggctgggtgacatcacttgcacctgctactgtggtggaacccagaggagattaaaagggaggaggctcctctgcaccctcgggtatcacaggaatttgggatgatgacagagcagacatgccaaggtcaagtcatttgaatttggcttgaaaaccagaaagaatttaggcatgtggggacactctgtgtgggaaggcatggcagaatgacctgttctgtgcttgaacagctgtaatggactaaatgtttggaaatacaggttagatccaggtcccaaagggccctgattgctaggcagcaggattccaatttgctcagaaggcaatggaaggccactgaagcttttcactcggaaggaggcaagcccagaaccgcgctttagagggattaatcaagcagctgtgtgtaaaataccctgggtaaatgtccgaaaagcatttcaatagcctaggtaacagataacgaagctctcaatgtgctgagaagagcacacacgtgacacttggattcaggaacagctgaggacagaattgacactcctgaaatatatttttctacccaggccagctcctccacttcagccactctgcatctgaggctggcatttagtagataaagcaaagacattttcaagggctatcattactgtgcattacacaaagctttgtgtgtgtgtgtgtgtgttttctcccctggcttctgactcggaggagtggcttttttctttctgttgcagaaagaagaggggtggtgagcaaagaaatgagctccatctctatctgtagactctgaccctggctgattcctttgtgcactgtgacaaatggagacacagaagatggaaaaccacattcctaatttctttccctgacagacacctattagcattctgtattgcaaagaagacctgaaagacgtggatgcaaatatcatcaaggcagcatctctgcatccacaggaagacaattaaacacacacaagttgcctacacctccagcctcagacaagctccaagggctgccttgaagtccttcagtcaataagatttttttttttgttttacctttttgtatcctcaaaataaaagtcacaagacattaataaaaaagcaagttgatccataaatagttccccagttttatctcagtgattatactttttcctcttgatgcctccagtggcctcctctttctgtctctctacttcgtaagatattttacacaagatactttgaaaacaactcttccctctgacagccatatatttctaagtgctccaagctgaaggtgttggtgccttttattttgcttcatttttatgatttgataaatcaattttaatgtcatgtttttaaaatcaggcttcttccagatggaaacagatgttttggtttcttgacactgcttgttttcatatggcattctctgaaggaagccaagtggtaatgacaggtggagtgacagacactctgtctcctacactgtgccccaaacctgcacatcacctaagacattaaagcaacaacaacaaaataaatttttctcttttcaacttaatgaagaaaactggtacccaaaccaaggaccttcagatctaagagaaagagcactgctgtttgcctcaaaagtctctactacctgctcaataaatcagaaagcaagagtgacgttctgttttccgttagtggagcagccctttactcactcctcgaatcaagagatgaaaagtgtcttccatttttggttttcactcatggtagacatttctggttctgacccttaaaacttattcataggatgccaactctgtgataacctttctcaagctctcaagatgtgccccccgtgtcacctgggagcttgttaaaaatgcaagttctccataactactgaatcagaaattctggagggggggccagccatctgtgttttaccaagaccttcaggtgatatggatgaatgttaaattttgagaacctctcctatagggtaactgagaattttaaaattagaacattctaacaagataacacaatgtacagtccatccatcactcaagcaatcactgagcccctgctctgtctcaggtatacggcagtgaccacctcaccggacccagagagtgggaaccagtaactggtcattgctgccactctggtgtggcactccctcttttataagggaaaaaggagattttagaaaacagaatggacagactttagcttctgtcctttagttttgtcctttgtcgtctctgttgaagatttaaaccacagagtcaccttcaaagtgaaatacaaaaaatattttgcattgtgatactaagaaacttgaagtcaaaaccttaggtctctgttggatgcaaagttaacttctgtgaattgcctgctcctttccaaagtctgcactggggggtcataatccccttcaagcctttgtaagatatgctgagtggaaaaggtattgactatgtaattttccagagggatgaaatatggctgcccggcctgtgtacagtatgtgaatcaacctagaatctatacatggggagatactggacggatcaatctttattcctaggcaatcaagcagggaatcatctccagatctctctatagacagctcataaaatggggttctaaatttgtggtgtggactataaaagcgatttgttttgggagaacagtcacataagatgagcgcatttggatgataaacttcacagacaattcccctgggcaactgtgcaagattttgtaggaggtttctttgtaaagttaccaaggcagcttctaagattttgtttttttaaatttttggtgtggtcagttatgttaggcaactgaggagactgccaacacgtgtagtgtagtttatgtaagagaaactctgaggtcctcggaatgatcatttgtgaagccctccctactttgcgccaggcatatactaggggttgggcttatgtttcctgatttacttcatcctcctggtgattctctgtgatgggtactttttcttgtccttatttttcaggtgaggacatcgctgcttgcacaaataaagtggctgtattggtgtctccaaaactccccattgtttaagggggttataaatattgtgcaaatcgtaaagagtttcggcatcatgtctcatgacaacatgaaattgacaacatgaaaattatttttacaattctataaactgcttctgacataagaaattgacatttatgaaactggttgctcctccaaaggcctgaaaatgacccacaagttgtcacagcaccttttgtccttagaaacacagaggaagcttgtcagttgtgagaattttgaggtaaccaggatgggctatgcataagtcaataaataaccacaaaagttggtctgtggaataagaggaaagaaagaagtagaagagagtagagatgacatcatgagaacacagagaggctcagatagagaaaatgggtgcatgagcatttctgggatctaggaaagctgaccacatgtctttgactcatgtttattatctggatctttgctctaaatccctcatggcataagcaagcagaagtgagtttctcttccttgcaatcaaatcccacttaattaggaatcctaattaggctccaggaaaagcacctcttattttgttgcacttcactttatcgtgttttgtagatattactttttttttttttttaacaaattgaaggtttatggcaaccctgcattgagcaagtctatcggctccttattcccagcaacatgtgctcactttgtgtctctggcacattttgataattcatgcaatattttaagttattattattacagtatctgtatggtgatcattgatcttctgtgtcactgcaattctttgggggcactatgaactgtgcccataagatgaagaacttaatcaataaatgtcatctgtgttctgcctgctccaccaaccagctgttcctccatccttctccctctcctcgggccttcctatttctgacaaacgacagtagtgaaatgaaaccagttactgaccctacaatggcctctaagtgttccagggaaaggaaggctcctccatcttttactttaaatcaaaactagaaatgattaaccttcatgaggaaggcatgtcaaaagaggtgataggccaaaatctaggcttttgtgtcaaatagctaaccaagctgtgaatgcaaaggagaagtttttgaaggaaactaaaagtgccacaccagtgaatacacaaatgataagaatgtgaaacaaccaaccttattgctgactggaaaaagatttaagtggtttggacagaagatcaaaccagccacaacattcccttaagccaaagcctactccagagcaaggccctaactctcttcagttctgtgaatcttagagaggtgaggaagctacggaagttggaagttggcagaggttgattaataaggcttaacagaatcaactgtctccatgacataaaagtgcaaagtgaagcagcaagtgctgatggagatgctgcagcaagttatccagaagatctagctaagaccaccaatgaagatggctaaactgaactacagatttgccatggagaggaaactgccttctgttggaagaagatgccatctaggagcttcacagctggagaggagaagtcaatacctggcttcaaagcttcaagggacatgctgactcccttgttaggggctaatgccactggggacttcaagttgagttcatgtcctttgcagggacttggatgaagctggaaactatcatcctcagcaaactaacacaggaagagaaaacaaaacacctcatgttctcactcataagtgggagttgagcaatgagaacacatggacacagaggggaacatcacatactggggcctgtcgttgggttggggggacggggagggagagaattaggataaatacctaatgcatgcggggcttaaaacctagatgacgggttgataggtgcagcaaaccactatggcaggtgtatacctatgtaacaaacctgcatgttcagcacgtgtatcccggaacttaaagtaaaaaacaaacaaacaaaaaacaaccccatcaaaaagaggacctgtttcatatgcatgaaaaaggtggtttgtggacatagttgaaatgacaacaaaggatttacaatattgcttcaacctagttgataaaacaacaggttttgagcggattcttcaattttgaaagacgttctactgtgagtaaaatgctatcaaatagcatcacatgctacggagaaatctttcatgaaaacaagagtcaatcaatgtaggacacttcactgttgtcttattttaagactttttttttttttgagacagagtttcactcttgttgcccagcgcagtggcctgatctcggctcactgcaacctcctcctcttgggttcaagtgattctcctgcctcagcctcctgagcagctgggattacaggcatgtgccaccacgcccggctaatttttgtatttttagtagagaaggggtttcaccatgttggtcaggctggtctcgaactcctgacctcgtgatccacctgcctcggcctcccaaggtgctgagattacaggcgtgagccactgcgcccagccaagacttttaagacattgccacagtcagcctaaccttcagctaccaccacccggatcagtcagcagtcgtccatgtcgggtaagaccttccaatagcaaaacgattaggacccactgaaggctcattagcagtttttggcaataaagtgattttagtttttgttttttttttttttttttttttgagaccaagtcttgctcttgttgcccagactggagtgcagtggcatgatctcggctcactgcaacctccacctcccaggttcaagtgatcctctcgcctcagccttctgaatagctgagactacaggcactcaccaccatgcctggctaattttttgtatttttagtagagatggggtttcgctatattggccaggctggtctcgaacccctggcctgcagtgatctgcccgcctcggcctcccaaaattctgggattacatgtgtgagccactgcacctggcctggttttagttatttttagctaaagtatgtaattgcttttcagacataacactattgcacacttgataaactatagaatagtgtaaacataacttttctatgtactggaaaaccacacacaaaaaattgtgtgattcactttagtatggtgatctggaactgaacctgcagtatctccgaggcatgtccatagcagatctttatttattcacatgcctagcaaaacacctggtacatagtagatgctcaacaaaaacgtcccaatgagcaaattcattcattaaatacacatttttggaaaccacattcttgtataaccaacaaaccaggcatctatgaacccctgagctgtgttgttttttggagactttcaacggcatggcttgggcttttaaacatgcagtgactggcaaagcagatcactgcctttcacctgctcctttctgtaacccttcgcctccgaatagttccaatatctgcattaattcaggtcaatgagcaacacagtcggtttctgggcactaaccaatcttttcaaaggcatgtgcattgtcacaggggactcgggaacaggagtctccaaaaccacagtaatatttttactattaataaagatgtatgcccttctgctccctcctaacacattacatatttatcaatttattgagtgcttgctctgggccatgtacaatggcaccctaagtactttattacaattaattctcacatcaacccattaactgggtgaagtcattgtaatgattctcagctgagggttgaagaaacccaaactcagaggtgagctattttgcccaagttcacagaccacaagtaggatcactggtgctcaaaggaagttcacaacatcgcagtctgcaggcttgacttccagcccagtgttcttctgctgggactaaatctgctgtccctgactgactgactgtcagaagttgacaagacccagtgacagagcactgaactgccagccttctcgtcccttcgcgttgacagctgaatatcccattgacgtggatgctgtcatcattaacttataggctacagcgtgggtgaactgggggagtgcaaaggtgagggctgaatcatgggagggctctacatgttcagtctgcccactcatcttgtccaattctggtctctgatcatgatgccagcagatattttctggaagcgatgacattgacctccagaggatgacagcatattctactttctaagcatctgagagaagcagaaaaaaagtgagtcctggatgcacagaaggctggggctttggccaggctgcatgccataatccactcactctgaatatttatccaggacctactgtgtgcctgagatggcctgctagatgcagagacacaaagatgcataaaagtcctaccgaagcttgaactttgaaggggttaacagaaaacacacaagaggacaaaaactctatgtattactataaactgggcaattgctatcaaaagccactgtgagatagagaatagctgtaggacatccagtaatctaggatgatcaggaaagtgacatggaaattgaggcacaaagaagaagtcagactcagctgaacacatagtagaggtcctggtactggaaacagctggatgtttctggaaccacaaagaaggccactgtggccggaccttactggaccacagtgagagcagtgggatactggacttaggcattccatccttgtgtgaatttcatgcctacaactcttcatgtagcagaatctataaaaaagggactccttccacaaactgtttcctcaatctataaaagataggaaggacaggtctaagaaacagagacagaaaataaaggagtcaggtcttcttgaaaaagagaatgtgtttttaatctgtccaaggcaatatttcttaaagcagttggatcccatgccaccttattaaaaacaaatattttgttttgccttcttttgtctctacaatgaaatctgtagataatataataacctgcttacataattcaaaagaggtataactgcttcatcgtataataatgagtgaaaggaaagtgatttataacaaagcaatgtgcatcccactctgcaggcgtccagcagagctgcaggacacagtgaagggtctgcaccgtgtaaagacagatgctgtgagcatgacctggtgtgcagtgatggaatattctggaaagttgaacaacttttgaaaaagttctagacaaagcaaaatacaatctgacctcgatttaaccggcaattgcattccttgacaatttgactgtattaaaattatgcagaaatacttcctatttatatagagaatggagtcaagttttatgctcacgtatttgtaagcgggtgttccctctccatcagtatcctgtgggtgtttgagtaccatgtcgggaagcaggactgtgctttctgttgaatgggactgtcctccacactgtggggggtttagtatccctgctttctgtctgctcataccagttggcaacacgcagcaaatgtggcaatcaaaaataatgcctccgccatgttaataaaatacccccaggcatgtgtgtgtccatccacatgggaatgtacacacggtgggaggaaacattctggacatttgtagggctattgcctttgcttggaaatcactatgctgagaagtattgctgtcagggatcagaatgaagaaagagacaagagcaacttcccaaattctacaaaaccaagtcatccacagccatatttaaatatcattgcggacccactgcacgtatgccaagtgactcccaacaggcttatctctgtctgacattgttggtgccccacaccttcctgaggtcacagaattgcttgcgtgtgccgagcctggggtcaggtcactcagacactgatcttcccaacactccttgggtccaggggatggcccctaatgcccaagttcacgctgaggctcaaattctctacattaagaaggaggacccacctgagcctgccaagttgaaataccataaggcgcgctttctccacctcgacattctgggagagagatgtatttgtggtgggggctggagtgcattgtaggatgctcagatccattaaatggggaccaggcttgacaatctcctggcagataaaaccaattaggcaaagtaagcaaagcttaatctcgcttcaatctcaaatgccagggaagcttaactcagattatttcttataaattcctccgataatcacaaacaaaacttacgctgccttccagtataagatgatcaatttctaccaatcgttttttgtccaaaaaccctgattgtgacaaccaacttttataaaggataaacaacttcctcgttcttgcttgataatccatgcctcttaatcatttttggtttacgatctcctggtttcaggacggtgcttttctatgcacaagaactttaaaaattagtttcatttgattttatttttaacagggatgtttagtagcattcctggtctttacccatgagatgccagcagcaaccccgtctccttggtcgtgacaatgaaaaatgtctccagacattgccgaagtgacacaagctgagaaacacagtcgtaagatgagacgtttgatttcttttgaaaataaggtaagctgactcttcagttcctttaagacccccctcctcatcctgtgttttgtaagctcagcatgttgacatacaccgatctcatctaatgctctagacccaaagggagaggccaacggcaagaccaatacactaggcatttgttaaagtgtcccttttgctttacttggtctccatgctctattccaaaactatctgctcctcttaaaccttggttttaaggcctaaacttagagagaatcatgttaaaaatagacaaacaggactgggtgccgtggctcacacctgtaatcccagcactttgggaggccgaggcgggtggatcaccaggtcaggagatcgagaccatcctggctaacacggtgaaaccccgtctctactaaaaatacaaagaaattagctgggcgtggtggtgggcacctgtagtcccagctactggggaggctgaggcaggagaatggcatgaacctgggaggcggaacttgcagtgagccaagatcacaccattgcactccagcctgggcaatagagcaagattccatttcaaaaaaaaaataaaataaaatagacacatacacacacacatatacagagagagagagagagacagagagagagagtcatgtgttgtttaatgacggggacatgttatatgtgtcctcaggcaatttcattgttgtgtgaacatcatagagtggacttacacgaaccaagatagtcatgtctaccacacacctagcctatggctcctgggctacaagtctgtaccacacattactgtactgaatacagtaggcaacacaatgataagtacttgtctatctaaacatgtctaaacatagaaaagttacagtaaaaatatggtataaaagatctttaaaaggtgcgcctgtataggccacttaccatgaataaatcttgcaggtctggaagtttctctgggtgagtcagtgagtgagtggtgagtgaatgtgagggcctcagagattactatactctaccatggacttcataaaaactctacacttaggctacattacatttatattttaaaaaagtaattgtgctacaacattaagatgactagggcatcactgggtgataggaatgttttggttccattataaccttacggaaccaccatctcatgtatggttgagctttgacagaagcatcactatgcattgcatgactacatatgtagactcaaggaataaaattaaacaaggctgacttttaaatggcccttgatttttggaacagttcagaatatccagccaagtatttcatttggaaagagactggggcagataggggtttctctccaccccatatcccaaaccctcttagatttgctgagagagaattttggcacgtagattgtcttggtttcagacttggctaggtatgttgctgtgttcagtacatccttttccgctctttagatcagaggctggaatgtgctctgatcccctcccttcaaatctgggagagggttctgcaggatgctgacacctaattttagaatccgagctttagtcccttgaaagggactgaagctagaataagaagctacctgcttgtcattttgtatgtgtatttggcattttgcccctccaaactcacactgacttttaaaatatgttaaaaataattacaaaaaagacctacacatgcatgaagatatatttgtggactactgctggagcagaattaattgttccctcctctttgttctcttacgttctgcgtggacttctagtgcatgattttgtactttacactatagttagttgagaccatctgcagtacccagtgttcagacagagttctttgaggacaagagtgttctctaaatcattttgagcccaacacaattcccagtatagggctgatgcttaatcaatgggcactaaatgaatttgatttcatctgttgaaaggcatgctgaagaccactttcttttcattaaggggagtagaatgagattgtaccatgtgaaaaagctttggtgaaaaaaaattggcatcaaatttaaggatcctgggctattgttaatatatcctgatttccagaagacagagaatctttattactagttgaacttctctggagagagtgtcagaatctggaatttcttggtggggggaatcctggctgcacacggctggccttcattgctctctggcatacgtcctgagatcccaccatcgcaggcgtgaaactcaggacacaggagcatataaaagagcaaaatgcaaaatatgataaaaaccaatgcctgtcctcatggtgattacattttatgcaggcaagagcacagaaaagaacatgataaataagttaaccttacagtatgtgagaagctgatagtgtcataaaaaagtaaagcccgtgtgagggtctgaagaacgctgggggtgatgtgagtttaagggaggagtgaagaaagttctcactgtgtcctagagatttgaagaaagttctcactgtgtcctagagatttgaagaaagttctcactgtgtcctagagatttgaagaaagttctcactgtgtcctagagatttgaagaaagttctcactgtgtcctagagatttgaagaaagttctcactgtgtcctagagatttgaagaaagttctcactgtgtcctagagatttgaagaaagttctcactgtgtcctagagatttgaagaaagttctcactgtgtcctagagatttgaagaaagttctcactgtgtcctagagatttgaagaaagttctcactgtgtcctagagatttgaagaaagttctcactgtgtcctagagatttgaagaaagttctcactgtgtcctagagatttgagcaagcctcctggcagaggagggtccaggcagcggggaataccaagtgcaaatgccagaagccctagtgtgtgcaagggagaggaagaaggtgcatggagctgcagaggggtgcagggggtgcagagggcaccaagcaaagtcagagaaggaacaggggagccatactgtgcaaacccctgtgggccactgaaaagactttggtgcttactttgagtgcagtgaggaatcattgaggtctggagcagacaagtgtcctgatgggagtttaaaagcatcctctggctgctgtgttgggactcaaatgcagggagcagacagggaaggacaaagctcagctaggcggtccttggtcatccgggtgagtgatgctctgtgaatgagcaaaatcatcaaagtgctccgggtagagctttgcagcaatgctgtcccacagacctttctgcagtaatagggacgttctctagcatatgaccatctggttctgagtcataccttctttgaaaccccacactccatcttccttagggacggttggaggatgacagtttccagggactccagataaatgtgttccaaatatgagaaagttgggcaatgctaagtgttggcaagaacgtagagaaacggtagctcttctgcgttgctgttgtaactggaaaaacttgctcgaatgaagtgcatgtgtcccctatggccccgcaatccacttctgagatgtgtcccagaacaattctcacagaggaccagagggcacatgggcaagaattttcactgcagcatcgtgtgtggagcagagttttggagacaacccggacccctttgctggggagcaggtgaatgaaacatggcggatgaacactatgggatactacgcagcagctagaagcaactaacctgaaatgcacacaggaatgtgaatcagcctgggaaagcacagggccacatgagaaaaggaggaaacagaacaaggtccaaggtgcctctcaagtccagaattctagaacaggtcattcctttcaaagtagaacttaaggaagagtttaacatacaaaaaaaaagaaaaaaaagaaaaaatctgctgggcacggtggctcacacttgtaaccccagaactatgggaggccaaggtgggaggatcagttgagaccaaagtgggtagcattgtctctacaaaaaaattttaaaaattagccgggcgtggtaaagcacatctgcagccccagctactcgggaggctgaggtgggaggatcacttgagcctgggaggttgaggatgctgtgggttatgataccaccactgcactccagcccgggtgacagaatgagaccctgtctccaaaaaaaaaaaaaaaacccacaaaactgtaagacaaactaacctataaacagagaaaaatacaaaacaatttacagaagaggaaatgcaatttaccaacacatacttgaaaagattttcaatcttactaatggtaaaggaaatgggaatttaaaagatagttttcagctgtaatattgtcaaattagaaaaaaataacatttgctatgagcatcaatttaggaaatgagctctcttatacattactggtgataatgttaattgccacaaccttttgggagagtgatctagcagtgtttataaaaattaaaactgcacatatcctggaatccagtaaccttgttctttttagcccttaatgaatcaggcaccccctattcacaccattaggtaaccctcccaggcacccccaccaccacctacacacatacacacacattggtattgggcttggccgtgaggcctgcgttggccgctggaagtttagcaagcgggaagactcagaggcttgattttctcagacctctcccaactggaaccccaagaccaccatgttgttaggaacacagagccagtcatgtggacagaccatctgttgtagaacagaggtacccagctgacagccagaaggaggtcccagccatatgactctagctgagctgtctcagccagcccccagacacacgggcattcccagctgagcccccaggtgccatggagtacggccaagccatctccactgtgcttatgcgtttattgcatcattgtgtgtagcgtggcaaaacactggacgtaaccagaatgtccctcggttgaggaacggttgaattaactgtggtacatacatgctatagaattccatgagaattacagtgatagaaatcttttgtctaccaatctgaaggcataacaaagcatacccatgctatattaaatgaaaaagcatattgcagcatcatatacaactctagttttgtaacaatatgtttaaatacttaagtaaatggaaaataaatgtttgtagaagcgtagaaaaaaatggaagacttcaccaggttgttgacaccatattaggaaggtgggatgaggtggagattgctgaatttctaaagaagtttttaaagtactttactcattatatgtactactctggtaattaaagaaaatcaaatgaagaaaatggtacagcaaaatagctttttaaaaagatcagcatctgaaaacttgtctatcaatttcaaacaaattctgagaatacatttgagggtacttgcaaagttattttactaattttaaatacaacatctttttttttttgccaactttagatttaggttaattctgaaaagtttcattagccttttttcacctgggttaatacagttaacccagactcatttaatacagttaattggctctcttcctagcgtgctcctttgaaaagagcaaacatctggttttatctctgagaacatatttaatctgtgtgtgtgtgtgtgtgtgtgtgtgtgtgtgtgtgtgtgtgtgtggaagaggatgcatgaggcatgccaaataatcaaatcttcaaaaactccttttactgcgaaattcaaatgacctgagagcttaacaaaaagaaagaaaattgtgttttctaaatgcccttctcattaaacaaatgacaaaaaacacaaaatccgctgtcagatatctgtcattacgcttctatcgtgaacgtacagtctgcatgtctgatagaatctggccaaatttgtgccagtgtgcttgactttttctttcttttgtctaatactgtggttctcaccttgggcttcctattagaagcttccagaaggctttgaaaaagtacagacgcttgggccccatcccagaaattctgttttaatttggatgaagcttacaccttgcaatttgaaaaacactgattctaacacacacccaaggttgagagacatgggtctgagatgaatctgagtaacacgcattctcgaggaactcttacaatattctaaccctgtgtcttctgaatcaatgtgacaccatcaaattatatttcacatagttttactattaaccatacttaattgaagttgagtcatctgaaaattggtaaaagaaaaagccagttaatctgaatattcggttagcttggaacatcattttgagtgaacacaaacgctgccagcagttggcttttcacagaggctgaaacgaaacgtgtggcttctgccaaaatacccacgtcaacgctccccttcgtggtgacgcaaatgtcagcacaaaactcagtgccccaattagggggcatttcatggctgcgtgagagcatttcagcagaactgtagtgtttcattcacaaaatcccttccatagggtcattcttgatgaaaatatctgcatttctcaatgattttgctctaatttagtttgcacctgccaaaacatatgtatacaaactatatttaaaatcttgaacttgctctgaattgatctttattcagttacttatttctcttttttttgaggcagagtctcactctgtcactcaggctggagtgccatggcgtgatttcagcttactgtaaccttcacctcccgggttcaagcgattcttttgcctcagcctcctgagtagctgggattacaggcgtgcaccaccatacttggcttatttttgtatttttagtagagatggggattcaccatattggccagggtggtcttgaactcctgagctcagatgatctgcctgccttggcctcccaaagtgctgggagtcaacgtgagtcaccgcaagtcaccgctcctgacagttacttatttctaaaatcttgggcacttgctttgttgcatcaactgtcccttaactcttcacctggaccaaaaacttgtccaagggtaactttatattctctacagggctaggcacacaatagagtaattaaatgtctgctcccttgattcatatttttgctcagcaattttgtttgctataaaatatcatctcgtgctctagaaaggtcgcaaagattctagcatatttggagaaaagtcacccagctctccatggatttgacaagtgccatatttactttatcagtggtgaaatggacttcattttgttacttatctcaaaagatctaacatgctctcttccaacactgaatgtggagaaacaatggaatcttctttctttcttctgtcttcagtttctggaaaagttagaggcagtttagccttctcagctcatttaaggcatgctctccatggaaacttaaaagattattaactaaaatcacacccaaacacagctatcttttgtttattagaaataactggcgtgtatcagaaagaacaaaagataagaattcaaaacattaagaattcaaaatttttttaaggtagcagtgattacaaaacaatgacatttatgggttcttactaagcggttgggtggggctgcccctgggccaatgttttagaggactctgtttcttcacagagggccaaagggacatggtcacctgcagcctctcacctccttctagccaacattccaggtgcccaggcctgttaagaccgtgagataagcttgcaggtgcaagcactgaatttggaaggtgatcccagaaaccagtgcaggagagtgtggtggtgagatgggaggcaaacacatatacgtggtacattactgagcatggggggtcactgcagggtgccaggctcagtcccacggggaaacccaggagacagtgggaaacatacctcagacaacccaacaggagatgaggaggcagggatatttatccaccatctcctgtcagtcacaggtggaaggtggctccaggaggcattacctccccacactttcagcctgcccatggatgagcagaatggattccagccaccagggaaaactcccaggaaaaatcacaggcacttggatttggagtctgaggtccacattcagggctacagtgagtgctgggaggctacgggtcaggcaccatcagtgtctgccattgcaagaccctaaaatgtgttgtccaatgggccaaacccacttccaagtctgtgcatccctctttcctgggtccacccacctgaggatgaggcaggctgccagtgtactccctacaggaacaaacgcaagaccaggtggcagctgtttgcagagggcacgccagaagccatcaatgcaggcagacctctccacaggaacatgcccctttgtgtggcaaggaggtgaggcaggaaaagaggtcagccgaggctggttcttctggggccagcaggttcaaaggcagaatctgaggaattgagtccaagaattctgaatccttacctggcatcctaggtagttaggaaggtatatttgtcatggtgggagaacagaacatcatttatttatcagtttgttagcctgatttataacttctgagtatctagacatgttgtgtgtagcagatgctgttggtgagcctccacattccccaggcttctccacttcggtgcacccagcctgatgtccaacagcgagagctgcttctcctgcctcagggcttcctgttgatgccggaatctgctttactgccagaacagaaggtggaaaatgtagaggaaccaagctcgtgggagccaccttccatggaagactgatcggtgtcggtattacctgtcctcttcctcactcccaggaggagacagccctgagctgctccaggaggagtggaagctacagctgcccgctgcagtcccttgctacatcacacaccttttatcagctacaggttccttctttgtctttttctttcctttactggtatttttcttcatctccataaaaattttaaaacgccctctaacacttgtctcaggtctttcttctgggtgaatccaaaccaagctggcagagacccggttatgtacttgcccagaccccatacatgtcacgggtgggcctgtgtgtttaccacttattctcctactcttcactgaagcccaatgaagagggtgatactatgatccccatataaaaccgagtctctgagccctaaagtcccttttccaaggtcccaagctaataaataagataataatgatagtaataaagcctgaaatctcggctctgtccccactcattgtgtgtccagggatcatacaccctaagtcataccacggatgtgaggattgtgatgtccatgtggacacgaccccagcaccatagaatgaggtgcttacctccatgcctgtggttcttctcacttgtttaccaattctttcttgtatgcttccttccctccctcccttcctcctttccttcatcccttccattattaagcacattattaagcacatgggggcacctagctatgtggcaggtcctgtttcaggtgatagaaacagccttgaacaaaaaaaagtaagtccttgtcttcatagagaaataaatgaatgaataagcaaacaaataagaatagttagctactgataaatgccatgaaggatacgagaggcctgtattgcagcgtggctggagagttgatgtctgcgaatgtttgcgtatgggggggggggttgtgggtgtagctgtgtgacagttggttttggtcagatctctaaagaggtgatgtttcagctgaaccttgatgataaggagccactccagctgtgagaagactagcaacattttacaggaagtaaaggatgtgtagaacagccccagcgtgcatgggagagacaaggcgtgaaactgtacctgcagctccagggcagaaggagaagcagccccagatgccgtcacagaggcaggtgtggctggatctcctaaggcttcatacactgtggtacgatgtttggctttcataatgaatgcagtgggaagtgcaggaggaactgaagggacaagatgtaatttaagttttataaaatcactcactgtcatataaaaatgagagcaggagtggatgaggaagactggttaggacaattacctcaccctgggacatcaatcatcctgcattcccacgctttgctaggacggcagtgcctggaacttcctacagaacctggtgaggccacctgctatggtttgaatgaggcccctccaaagtcagtgttgaaagtgaatcccaatgtggtgatcttaagaggtggggccttttaggaagtcatggagtcatgagggttctgccctcaagagtggatctgtaatcccagcactttgggaggccgaggcgggcggatcatgaggtcaggagatctcctgagaccatcctggctaacatggtgaaaccccgtctctactaaatatacaaaaaaattagctgggcatggtggcaggcacctgtagtcccagatactcgggaggctgaggcaggagaatggcgtgaacccgggaggtggagcttgcagtgagcagagattgcgccactgtactccaacctgggcaacagagggagactccatctcaaaaaaaaaaaaaaaaaaaaaaaaaaagagtgaatctggcctaatcaaggaggctttagggagaactttagggagaaacggccccttgttggcttttccatcccgtatgccttgtgaggacatggtgtcctcagcacagcacccaggtgccatcttggaagcgagagcagctctcaccacgcaccaatgccggcaccttgatcttggactccccagcctccagaacactcagaaataagttgctgttctttataaataacatggtctgtggaactttgttacagcaacacaaacaagctgcgactccatcatgtcttaccctatgcccctttctgggttcatgtccatgggcctggtttgtctcctggcaccagccctgcagcttcctttggatgcttgcattccaatcactaaactatatgatgttaacatgtactttcaattatcttcttattgtcgggtgtggtggctcaggcctgtaaccctagcactttgggaggctgaggcaggtggatcacttgaggtcaagagtttgaaaccagcctgggcaacatgacaaaaccctgtctctattaaaaatacaaaaaaatagctgggtgtggtggcatatgcctgtaatcctggctacttggaaggctgaggcatgagaatcccttgaattgggaggcagaggttgcagtgagccaagatcacaccatagcactccaacctgggtgacacagcaagactctgtctggaggaaaacaaaaacaaaaacaaaaaccaggtatgtttggtattcaggagtgtggcgggggaaacttcttcaagatgcggccagacaggtgggcaggggctaggggcaaggaggatatgggatctttcaggccatgagcaaactttgcatggttaaaaaaaaaaaagccaaaacaataaattctcttctccccaaagcaccttccgcctcatttggctccctggccagcctgcctgggtgatagataggctcatctcaaccaggccttgttttgttcagagcagcggcagttcatgggccaaggctaaagttgcaagccctcttgggagttgtcagagtcatcaataatgtcaatagtcgtcaatagccatcaataacaatacagccaaatgcaaatcaaaggaaaatgtaaactgaacaccaggggacatagttattgactcagaatttctctcattcttaacattctccgaaaattaaaattatgttgaaggattcctttttctccttaagtaagggataaggcaaattggtcttcttgaatgactcttttttctctgtgtcacatcaattggacaaatattgggtcattctccaccctgggctcagagccaatttagaactgtggaaatagcagacattggcatttctggtctcaaagaatctatggggtctggggaatacatatcatccttgatcaatgtttattgagtgtgaggcagtgtttgggccttgtgttagtcactgaaacaaaacaatggtgtaagcttttttctcctgggtcataattttgagatactgttatatgcctacaataaaatgataaagaatacttgcatacattaggcaacacacatttactgggccctgtggtagtgacaattgcagctgtaaatgttatttggccttggccttttaaataatgtcagttttatgtattttattcctgagagaccatttgaggaaaatggaaatcattatagtagaatgtaattgtctcttttaaaacttttattattttctaaaatatacaaatactctttctaaatagtaaatgagttcataattactgatagcaagtggattttaaaaatcattattatataatcctaccattcacagataattacattaatattttggtacagattcttctaaagtcttttctagccataatacaataattttccagacaactggttgacctaccaatatgaggaaagagactaagctctccagttcactatacatctgtcaataacagagaggaagagagggagaaattgtccagtcaacagggacccttggggacacagattaaatctatatgccccatggaattagggtgagggcgctctttattaaaatgctctgggcttaaccatatatccaaagtatttttccaaatgcatgtcatcacagctaatggacacactgcattctgttcaatgtagctactatagttcatttagtcaatttcgtattactggatttttaagtggttttctttttctggtaccaagctactccacacaatactcaaaacaaaacaaaacaacaacaacaaaaaactcttctacatccatctcagtgcactcaataatatttgccaaactattcagtttagatgtctatgtgtttgatgtctgaactagaggttacaaactgataacccacaggtatgtcttgtttggccttgatgatattataaatatttaaaaatttcacctgaacatcataatttcctttcctttttttttttttttttttttttttgagacagagtctcgctgtctcccagcctggagtgcagtggcgcgatctcggctcactgcaagctccgcctcccgggttcacgccattctcctgcctcagcctcccgagtagctgggactacaggcgcccgcccaccacgcccggctaattttttttttttttttttttttttttttttgtatttttagtagagatggggtttcaccgtgttagccaggatggtctccatctcctgacctcgtgatctgtcagcctcggcctcccaaagtgctgggattacaggcgtgagccacggcgcccggcccataatttccttttcatgaaagaactctggtgacccatgacctcagtcccaaatagcagcagctggcagatctgagtttcggcgaccccgttagtctgtgcccccgtttgccacgacgccatcctccctgtagcttcacatccagtttctttaatcatttacatttcctgcctaccccctactctgatccggcacgttgctctgtgacccctgctggttcccacggatttcttagtcctttaatgacaccagctttatggcagcttttgaatgctggaatctgggccaaaatatggggtcccaactctaaaagtaccaaatatacgacttgatacaatggagcctctttgagactgaattttcccttctggtaccatcacctagttaggcttacttgcatggggcttgtgagcatcaaatgcgataattcatgatgagcgctgaaaagtcgctaacgaacatgtggttcactcatctgcccaggggaggctcttcctgcactgccagtatgcacagttccataaaaagcccacggcaacaaacaacaacaggaccccactgattttatcatatttatttcaccaacactgtttggctgttcaccaaaaaccattttcttttcgttgtggcccagagctaaactccagtttccagccacccttgcggtagaggtggccccaggactgagacttgcggatggaggatggggtggagggaagccttgctcccacatttaggttgtgccaaccagcttcccccggtcctccccgctgtctcctaacccttcactccatgcggtcacttaggtaaccatggaaactatgcattgaagacactggaaccagcatttgaagaggagataccatcatcttgcaggagcctgggtttttaaatctttgcttattggggccaggtgctgtggctcaggcctataatcccagcactttgggaggccgaggtgggtagatcacttgaggccaggagttcaaggccagcctgggcaacatggcaaaaccctgtctctactaaaaatacaaaaattagctgagcatgttggcacatgcctgtaatcccagctacttgggagactgcggcaggagaatcacttgaactcatgaggtggaggttgcagtgaactgagatcgtgccactgcactccagcctgggaaagagagtgagattctgtctcaaaaaaaaaaaattgcttattggaaagctatctctaaagaatacttgtttcgattttatacaagttagaaagaaactttacttgggcaagtggcattatgaattgggtttgtttattaacacagctagtgttccttacctaagaatttgtaaggtctaaaagagtgtcaggttgacaaacttcctggatgtagttttagtgtcttctctttttctttttttcttaagttaaaattagtacagaaaattagcaaatgtcagtttcaagccaattacaaatagttttggttacaaatgcagtacttggaaactgactgactaggaaatacttcctgggagatgcatcattttgctcacagagtttcctgaaaagcaattaatttttattttaagaaaacatgagagagattttcagtacaaagcaatgaaatcaagaaagaaatttgtctataaagtgatggaacataagtacacttaaatatatagtagagaacatctcattagacatcagatcattaaatacactaatagcatgacaattggtgcacaaaatataactacatgtagcccccattctctaaatcacattgcacactccacccaagtggagtaataacatcttgtaattttttgctgctttgctcattagaagttctgttttctcaaaagaacagagaaaatacagtatacacactgtcaaaagttgactttagtaatgctcctggttgagttttgcgctttcatctgatgacagtaccaccttcttctttgtatttgttttggcaagtggggagttttctgttttccactctctagagtcacgcgagactgctttaccctcaagtcactaaggtctacccatgaacaaagcacgggcaatcgggacttcctgtactctaaggctggggttggggagaggcatgtgatccaagccagctcacagagatgtgcatcgagaactttcgctgggatggctgctaaacagctaatcccccttttcctgaaatgactagatggatagcggcgccaagtcaccccgcggaacctcctgagaataattaagctgacaggaggaattctcagctcggaaatagggaatccacgccctcctaaaccacctgtgcccctgtatccagctgtacttgaaggtcaacatgtgcctgtcgtttccaggttcttgaaccaataaattctctctctctttaacttcatgtctctctcttaatcttaagattctgtaactaacaaccaaagaatccaaaaattaatccaacagttaatggaaaaatatttgcttacagctaccattattgacagtctattaactcatcacaattaatacaacccactttaatatctaagacagcattgaagatgatattagttcacatttctgagacacttgctacatgccaggtattattctaagtgatttacgtggttagtaataaatacacattactaaaatatccaaacagaacaaattggtgtcccattaaaagtaagtcaggagaaacctcatttcctaattgtcttcttcagaatcagtaccataaccagttactctgtattcttgtaggtctgtacaataaataggataaataaacaaatgctgtaaataaatatgcattataataatacagctatatgtatgcatgtattgatttttgacacacacaataccagctgccatatagatggactggttatcatgtgctaggctctattctaagcacaagacagtgcacctattatcttactgaatcctcaccacatgcaggaggaaggtcatcctggaggaagctggggctgagacaccgattaatctgggaagccaagcaggcaggctgccttcagagcatgaattcttcacaaccaccctgctctgttgacatgtttggggatctataaataatcccaattctccacccgggtttgcaagaaattgagaaagagagaaaagcatcagagactcgaagctcaaactgtgctgtgttgtgattagggctgggtggcaggatgtgccttaggtataatgtcaaatgggcattctaagcttcttcccttctgtgttccctcccaccatccagtcaggagctcaggagttccacctggtgaaaagtgagcatccacgaacacacgctcatccaacaagcctgcctcacattcctggggagtggagaggacactgaagatataaatccccaagggtcaggcatttacatggaaacttgaaccagtggaagtcaacaatcaagcatgttagagagccgcgcttctcttgtgcctctgtgtggaaaccagggtaagcgattggcgtttctttagcatcatcttgtttggtttatgaggaaataaggagcagaggacttagatatgcctaaggtcaagtggcaggatcagaaaatctctggctctaaaacgtgcattgcttctactgtgatgagcttcttcccagaaatatgctgggtggaaaatcaaggccacctgtaggcacactttttattgctggcattactcatgcatccaattttcttaacattacaagcatatgcctgccatgttgacaggatatgtaaattttataacatttacatattaagaaatgtacaaagcagtgtaaatcggcttatatataatagatttttcagctttgatcattggcattgccccaatttctattcctctgcctctgctggtctttgatactactctatagtaattaccatctcccctcaaaaaaagagaatggaacatgatatgtccctcctccaaaagttctcatatcctcctacaactgaataaaatcggaagtcatcatcctggcctctgagtccccatgtgatccaatccttacctacctctctgccctcttttcctgcctctctctctccctctcagctacaatcatcctggcctctttgggatcctcaaacacttcagacatatgccctgtactcagtagtgaatgccagtgtctacagcagtaatggcacatggcacatgcttaacacatctcagctgagcaaatgagcagtgagcaggcacatacgcttggtgttgagggaagcccggtgagttagggctgacaagaggctctctgtgccagaaacataggctgcctgatagggaaaaacagaagggagtctcagcagaggttggctctggtcaaattttgagaagccttgttacctttacaaagggggcaggagtttagccttaagataatacaaaagcttggctcatctattagattcacacaaacaagagatcaaagccaatgttaataatttcaaggatataagcaacccataagtatcagcaaaacgaggtgcagtttagggctgttgcgtagctatccgaggtcttcctcctcactctgcacacacctggcctaggctgacaatggagacctcccagtggtgtccacagtgatgtcactcagacagaagggggagatcggtcctcaagcacctctgttttacattcagagggttacacagcagatgggattttcctaggagccatgccccatacattcacacattctagctgatgggggtgtgccatcagctatcctgggcaacctactaaaagcatgagctagacaaggccacgcccaccagcaggtacagagaggtggcatgagtgagctgacagaaggtgaccccgagtcacgtccctttctccctgagctgctcccaccactcccctccaacactgggagagaacagattgtgagcaatgggtatgtcacaagcctaagacaatggggagtgccgaaggctttgacggggtggggacaggggtagtgatgggctctgacagtgtttcgtggggatgtctctatcagcgcctgaagagaggcactgtttcaggttcctggaggggagggctgggttccaggtgtgtcccactctgctgtaggattaaaaccacagcctctccataaatgtcagtcaaagtgattccaaagtaatggggagattcagttttacttttacaagtccattatgaaataaatagcaaactcagtaaggcagggggcttagaaattcaatatgaacacaaagagaacctcgcacccttttttgtggtgggaagagatttgtctgcaggctgcattcatgaagatattgattggtttcattcacttcactattcctcatagtggagtaccggatgtaacattacatgcaatgaatactttcttgagtgagtttattaagtgaatactcgcacaagtttttaaaagcatactaagctatttaagaatgagagctgagagagttagaagtattcataagacggacggcaggggtgagttttcaggtatatgtgcactcacagaaattactaagcaccttagtggggaatctttaaaagcagaagagccattcccgactggttttagagagcaatgggcaggatatctatcaccggctgtgacaaggctggcttggtgaagaaagaaatgtttggctgactcagctgcgaccccctgatgtctaaagagtaagggcttaagaagatcataaaggaggaaattataatattcaacgtgggaagtgactcaggcatgaataatgatcaaggtaaggatggattttggaaatgttccaaagatggtaataggcaagtggacacaagaaatattcacatgggaggaaagagaaatatatgttttagcagtaacaatattattatatttccctattgcaacttacattaaaaaaaaaatgcaagcaatgagccaccaggagagagaaataaaaatgcaaaaggcttgaatgcctttttcagagtgaacactacctatggaccgaaccagaagtgcagaagacgattgacaatcactcgtgctcactaattaccctgggctgcccctcactgagattcatcctccgccctcttttgcacccagggagtaacccatatggaagacactgctgggtgataccaatgggtaggcttgggcctccagctccccacgggactctgccagtgggagttcctgtcaggagaacagagggctggatgggcttgggttttccttcttgcgtctctgcattgtaccatattgctggccgggcgcagtggctcacgcctgtcatcccagcactttgagaggctgagacgggtggatcacctgaggtcagcagttggagacaagcctggccaacatagtgaaaccccgtctctgctaaaaatacaaatattagctgggcgtggtggtgggctcctataatcccagctacttgggaggctgaggcaggagaatcacttgaacctgggaggcggaggttgtagtgggctgagatggaactactgcattccggcctgggcaacagagcaagactgtctcagaaaaataaataaataaaaataaaacatactgctgctggtgcctgtattcctctgaattcctttgaaactctagcttgtgataagtggcccctgctccacgactccacctcttactgagcacagcaatgctgttccctccctttatccctccaggcctcaggagtgtaagggctttctgctgctgctgacctccaggcacagccatatggctgtttctcctcctttaacctctctaattattctcttcactaaaatcatgtctgatctggaaatggcaaatgtctatctagggctaaaagcagaaatcagttgttcattggctttgaaaagcttattagagcaatcctgttatttgattttgttttttttttttaaacagggtcttgctcttgtcaaggctggaatacattggtgtgatcacagctcgctacagcctcgacttccccgacttaagcaattctctcacctcagcttcccgagtagctgggactacaggtgcacactaccatgcccagctaattttttatgtttttaggagagatggggtttcaccatgttgcccaggctggtcttggactcttgggctcaagtgatccactcatctccacttccgaaagggctaagattagaggcataagctactatgcccaacctgattttattttccccttatacagccacaaaatactgacacatttcccagctctggttgtttttttctcctttgagcagtgaaaattaaacagaaaaaaaaattcacactaacatcattccctcatggttcactttctcatgtgaacccagagagtaaacagtacataggaagctttaataatgaaatgttttcaatgacttctcagagggataaatatctccaagcactgtcagaatgaagaactgcaggggtttaagctccaagatgagatgtatctgtccaaaatcttttatttgtttgtttgtttttgagatggagtctcactctgttgcccaggctggagtgcagtggcacgatctcagctcactgcaacctctgtctcctgggttcaagggattttcctgcctcagcctcctgagcacccggggttacaggctcacaccaccaccctcagctaatttttgtatttttagtagacacagggtttcatcatgttggccaggctggtcttgaactcctggcctcaagtgatccacccgcctcagcctcctaaagcgctgggattagaggcatgagcctgtccaaaatctttatgaatagaaacaatgctaactgtaatttccaacatctttttccttctcagaattctctactggttaacttggtcagaacgcagagttttggatagatgcgtcaaatccaaatacactttggggcaaatgaaatattccgcttggtgtaggtgaatgtctgcattaagatcctcctgtatgtcttcatcagttaaggttctttggttgcaagcaagagaattctatataaagttgtttaagaagtctaacatgagaatataggactactacattatggaatctaaggtggggacataggggcactccaaaaacaactaaaatttggagctccaaatgggcagggctctctccctcctcatctctgctccctccagggaatcacttcatttctctctttctctagcagctccttctgttactctaccttggaataatatgcctgccaaatagggtaacgtgccagcctgccttcattccttcagaaatatatatggattgcctatcatgtgctctgtaatattctgggagctggaactagtataggaagagaaaaaggaaaataacattattgctctgtgaaccttatcttccagtggaagagacagacaatactgaaaaacaaaaaacatatgcaaaatattgcacttaatttacccttataaaacaaataacataataaaagcagatagtagcatgttgaaggttcacgtggtctttgcatttgtaaaaccaacatccctggaaagaggtgaagaggtgaggggtggcattactcagaacagaaacttgttgaaccaggggaatgaacataacaggatcagaaattagtacataaaaggaaagccatgaatatgagataaagtatgcttcagctactctctgtgtttcagtaatagaaatgtgatattctaccagttgattttggccagtgagataaatgatgacacaggcaagatcaggaggacacagaattttgacaccctttcccccatagggacacatacactgagtgcacagatggagtggagtcccagtgtgagattccgtcctagggccccagtaatgggcatcttccacaggctggtgacatcattagggaaatgaaattaaacacatgaacacgtgttctgggacagtggaaacatggcttgggaaagtccacttcagagggtctttaggttaaatatgaggaaggaatttaagtagaaaacacagagtaagaccgtatgaggcagagtcatggggcgattaaggagttatcctggccttgagggttcttaacgttcccccttcaatcagttacctccaacacatactctgagcagggaggcaattcacctgacctcatctgtcccccacttcagtcggttacctccaatacataccctgagtggggaggcaattcacctgacctcatctgtcccccatcagtcagttacctccaacaaatacccctgagtggggaggcagttcacctgacctcatctgtcccccatcagtcagttacctccaatacataccctgagcggggaggcaattcacctgacctcatctgtcccccacttcagtcgattacctccaacacataccctgagtggggaggcaattcaccggacctcatctgtcccctacttcagttggttacctccaactacataccctgagtggggaggcaattcacctgacctcatctgtcccccatcagtcagttacctccgacaaataccctgagcggggaggcaattcacctgacctcatctgtcccccatcagtcagttacctccaacaaataccctgagcggggaggcaattcacctgacctcatctgtaccccttgtctccagctggcttgaggcgcctctagcctggaggaaactgctcagtctatggatggcttagtaagctgcctagattgctaacaattgtgtagactgcattctcagttgctctttctctacccttggctgctaccacagcaggtaaaacctgcccaaagggacctggatggggtctaccttagacagaatgtgatatttacgtccctcgttcaacttttgataaacacaacatggtattaggtatatatgggcatcactttaggcacaatgacccgcttttcctccttcccccgtccaaatggaaaaagagaaagaaagtgtctaattgctcctgggctgcattcctctgcgataaaagaaactacacattcagtttctgaacagcccaaatgacccaaaagcttaattgtatttgtgttattatgcatttaattcctgcaccgatgaccccagtcctttgtaggtacctgataaaccatccaccaagcagtaatgaactttttatgacggattccagtggattacaagaaaactgggcaagtaaaatgagcttcgcttcaaaacattgtaatttcaattataacagtctttacatctttcctggtctgtctttagtctcccctgtaaatgaggataaagtttgagcaccttttgtctacgataccatacataaagaacagaatcttgaaattgcagcatcaagacaagatttattcccaggctatagaaaaaggtgcaaaatgaaataaagcttctaggattcaggggaaattcatatttaaaatgacaaccaaagtgaaaagcatttcacagagattgaaggactcacgatctatcccctcagattagaaaaaggaggcgggagagagagaaatggaagtttacttagacgatcctaaaatacaatctcatgtctcatgatttctgaggctgctaagaaaagtagcttagggaaccaccctgcaatttctcttttgaaaaaaaaaatctgattctatcgcagagatgtgctcatttctcatcttaaaactttctaaaacttccaaatttccagaatatcctcatagaaatacatgggaacaattattaaaagttaacagcagatttttttaattttttttatttttttttgagatgggtgtcactttgttgcctaggctggagtgcagggtgtgaccacggctcattgcaaccttgacgtccctaactcaagcgatcctcctgcctcagccttctaaatagctgggcctatagatgcacaccatcacgcctggccaacttttgtaattttttgtagagatggggttttaccatgttgcccaggctggtcttgaactcctgagcttacccaatccgctcacctcggcctcctaaattgctgggattacgggtgtgcaccaccatgccccgccagcagcagctcctaaattcaacaggggataacaaccatgtgagggcttgtcatcatcactatcttgggtgtcatcaaaactggctcctaaaaatctaggctcagaacaaaatcctcaaaccgttacacattcaagtcctccatctgtgaaatgaacatcccagacttacaatacccattcccaatttctgtgacttttttttttttcttttgagagatggagtctcgctctgtcgtccaggtggagtgcagtggcacggtctcgactcactgcaacctccgcctcccgggttcacaccattctcctgcctcagcctcccgagtagctgggattacaggcgtccgtcaccacgcccggctaattttttgtatttttagtagagacggggtttcactgtgttagccaggatggtcttgatctcctgacctcgtgatccacccgcctcggcctcccaaagtgctgggattacaagcgtgagccacggcgcccggccttctgtgactttcttaatccaagttcgctaccattgctaccatcaaggttgaatatcaatcatcagacaatagcttctcaattaggcatgctaattacttagctgatagtcagaactgcagcatgctgtataggactgcacatggcagaagcccagcgtcaaccagtttaagcaaatacgtattattgactcatgtacatgaaaagtcttggaaaaatattgacttcgggcataactagatccaggtgttcaaacatggccataaggattctccacctctcttttaatttgtctttcctctgtgagtacccttttcaggcagagagcaatgctatatgatatcaaattaatctctagaagcctcaagtttctattctaccagctccaggtagaaaaaagaaacagaaagaaagaaagtttattccctgcaaaagttctggcattgatattcattggacctaaatatatcactcactcgtctacagaccaatactcatggccaggggaattagctagatttggatcatgccactccctcccctagagtcagatggtgaggttagctctaccccaagaaaatgaacagaacaatggggagctgttgttcccaggcttatttatttgttcgtctgtcctttgccactagaatgtaaccttcatgagggcaagaaccttgactgtctatcttattgctatatctctggtatctgcaatagtacatatcacacaataggtgtccaataaatatttaacgagtgaatgaaaaggggaatgagtgctggtcatttaaaagtcatagatgctcagtactgcagaaaatttataacctcgcagtaagaatgaagattcttgttacagctgacaaacctgtacttccttccaggtcacagaggctaagtcaaagtgattttatattatttactattttcttggcacctttaatatttatatgtcacatgtagaaagtcgacagaagaaatctaaagagtccacaaaactatataagaagataaaaacccaaagaagcaaatggattatggatagagtattctgaaagcaggcaggaaaaacaaggtgcttgtatctttgtttaggggactgggtgttggagactctcagaaattaggaatttaagctgaatgataaaggatgagtatattttgagagagaaagaagaaagggaagacattccaagcaaagaaaaagcttatgtaagtacacagcaactgttttttaaacaatttaaaacattttattcacatattttaaatctagaatctgcagtcatttatagattgcaaatcacagcaccataatttagtccccacaggtcattcatcctgtgaataatatccataataatctagaaggttaactttttaacctactttactaatttattaaggatggagtttaaacacaggttaaaaacaagatgggagacaagcaaaaagattgaccccaagcttagggaacaattattcttctctctgcagttacatctgagcatctaataattatttcttcatttctttcacttttgaaacacaaccttccagattttcctcctcctcctcatcttcttcttatcaccatcatcaccataatcactattgccatcatcatcatcattactgtcatcatcatcaccatcatcactattgtcatcatcatcactattgtcatcatcatcattattgtcatcattactgtcatcatcatcactattgtcatcatcattactgtcatcatcatcattgtcatcatcaccatccccctcatcaccattatcaccacaaccatcatcactgtcaccatcactgccaacaccatcaccaccctcatcaccgtcatcatcatcaccatcaccatcatcatcatcctgtaattcttcagttgattctcttatgtccttcgagaattccaaagtttccatacctcctaaaaattcatctgaaagtctatcgatttagggaggattccttcttttgctaccttgtagaatagtgtcagtaggattgataccaattcttctttgaatgtcttgtagaattcagctgtaaatccatctggtcctgaactattttcttggtaatttttttattaccatttcaatcttgctgcttgttattggtctgtgcagggtatctcattcttcctgatttaagctgggtgggttttatctttccaggaatttatccatctcctctgcataaaggtattcatagtagccttgaattattttttgtatttctgtggtgtcagttgtaatatcctctgtttcatttgtaattgagttcatttggattttctctcttcttggttaatcttgttaatagtctatcaattttatttatcttttcaaagaaccagctttttgtttcatttatcttttgtatttttttgtttcaatttcatttagttctgctctgatcttggttatttcctttcttctgctgggtttgggtttgttcttgtttctctagttccttgaggtgtgaccttagattgtctgctgtgctctttcagacttcttgatgtagacatttagggctatgaactttccccttagcactgcctttgctgtatcccacaggtttttataggttgtgtcactactgtcgttcagttcaaataatttttaaatttccatcttgatttcattgttgacccactgataattcaagaacaggttacttaattcccacatatttgcatggtttcgaaggtttcttttggagttgatttccagttttattccactgtggtctgagagagtgattgatataatttcaattctcttaagtttattgaggcttgttttgtggcctatcatatggtctatcttggagaaagttccatgcactgatgaacagaatgtatattctgtggttgttgggtagaatgttctgtaaatacctgttaagtccatttgttccagggtatagttttttttttttttgagacggagtctcattctgtcgcccaggctggagtgcagtggcgcaatcttggctcactgcaagctccgcctcccgggttcatgccattctcctgcctcagcctcccaagtagctgggactacaggcgcctgccaccatgcccggctaatttttttgtatttttagtagagatggggtttcgccatgttagccaggatggtcttgatctcctgaccttgtgatccgcccacctcggcctcccacggtgctgggattacaggcatgagccaccacgcctggcctgttccaaggtatagtttaagtccattgtttttttgttgactttctgtcttgacctgtctagtgctgtcagtggagtattgaagtcccccactattattgtgttgctgtctatctcatttattaggtctagtagtaactgttttataaatttgggaactccagtgttaggtgcatatatattcaggattgtgatattttcctgttggacaaggcttcttatcattatataatgtccctctttgtctttttaaactgctgttgctttaaagtttgtttcatctgatacaagaataactactcccgcttgcttttggtgtccatttgcatggaatgtctttttccacccctctaccttaagtttatgtgagtccttatgtgttaggtgagtctcttgaaggcagcagatagttggttggtgaattcttatccactctgtgagtctgtatcttttaagtgaagcatttaggccatttacattcaacattagtattgagatgtgaggttctattctattcatcatgctatttgttgcctgaataccttgtttttttattgtaatttttgttttataagttctgtgagatttatgctttaaagaggttctgttttgatgtgttttcaggctttgtttcaagatttagagctccttttagcagttcttgtagtgctggtttggtcgtagcaaattctctcaccatttgtttgtctagaatcaatattgtgaaaataaccatattgccaaaagcaatttacaaattgaatgcaattcccttcaaaataccaccatcattcttcacacaactggaaaatacaatcctaaaatgtatatggaaccaaaaaagtgcccacatagccaaagcaagactaagcaaaaataacaaatctggaggcatcacattaccctatttcaaactatactataaggcgatagtcaccaaaacagcatggtactggtataaaaataggcacacagaccaattgaacagaatagagaacccagaaataaacccaaatacttacagccaactgatctttgacaaaccaaagaaaaacataaagtggggaaaggataccatatttaacaaatggtgctgggataactggcaagccacatgtaggagaatgaaactggatcttcatctctcatttttatacaaaaatcaagagaagatgtatgaatgactaaatctaagacctggaactacaaaaattctagaagataacatcagaaaaactcttctagacattggcttaggcaaggatttcatgactaagaacccaaaagcaaatgcaataaaaacaaagacaaatagctggggcttaattaaactaaaggcttttgcacagcaagagaaacagtaagcagagtaaacagacaacccagagtgggagataatcttcacaatctacacatctgataaaggactaatatccagaatctataacaaactcaaacaaattagcaagaaaaaaacaaacaatcccatcaaaaagtgggctaaggacatgaatagaaaattctcaaaggaagatatatagatggccaacaaacatatgaaaaaatgctcaacatcacaaatgatcagggaaatgcaaatcaaaaccacaatgtgataccaccttactcctacaataatggccataataaaaaaataaaaaataaataatagatgttggtgtggaagtggtgaacagggaatacttctacactgctggtgggaatgtaaattagtacaaacactatgcaaaaaagtgtggagattccttaaagaactaaaagtagaactaccatttgatccagcaatcccactactggatatctatccagaagaaaataagtcattatatgaaaaagatacttgcacgtgcatgtttatagcagcacaatttgcaattgcaaaaatgtggaaccaacccaaatgatcatcaatcaacgaatgcataaagaaagtgttgcacataaatataatgaaatactcagccataagaagtaatgaattaatggcattcgcagcaacctggatgagattggagactacaattctaagtgaagtaactcacgaatggaaaaccaaacatcgtatgttctcaatcataaacaggagctaagctactaggatgcaaaagcacaagaatgacacagtggattctggggactcaaggggaaagggtaggaagggggtgaaggataaaagactacaaattgagtgcagtgtatactgctcggttgatgggtgcaccaaaatctcacaaatcaccactaaagaacttactcatgtaaccaaacaccacctgttccccaataacctatggaaacaaaaaacattaaaaaatagaaagtctattgattttcatgtctaacactgtatatgttagacaccaaaactccaccacatattctatttggtccactatcaactcagcatcatggcctgcagactatccttcttttgtgtactcctgagtatacaattccaacccatcagatttgtgataagctgatttatcctatctttaggaagatgggaacagcaatggaagctctcactagatttgggaacagctggcagttatgatggaatttatgggcaaaacatgttgaacagagtattagaatctagactgtaaagcgttatcaatattgtgctatagagtttaacttatattataaaatactctctacaagttatacaatccattgaaaccatcatgctttggaaattttttcaagtgtaagcatggaagaaatatcttattaaaaaagaaactgggaatatttgtggagaaaataaatgtggttcaacagcaacagtggcaacaattaggcatgaattgtgtgctagctgaagcactggataagtgaaaatacaaaagtataaagaaagcagacaatgactattagctcttatttgtaaaatatttgctcttctccttctcttcctcttcctcctccttctcgttgcaaacagaacgtatcgcagaagagaaagagactattcaaattctacagctaggacatcctgcctcatgaccgtaggaaaatttcttcgtttcttgtccttacatttcctccccataaagaggaaataagaatatcgatctcaccagattattataaaaattaaaggagctattgcatatatcacacttcttgtaaatgtatcccccaaaatacacatactgaataaactaagagtctcaaaaaaaatcaatgagtaatcacatattaaaaaaatgagtggtgaatgctgggtctaagggggatacgcattgatgaaaattgcagtgtgatttctcctacgtagggaactggactccattcccactgatggttgctacagcatgacagacccagtgttgcagatcttatcattttgcatgagaagccagagatctacatttggatataaaatgtcccaatttgaaaacatagtgtgggtgaactaaaatgtatctgaagacctgatctggcctgcagttcaccatattgcaattcctgattacacacattatttactgaacctaccactttgagcaattgagccaattgaatgattcagaatgcctcagcttgctgtgcagaaatgtagaaagctatgccagctgaaattttctgaggccacttttagagaaacttgttctctcctacttttctccaaagtgccattctgaagtctcagaaggtcaatgagggcttagtgaaatattaattcactttcaagttaattttattaaatttattaaattaaatttattgaatcacaatttacaaataataagtgcacaccttagtttttaatttttgtgggtacatactaggtatatatgtttatggggtacatgagatattttgacacagacatgcaatatgtaataaccacatcacagagaatagggtgtccatcccctcaagcttttattcttcatgttacaatccaattatattcttttagttattttaaaatgtacagataagttattactgactataatcaccctgttgtgctatcaaatattaggtcttattcattctttctattttttgtatccagtaaccatccttacctccccttctgcccccaactacctttcccagcctctggtaaccatccttatactatttccatgagctcaattgttttgattttctgataccaaaataagatggaacatgcaatgtttgtctttctgtgcctaacttactcacttataacacaataatctctagttccatccatgttgttgcaaatgataagagctcattcttttatggctgagtagtactccgttgtatatatgtacctcatttcctttatccattcatcgctgatggacacttaggttgcttccaaatcctggctatcgtgaacagcactccaagaaacagaggactgcagatatctctttgatatactgattccctttcttttgggtatataccgagcaataggattgctgggtcttatggtagctctagttttagttttctaatgaacctccaaactattctgcatagtggctgtattgatttacattcccatcaacagtgtacaagggctcacttttctgcatgtcctcactagcatttattattgcctctctttgggataaaagtcattttaactgtagtgagatgatatctcactatagctttgatttgcatttctctgatgatcaatgatgttgagcacgttttcatatgccatttgtatgacttctcttgagaaatgtctattcaggtcttttgcctattttttaatcagattattagattttttccctatagagttgttagagctccttatatattctggttattaatgctttgtcagatgggtggtttgtaaatattttctcccattctgtgcattgtctcttcactttgttgattgtatcctttgctgtgcagaagacttttaacttgatgtgatcctatctgtccgtgtttgctttggcgtgtgtgcttgtgggttagtacctaagaaatctttgcccagatcaatgtcctagagagtttccctgacgtcttcttgcagtagtttcactgtttgaggtctcagatttaagtctttaatctattttgatttgatttttccatatggcaagagataggggtctagtttcattcttctgcacatggataatcagttttccaaatccatgtacaattgtttaagaaatagtcttctccctgtagttgtattccagcgtctaataattattttttgccatttctttcagcacaatctactgaagagactgtcctttccctaatgtatgttcttgacaccattgtcaaaaacgagttcactgttggtatatggatttactttcaggttctctattctgttccattggtctgtgtgtctgttttaatgccagtaccatgcggtttaggttactatagctcagtagtataatttgaagttaagtaatgtgattcctccagttttgttctttttgcttaggatagctttgggtattctaggtcttttgtagtttcacataaatagcgcacccattttaagcatatagttggccgaactttgataaatgtatatagtcatgtaaatacatcataatagtgatataaaatatacccaccaacccaccaagttcttttgtgcacctgtgaattcaattcccttctcttctctggtctcagtaattcctaacctgccttctgtcactattgattggacttcccttctatagaatttcacataaatggaacagtacagtacattatcatttgtgtctggcttctttcagtcagccccaattttttttgcaatgcatctgtgttatgtgcaccagtgtgtcatgcctttttatctttgaatcttattccatttatggatatatagaaatttgttcatcaattcacctgctgtggacacttgggttattgtgaaacaactactatgaatgtgcaagtataaggctttgtcagtcttttaaaatttagccattgtagtggatgtgtgatggtaactcattgtagtggacgtgatagtttaaatttgtatttctttcacagccaaaggtgctgggagtcttttcatgtgcctatttgccatctgtatatctacttttgtgaaatctctgttcaaatatgttgcccattttttaactgggtcatttgtcttctattctgggtatgagtcctttgtcagcattatgatttgcaaatatttcctcctgggctgcaaaatcagttttaatactgaaaacaaaaatattctgtggtttatatattgttttcacttttatcacctcattttatccttagaaaaatcttgccaagaagggagaagacattttataccttaatgtttcagatgaggaaaataagactcagaagaaagttgcccatttaatgtcacacagctgttaaataataaatatgggatgactagctacatttacagtgtgtttaactacccagaattcacccacttgcatgtaagctctatgaaatgtaggcatttttgttcttctgttttttgttttaccgtacagcatctgcagtgcttagaactgtgcctgacaaatggtagctactcaaataattcctgattaaactcctcttttcctaataagaccatgatccaactggtagaaagctgcctcttaccccactactttctgagtttcagtggctctcaccctattcctgtgtctccggcatgcacctgaattgcagcaacaggattggcccagggagaggcacaggacaaaggctggtgtcatcagagtaaatctcaagatttctggaggaactactggagagagactttgtagtgtcttttttactgaactcaaaaatgggacagtttgatgtcagaactgttgtattccatttatcgtcaaaagagacgagcccttcttagaattatagccagcacagagacgaacaagatgacagagagacattgaacattggtgacatcttctaagtcataaacccagcaatattgtagtgtaacaaaacagcataaatatttattagctatacagtttctgagggtcaagaatttgggagcagcttagctggattgttttagctcatgagttatcatctgatgttggccaggaccgtgatcaactaggggctaggtgctctgtttccaacgaggctcacttatgtttctggtcagcttgtgctaactatagcaggagtcctcagtccatccccatatgggcttctctactggctacacgcatgtccacatgtcatggcagctgcctggcttgtcccagagtgaatgtctcaagaaagagcaaagcagaagtagaaatgtagtttaggatccagcttcagaagtcacatgccatcattctgctaggagttcattagaagcaagttactacatctaacccgcattcaaaaggagggttattggactccaccttctgaaggcaggagtgtcgaagaatttctagacgtattttgaaaccaccacaccagccatatttgaaggtcagtgtcttagtccattttgtgttgctagaaaagaatatctgaggctgggtaacttatagagaaaagaagtttatttatcacacagttctgcaggttgagaagctcaagggcatggccctggcttctggtgagggttttgatgttgcaacacaacacaatggagaaggtcaaaaagggagcatacatgtgtgaagaggagaaaacttgacaggctttgtaacaacccactcttaagggaacctaaccactccctcaagaaccaatccagccttttgagggtgagagcttactaccatgagcacagcactcagccattgatgagggatctgcccccataacccaaacatcacccgctagactccatctcccaacactgccataatggggaccaatttttttttaattgacctggaaagatgttcttcacgtagtgggaaaaaaacaaaaacaggtttgtttgtttgtttgtttttgagacagagtctcactctgtcgcccgggctggagtgcagtggcgcgatctcggctcactgcaagcttcgcctcccgggttcacgccattctcctgcctcagcctcccgagtagctgggactacaggcacccaccaccacgcccggataatttttttgtatttttagtagagacggggtttcaccgtgtcagccaggatggtctcgatctcctgacctcatgatccgcccgtctcagcctctcaaagtgctgggattacaggcgtgagccaccgcgcccggccaatggggaccaatttttatttttatttatttatttatttatttatttatttatttatttatttatttttttgagacggagtctcgctctgtcgcccaggctggagtgcagtggcacgatctcggctgactgcaagctccgcctcccgggtttgtgccattctcctgcctcagcctcccgagtagctgggactacaggcgcccgccaccacgcctggctaattttttttgtattttcagtggagacggggtttcactgtgtcagccaggatggtctcgatcccctgaccttgtgatccgcccgcctcggcctcccaaagtgctgggattacaggcgtgagccaccgagcccggccaatggggaccaaattttaatatgaattttgatgggtgcaaacaaaccatatccaaccgcagtaggctacttcaagactttttgtttcctgcacccataattctatcgctgccaccaccaccaccagcatctccattacatctttttcttcatttcttcttttttctcccttgaataaactagttggagctggattttctgtcactttcaatagacagagagactcttaactgatatagaaatcaaaaatatatcttctcactctaactgtagtgttcctactgataaaccacagctgacaaattatggtctgagttttgacattgaagggctagatttttatgttgcgtgtagagcacaggggattcttagaacatcaatagtatgtgcacccatctctgatcatgctaacctcagtgaattgaaatgatttatctgtgcatgtgagctgaatgaacatgcaggactgttcattcatcccgaacattcatctttgcatccttagggcctaacaaagtgtgtggtgtaaattagatgcctaatatacatttgctgaacaggagagaacggctgcaatttcactgtgtgaaatgatcattgatgtttaagatggttagaattttgcttttatgatccattctcttgatagctatgatttgtctgaagctgaagccctcaggaaggaatgcaacaccctccaaccccctgaaattgcagcactgttcctatgggaaaatagagtccagcgtaagacaatatactccatgattagtgatgttccagaatgcctggtgatggaaaacaaggactgcctataatagaattgctctttagtcattcagagagactcatttaatcaaagcctgctagcataaactgctgctttacagcatgaggcccttctggaagaacattaactcttgcatctccccagagccccagttcagcatatttccaatcaatatttgctccgtaagcactgtgtgtacaggactagccattttattttacttatttcttaatctagatgcccactgactttcccagaagaaaccaggcaaccacagacttaacgttccccagaaatcgaaacgctgtgtcttgttgctgtcggtacactggttttcagctctgcacggttttttgaactaatttcagaaaagacgttttgtacacatacctttccccacatattagttacaaataaaatgaatatgaatagataaatgaatgaacaaatgaatgaacaaattggtagggcactaccaatgtgattgaaagttgacatttcaaacccttctggccttataaaatcttagagtgacttctattactgaatgtggtcatgatcctagggcccagaacataatcccccaaaatatggaactttggcgattgggaatactgcagaagcagaagcagcagcaagaatgccactatgacctcctcctcccattctcccctgagccacggtcataaaggaattctctgacctacctctccagagagaaggttgtaataccctcattccagaggggtcctgccctatatctgaaggccagggggaatctaaacaagcagtcttgctatatccccaaccccattccagtctattaccaacggaccatatccccttctgtccaatcacctttctatgtaactgtccattcctcattgaacccatgcataaagccacagttttccctgggtctttggatttttatttctgaaggctcccgtgacatgtaaaaccttggttaaataaattcgttatgcttttctcttgttaatctgtcttttttcataggggtgtcagccatgaaccatgcagaaagtgaggaaaagatattcctttctctcccctacaatgacattgacaatcagacaagaaccacgcaaggtgcttttcatgcattcacttcctccatcctcaggactgctggatgtgtcataattacatccattccatgtgtgtggacatcaagaggctacacatcctagacaattgcacagctgattggtagcagggcatggacttggactcagaccctgtgaacccacattaacattcacttaatcatttcactttcctcactccaggggatctgacccaactccaaaagtctataagtgcaacgtctgactgagggatccagctctgaacctgcctccccagtgtttgaaacctagttccaccatgtattagtctgttttcatgctgctgataaagacatacccaagacttggtaatttacaaagaaaaagaggtttaatggactcacagttccacgtggctggggaggcctcacaatcatggcagaaggtgaaaggcacatcttacatggtggcagacaggagagaaaatgagagctaagtgaaaggggcttccccttataataccatcagatctcgtgagacttattcactaccatgagaacagtatggaggaaactgcccccatgattccattatctcccactgggtccttcccacaacatgtgggaattatgggagctacaattcaaggtgagatttgaattgccaaaccataacacatcatcactgcagaactgaactaaggggatgtactaacttctgatggctactgtaacaaatgaccacaaatacagaggcttaacataatgtggattgactccttatagttctggagatcagaagcctgaaatcaaggtgttggccaggctggttctttctggaggcttcaggggagaatccattgccttgcttttttcagttttagaggcttccacattccttggctcctggccccttcctcaaatccatcaaacctccagttccattaccacatctcctacttctgacaccaaatctccctctgcctctctctcctctgtaattacatgggacccatcagattagtctcatctggaggttctcaacttaatcacatcttcaaagactctgttgccatgtaacctatatattgacaagctatagatcccggacacaggcatatttggggtgagggtgagggtgggagtgggagtgggaggtattattcagcccaccacagaaagtaatgtaagttacctaaattttgctgggactcagcttcaagatccatcaaatggtgatgatattttttttacttacccttagcattaggagaatcaagttggttaaattgaaacaagctctaggtaaatccctttgaagaagctggtacatatttatctattaacaaatgtgatgcattagtactcagattaccagttcaaagggtctaaaggtagatataatacttcaacgaaaaggggtgagtcagagggtctgaggcgtgtctacagataaagggggtgaggaagacagagaagccagggccattcagtggggaagacattagctgcctgctgttcctacagttctctgggatggcaactgctgacccctgagtggggtggacccatgggagcatatttaagggcgtcaagctgcatcattgcctgatgttaaaatagcactggacaataaaaactacatgaaattttccttccccatgcaaaattcaatccacatcttctcgtaaatcctgcctgaggtttctgatacagtttcttaggctcataagcccatctcaaggtcattccaaaattagtttggaggtagttttctatgtggcaggcatggttgaataaggaacaaggagaaattatgcttggcttctttctgatgatatttatgctgtaaaagaaaattcgacttctaataccatccactgccttgaaacttatcggtgtccttagtttctttgtattattttaatatacagcctaagattattgtacaatagaatggattcattctaatttacctggcaaaaagatagtcacttaaatgccaacacaaaaatgtattgatgaatataactacaagatcatcacaaggcaataactttcaaagaaagttttttcccccctaaggaggataaacaatttcattttctaataccttgacagttcccttcatgttaacctcaatttcatagttgaaggaaatgcatagtttttctgttgtgagtttataagaacaatagaagaatcaaaacccctgcatatatttttctaattaataaaactaagtcatgcttattgcagtagatttggcaagtatcaacaaatgaaagaatgagactctaagatcatgagaacacacattttgtttcgtttgcctttggtgtcctcctatacagtacagtgcctagcacatggtaggttctcaaaattttatggtttgaattcaggaggaaataaatatcagtcacaatttcactgttattaaaattgtgttctatttcacttttagcctcttgactatattgtgtgtgtgtgtgtatatatatgtgtgtatatacatatacacatgtgcgtgtgtgtgtgtgtatatatatacacacacacacacatatatataaaaatatgcacatataacattttggttattaacaaaatcaggttgctactctatatgttttatttcatgccttttttaacataccagtaaattgagagcatttcctcatgccaataaatcttttaaaacaccattttgtcagctctgttacattttgcttgtgaaactgctatagttatttaatcatgcctgtattcctagcacttaaggattctaattttttctattatcaataacaatgtgaacaccgtgcttaggtataatactcctgattatttacttaagataaatcctaaaatgtagaaacaaaaggttattaaaaattttaatgaaggttggcacacactgacatatctcttttctacataggaagttctttgaagctttccattggttacaattccattcatgtgaagtttgaatagaatacactttcccagttacagcccaaggaggttttggcttttacatgttaaagatactttttccctttaattatgtcttacctgttttaagaaatccgagctccttttaaggaaggggttattagtctggtgtggatggagttagaattcagggctctatgaacttggctggggaaaaacagccctttatttttcctaccctggaactgaaatttagcacgtccttcaatgttgaacctcggggactaccagagtagctgtgacttttcgccaacagaagccacagtgatcttcatagtctattggatttgtaaaagatatttcaaaatgtaccctgccctgaacacttacttgaaatcacagtagttattacacatgctgctaggctttgttttcagagttttattaaggaagctcataaaataccttatcacaatttagaaaatgttttgaaagccgcatttcaatatagctgcattcctcaggattcctaagaattttattttaggaaattaaaaacattattctgaggaaagattcataaatgtcacagaattgtcaaagcaatctatgacaccaaaaacagataagaatgcttttttttttttctttgagatggagtcttactctgtggcccaggctggagtccagtggtgcaatctcggctcactgcaacctccgcctcctgggttcaagcaattctcctgcctcagcctcctgagtagctgggattacaggtgcccaccaccatgcccagctactttttgtatttttagtacagacagggttttaccatgttggccaggctggtccccaactcctgacctcaggtgatccgcccgcctccgcctcccaaagttatgggattacaggtgtgagccaccgcacctggccaagaatgcttgttttaaaggtatcaaggaaacaaccaggagaaaacataaatttcccatataaaatacattttgcaacttataaagggctctaggaatatgatgtatgtgcacatatatgtatagatagataagtatcttgtacagtactgtttttgttagtgtggggcatctgtcaccataggtgtgtaagacagtgttcagtgaggccgaacttgatttttggtgggtgtttaagcagaacagacattaaataatcttagggcctcccaactcccctactctctttccaactgtgcgtttagctggagagaacaatagtacacagtgaaatgcttaataccatgacattttgctttcaatccattgattctcttaaggagaaaggcttactctggggtgcatacgtctctaatccttctgtaagacctcccaactatctgttctaacacagaagaaaaagccccagaactggctgcaaacaatagtctccacatggaattcattagtagtgactcctttcattatttgattttcacaattaacttctaaatccaaattgtcctagtttttccatttttataacttccctttggaatacatttacttgaattcaaaagtaaaaggagttaaaggagcatgtaagtgaccctgaaagtttgatgtagacacgataaatattgtgaaaagattgttattgtcagagtttcaggaaacctggaccaagcttcaccatttttataccttaagccctccaactttttaatgatttcaggtaaaagaatgatcaaggcacgccacgattaagctgtacatgttgagatcatctctgtgtcttgatattaaaaaccaaatccaatcatcctctcccatcagtgctttcagacactcacgtggtctcatttcttttcaagaccttcacacaggttttctgcctgtagatctgctataataaggacctatagaccaaacaaaatgttgctctcatccatgttacacttgcctccaggagtgagtaatcaaaaccacattcagcaagtttcccagactttgagagttgttcaaaaacaatgctgagtaattgtagacaaaaaacacccagtggctgagattgatattgacttaactgaggagatactttcttatatttacacagtcccagttgatgtctcttgtagactttgaatttgatcctgatacaattacatcacatgttggtattctgtccacaaaacagaaacccattttactctggaggattttcgaattcaggttataggaaaggggtcactggtcttgtgatacgagttgaatttacacccagcatctcttttctgtggtagaaaaactggatctacctttaagacaaaagattaagtgtctagaactacctgcatttattaattggaatcatttgtttaaagaagtaaacgtcttcaaaatagcaaggtgaaaaagcttttaacgctacccctgattagaatggctggtgaacggatcatttatttcttctactgctgatcacagagcttttaaatggaagttaagagttccttttagaaaaagctctaaaaggaaaagagcaagtttatatagaaaataaaaagaaaatcaaagagcagttgagaaagaattaaggtaaccaggtacttcgtaacttagtgtgtcccactgagaagctgaaaatctatcaatttaaaatgcagtctagaaactgaatatcagcggaatcatcaacgtgtccccttgtgtctggcttccttcagcgtcacacttcaggccttatctatgttttctcaacgcttctgtcgcttgttctttttcattgctgagtagtattccgttgcttaaatgtaccacggttatttatccctcaccagctggcagacatttgggtgattcacagtttgggctattatggaaacagcaaaattatagacagaagagaccatggcttgcctagaattgggatagaaataaaaacttcatgcaaatgggtaaaagctgattttttttttttccgatgatggaaaactgggttgcagtgacggctgaacaaccaaagacattcttctaaaactcatttaactgtgtgcctaaaataggtcaatttgacagtatgtaatttataacgcaagagcttaacgaaggttctaagtaggaatctaaagtcatatgcccgtattgccagtttctctaactgatgtcagttagtcaccagggttaaaggactaagatgtcaccaaagaaagttcttacactgattgacacacatcatggcaggtgaaagctgtcagaagaaagttgcttttagaaatgatagaaaccaaactgtatatattaatacttaaaaaataagacatcctgtccataagaaacaacacttagaatgaaatttttaggacataagaaagatgatactttgcaccagttggactgtaaataaagcttcttcagatggatcctataatttttctttcatttctttttttaatgttccatgaaatactattatctttctaagctgttccccaggacttcaagccacagatcatccacacatagcatttgttccatcaagctaaacacaccaggggaaactggaggtttcggcaagtttgataaaatactcacggtaaagggttgtcatggagcgtgaagggacagacccgagaccgtgcggcccacacagttaagtcatcaaaggaaatggctgtcgcaaagaacactccctcatcatcaaaaacatcgaagactatttcggagagatgcagaaatctattcgcttgttgacaatgaacacccatcagaaacagtgactgcaaatgttcatgatccttaacaaataaaaaaatactttagattttacggtgtgtgtatatatattactaatacatatgtaaatatagatattggtatggataagatatagatataaatatggatctgtagatatagacaaagctatacagattagatatatatgtagacacagattagatatatatgtagacatagattagatatatatgtagacatagattatatatatatatacatagattagatatagaaaaatagatgtatgtagacatagatatagatacagacatagaaatttttttctctgtaggactgctactgacggtttccatgctcagagaggacactaagggctgcacatgtgtgcatacacacgcacgtgcacacacacacacacagacacacacacttattgaagctgcaagttcagacatgtacatgaagacagatagtagcacatagttttctacatggaatgtcatgtgtcactttagatatttctgccactgcaggtgtttttggtagttccattgaaatgggagctttctctttcctcgaagcaacatctagtggccttcgtaggactctgaaatcacaaaccgacagcaaccaaacatgagccatgatctacaaccccggagtgtattgatgaagcattttgatgaacaccagcaaatggcataatgtaattattgttgctattaggttattatttatgccacacgcatgactcttgtagctgtagcaagagaagcagtcggtattttagtattacagcactctggagatcctatcaaaaagccacggcagctccggctagcaaagacgcgtggcggtaactcagtgccgttacccacgaaaagtggatgttcaataatttaattctaaatttggtgctctacttggaaacagaagatattaaataccagatatatggatataataaaagcaaagcaatacgagggtaaattaaggcaaatctcacactccctcattgctactgtataatgagattgaatgagcgtcaggaaatggtgagtgagtcagcctgaagtctgatttcacagagaatggggttcatcattccccttgactgccaggccatatgcttgaattactgctgcctcctggctgagtttaaatgtttctcaaggaggcaatgtagataagcttacatttactggggcaaaactcagtgctatcttaggaagattctaaagctctattccccacaatgtccagaaaatatctttgcatacttcacctgaacttgcatttctcaaacactggctttgaacaatgagaacacatggacacaggaaggggaacatcacacaccggggcctgtcgtggggtggggggagtggggagggatagcattaggagatatacctaatgctaaatgacgagttgatgggtgcagcacaccagcatggcccatgtatacatatgtaacaaacctgcacattgtgcacatgtaccctaaaacttaaagtataataataaaaaataaaaaaataaaaaggtgaaaaaaaaagaaagaaacagccatgtccttatgccatctatacctgtattaactcagtatttttctctaaaacaacacattgctggggggttctcttcataattacatgagcggtaacatatcgtacatgctactattcaagattttctccccgttcaacattacagtttcaggttaatttcttgctgatatacacagatcaatggcatccctcataattgctgcataaaatttattacatgaacacaactttttaaaattaattcacatcttgatgggcatttaggctgtttttaactgtctgctattaccaaaaaaacggctgcaattacagccctgtatccatctctccagattgatggctaagcttttatctagagcatatatttctagaactgtaatttcagggtcacaggacgcaggttttaaatcttattagccagatactgacaaatatatctctaaagtggaagaaccattttacaaatccccagaagggtataagagttctctgttcttccgggaggcggaggttgcagtgagcggagactgcgccactgtactccagcctagcgacagagtgagactccgtctcaaaagaaaagagttctctgttgtccctcatcctcagaaaaacattttattattttcatatttttttcttttttctttttttttttttttttgagacggagtctcgctctgtcgccaggctggagtgcagtggcgcgatcttggctcactgcaagctccgcctcccgggttcaagcgactcccctgcttcagcctcctgtgtagctgggactacaggcgcccgccaccacactcagctaatttatttgtattttagtagagatggggcttcaccatgttggccaggatggtctcgatctcctgacttcgtgatctgcccgccttggcttccgaaagtgctgggattacgggtatgagccacggtgcccagccggtttttttttttttttttttttttttttttgctaatataattaatagaaatgatatctagtagttctgaaaacaacatcttggtctgttgtatccctaatgcagaagttattaaaacaaacttgaatggaaatgcttctgacagattctaaatttaaacataatggggaaactttgttatcattgatacaggctcggtataccactaatgtgattcatcttgtactttggcaaatttaaatttagactctggaaataaaagcatccttcatggtctaggaggacttgggcatgtgtgctgcatatactacatgggtgctttaagaatctaaaaatgatgaagagatgggtttcttttaatggttctgttgattatttcaaagtgtgtgcgcatgtgtgactgtatttgattctcacaacagtccagggaaggctggcattgttatgccaatattacagaagaggaagttgcttttcctctctggtcatctgccagacagacatcactgcgacgcacagcataaaaatgagaacgaaacatcacattttctggatctcacatttatgttcttcccactctctttgcggaatcatcattcggatggtaatacatacaactgtggtaatccatagtcaatagggaggatatggaaactatttaaggcatcataaatcacagttgcccacaaaaggaaagtcacgccattttgatgacttcataccactgtctcaggtttgtttttggttgggtgatactcagattctgggtctcagaagagctgattgtttcatttagtggataacagcctgctggaaaattaacaagcatttctttaagtttctaacatacacacaacaactgttctggtagcgtgctaatgtgagtttccccaccctattatattgtactgcaaatttctaagggatcctaataaagtgaaggaggtagtgaggtactatgcttttttcatcatcctatggaaatcccacatgtgtattctttataaattgacaaaatagaggttgctggttgccccactcccccaggctgctctttttttcttatttttttcctcgagacaaagtctttggctctgtctcccaggctggagtgcaatggcatgatctcggctcacctcaacttctgcctcccaggttcaagcgattctcctgcctcagcctcctgagtagctgggattacaggcatgcaccaccatgcccagctaatttttgtatttttagtagagacggggtttcaccatattggccaggatggtctcgaactcctgacctcgtcatccacccacctcagcctcccaaagtgctgggattacaggcatgagccaccactcccagcctcttctttctttagaacagaacactgattttgaactgggcacactgctggtaataaatcatgtttcctactttgttttgaagtatggtttggtcatgtgattaagttcttatcagtgagatgcaagagagagaaatagggttgaaaagagcttccaggaaggttgcctaaaaagagtcaacacagttaagaagacccttttctgtcttttcttttgcctgcaatgctgatgcaatgacagacagtcctgaagcagtcttgatctatgaggatgtaagccctccattcacatggtgttgaagaaagaaaggtgcctgggaccctagtgatactggagaactgccattccagctgtggccagccttaagcttcttttatgtgagaaagaaaaaacttctgtcttgtttaagatattcctatttgtttcagaaaacaatctatttaaggctgggtacggtggctcattcccataatcccagcactttgggaggccaaggcaggtagattgcttgggctcaggagtttgagaccagcttgggcaacggggcaaaaccccacctctactatatatacaaaaattagccaggtgtggtggtgcacgcctgtaatcccagctacttgggtggctgaggcagaagaattgcttgaacccaggaggcagaggctgcagtgagccaagatcgcaccactgcactccggcttgggcaacagtgtgagaccttgtctcaggaaacaaaacaaaatgaaacaaaacattcgttttaaaatgaaacgttatttacaaaaaatgtaaaatcagtatgataatgaacaaatagataattatgaaaatagattaaatttatctacatactcttgcctatctataatgtaccagctaaggatagaggctttaaagagatactagcccttaaaagagatgaacttctcttcaatcaagtcttgctggagaacttaaataaatgtaagtttttctcattcaagtatactgatcctcctttctacgtgacacctaaaatcatttacatatcaaccgtggtgagctttgggaaacacttgtctatggagagaactacaaggaaatgagaacatgtggcttttgttacatatttatctaagttaacataggagtatactgagcaagattttgcaaatgcaaaatgcaatttgatggacacagcataattggttatcctgcaggcaacgcttaatcaaaacagatctgatagctggggtaacattcacatgttcatactgttatgatcagattctcagcaacctaacttcttcaaacagggaaggatgcagttaaacttagataagagatcttcgctcactcctggtgagttcatcactagcacaaaagtgtctccttaatacacaaaattaaacctgtcacagtgacttaacttcattaacacaacttcctgatccatggcaaattattagcaatacaaaatctatgactctcaagctaattaacactgcttcttttgcattatgatgatcagattctgacttttaagaataactagaaaacactcaaagagggtagcaggaaattataaagcaaaacagcttctgaagcaaaacctaccaatattattaaaacatctactctataatccattttccaattatccttaagaaaaacacatctcatcgcagtccattcactatctgtaatcacggagcatgatttctctttgtttaattctccaaaggcagaagtaaaatgaaaagtttcaaagcgaggataaaagttgaatatatgaatgaatacatcatattttaaaaatctctattttagttgcagatgtcttatgaaataggtaatacatgcacacagcaaaaaaaaaaaaaaaaaaaaatcaaacagttcaaatggttcactgtaaaaagtaatttacattcagccttttctcccagcttcccagttctctccagtagaaatcgcagttgccagtcctttgtgtagacttcttgggacatagtgtgctcacaaaagtacccttctctgggtttccccaaatgcagcattatacatgcagctatgcaccttactttttgaacaagcatacagaaaaccactaaatatgtgtgcatacaaatttgtatcataatacatacataccagagatatggcctaattctagaacaaattatcaaattgaacaaacatttatagacagcccactgtgtgccagacactgctgtatgagctggagcataactggaaaaagacctgctcccaaaactataagacttccgttctagagcttcctcattaagcaaagccttcctagctgctgtgtaaaatccctacctcaacacatttgtctatcaacaaaacacctgtaaaatgtacatctatatgcatgcatgcatttgcatacctatatcacatatatgtgttctatatgcatatataatatgctgtatgcatgtacacacatataacatattatacacatataacatattgtgtgtgtgtgtgtctgtatgtgtataacctttttccatcatccagacccatagtatgaggaaacatatcctggcctccagaagacaagaagaaaaaagataaaaaaggaaacagaaaactggcatcagaatgtacaaagagataaggaatggtcttcacttagaatgaagaattagggcttttaaaagaagagctttatattctattcagggtcctcgtttcttaaagaagatactgacacagatgaaagaaaaataaatggcatccaccatgcatttctgcatttggatgtcctctgaatgtgctgagattctggaagcctctggaactataaaaaggcagcttacatttcaatgggaaggagccaccattgggcccccccatgctctctctctgtgtccaagatgaactgaactatttgtcagaagttaacaataaaaagggcacaaatattttctaatggttcaactccctcagtctctcatagacaagactacaactactgcttctactaatacataaaaagagatggcaaaagaaatcacaagagaaaatgaaagttcaccggttgagattctttcccctaaatttattattttcttctgataaagaataaacacatctattcatccaccctctcatccatccactcatccatccatccatttgcccatcaatctatccattcctccatccgtctacccatccgtccacccccgtgtccatctctcccaatttttgctaactacaaaacacaaaagaaatattttattgagatagcacctgatttccaaattatattactggtacagatgtgtttcaatttgtgtatctataagttcacccagttcaccagtatggcacactatcactacataaacatatcactacatacatatctaggactgaactcaaatacagattttctcttttccctctcatttgctgtacaagcaaatcttcaagaataaaaaggaaaggcccaaacgagagctgctgataatccaaattcctaaaaaccaacatcgagcaaagaagtacagaaaagaatccaaatcaaatcatccccacattggtttcaaatgctccttgatcataagccaaaaaaaatcataatagttatcagctgagattcctgagctccctgctagaataaataataaaaaataaggatattttccaaacactgagctaggaagtttaaaaatgcactccagaaataatgcatggcatatcggaattcatcctttcattattgttgaaattttcaatagaatcctgagcaaaaagcaacatacaggtgacaaaaatatgtgaccagactaggaaacccccagagccacaaatgagatttcaggaaagtgcaataaaacaagaactactgagtttccgagcctccctttgcccagctgtgaattgattgtttctaatttggtggctatcagagacagattcaggttttaatttctccctagagtgatccacaattccctgcaattctactgcagatagttcactgtaccatcagaaaatgcctgcccgtgaatacaatcatatgcattgtatttaaatatacactgcaaacgtggaatgcacccgtgtgaagagagacgtataggctctggtttctaacacttgcaaaatgggccgtttcatgagacatgcagagtttcagttcctccaataacatggactagaaagaggtcatgttgaagaggaacatggtttgtgggtcaattccatctgcatggtgcagtccttgcaggtgatacggtgctctgctggggttttaagtaggtctgctgtgaataacagcccacctttcccaaatgaaagattccattcatctacctggaggccctgatagaatagacgacacacaccaaatgcaaaccacagtggaaatggttgttagcaatctaggaaaaaaaaaaaaaaatcaggccacatttgcagctgatctgaatatatcggaggccagttgggactcacctgttttctgagccagctgctttcttctgacaaacgatgacagctggtgcatactttccagtataatccgtgcgctccttgacatcccaaatggaagggctgctggctcgcacgccgatgatgttcacgcctttcttcacctttgccctgttggagacagcacgtgtgggtctgagtcagctctggggaatccccgggtcatgctggttctgggaacacggggagcttaattgctcaccgttgcctggcaggtgtaagctcatgtatactaggatttaaacacaaatttgcagtcgccttccaacccatctgccctaatttctttccgtttttcctacctttactaaagagctagagatggtagactgacagccagcaaacattagttacagaaagaaatagaatatccttgcactagcttgtatctttaaataaagccaagccaaacacaaacacagaactacctgaaaacccttagcctggccaaactcaatagaaaaaggcaatgaaaatgcaaaagtaaagactgaaataagaacgcacattcattgaatgtctcccagtgccaggccctgatggacactgtgtctatattatctgatcttcctagcaaggttccaagcccaaaatgagggggctgaggttcagataggggaaggaacaatgatggcctcaagtgatccacctgcctcagcctcccaaagtgggagctactgcgcccagccctgtttgctttttataatcttgtcttcttactgtatgctttccattccatatgttctttccaattcaggtttctaaaagaaacatagaataatgaaaccccatctcaactaaaaatacaaaaattatttgagtgtggtggtgtgcccctgtagtcctagctacttgggaggctgaggtgggaggatcacttgaacctgggaggcggaggctgcagtgagctgagatcgacccacagcactccagtttgggtgacaaagtgagatcctgcctcaaaagaaaaataataataaataaaatataaaataaaataaaatgcaaacagtttgattttgatttacaagctggcctagaagtttgaaaaagctaatgtttcctgctgtgttttctcttagtccctcagcggaaaataggaaaagtcttgaagcgagagtaccaaggggaacctggagcacgctgatggtacctgacctaggcagacgaggatggtgggagcggccgacttggagttcctccagacttgtaatcattgtgcctatataaacatgcagtaaggcaatggtgccagagcctacatctcaaaatccctctctgtcatgccagaggagaaagtgagaccatcttctgctattaatattagggacaaaaggcgagggggagatgacactcataggaccagggctttgagaaaaagcaggacacgtctgtccctaacaccaacaacgctatttcccatggaaacaattttaaaatgtagtgtgcagaaaagacctgaggctgcaggcttgagactgccctccttaggaaagcctgctggcaagggtggctgggaacttggatttggggagcgttccctcccttttcatggtcagaggggctcacggtgcctagactgggcaaatgaggtggtttatgctggacactttgttgtcttctaggagcatagaattttggtacgtgccaggcagagggtgcccccatgagcaatccccagtgaaaaccctgaactcctgggctcaggtgagctcctctggcagtgctgtcccagccatatgctggaggaattggaggaattaagcacatcctgcgtgactccacggggagaggattcctgggagcgtgagcctggtctcctcccctgtgccttttccctctgcggaccatgctttgctttccttggcgaatacatcggagcagtgattctcaccacatgctgagtcctgtgagttctcctagtgactcgctggacctgggggtggtcttaggaacccccaggacacatactgatttggcgagtccacaaagagagaaagaattgcttctaggtgtggccctactgcaaaagtcagcatttttagaaaatgatcatcacgtataacattatttctgtggggaaaatgcacgtttgatgttttaaataatcattatgcatgcaaacactttgaatgcagtcgtttaaaaactgggaatcgcatgcagacgccaaaaagccatctgacctttctagatactcaggtgagacactgggcgaatagttaggattcctgccttgcagaaactcatttaaattgtaggcaaccaagatgtggtagcgaacaaaagtacaatccgctgtggacagctactattatactaagatgaattctaaaggctgtcccaattactctgcagtggaattttattgaatcaacattgctttaaataaataggtcatcaacctggctgtgacaaccttttcattatacaggagatatcagtacataggccttttctgatatataatgggcttatatgtttctgaaattttattcataagtaggctatgtggaattcagatgatgtttctccaatgaatccttttcaagttcttaagaaaggacacagtggcttgttcaacccatgaagtattcaacatttcttgctaataattccactgtagcaaatgaagctatagtcggtagcattatttctgcaaaaatgttttttcctggaattttatacaggacactgggaactgtctttcagagacacagaacattttcataatagaacacacatttctagggcatgttttagatgttcagaattgaagaaggcatactcaagaggtatccttgtgtgtgaatatcaaggaaaatctatgtaataaactggatggtcattcttcggagatgtagacacggtatttactgaacacggtgtgtgttgggttaataattttgaagcacgaatctcagagctgtcagtggcaccatttggaaccattaaagtagttcctagaacacatgcccctgggctccactgggtctgagccaaatactaatttctccctttgtttatgacaactgagttacttacattcattaatggaagttttataacctacttgtggttcaataaatacaggttacactgacagcctcattacacagagataaacatagcacttgattttgaagatactttgctgtagatttatgcttaataatatatctaccatggtgatgggggaaagccataattttccccatagtatgcacatgcactgtgattgggtatcaacaaaacctgcctggggttaaaggtatattgtgtttttaaaacataatagaactgcagggactgtgtatattttatatacatatatatataaaaatatataaatgcaatttgtatatacatatatgtatacataatgtagaatatgtatatatcatcaacacacacacacagagtttcaagtacagcatccagggttcagaaatgtggtgcgcaattgttgcttttgctccccatacccaatctctttcctggatagcagtatcttcattttgcttatatgacccacctctctgccattctataccaccatggtagacttgtaagtcaagagtttctccctccaaccctggacaaaaggtggacacatgacctaagccagtccagctgaaagattctctctggaatataatcttgaacaaagagacacagcaaataaaaaaggttgggggaaattcacccagccttgtggccctgctacaactgtctattgcttccttctctctggtttgcaggaattaacacagctaacatttctgaatctggttctcagccttccctttaggcatacaaatattccccatcctcccatccagtcccttcttgtttaacgtagcctgagttatttatgatcatttccaattatataacaaggggaggctaagattcagtgacttcaagaacaaggaagtgtatttcctcctcctgtgaacatccattgctggtaacccaggttgctgggtgtctctgttccactcagtcatttggggatcaaggctgaaggcatctctactgtttttaatgtataacttctaatgtctctgtgctcatgaccatcccagccaagaggaagagggaagagcagtagaccagaacaagggatttcctcttaagcaggtgaggtgggcactgcatgcccaaattcactcacctcccattggaaggagcctagtctcatggccacacctgactgcaagagcagcgagtgctgggaagtcagtctttacctggacagccgtatccccactgtgaccctgtcactatagtggaaagagagatggatttggatggaggatttgcatctccctccaccacaaccaccaggggactccaaatgatgggatgtgtcagcctcctaaagtctataaatttgagttcattatccaaagcactgtgtacagagacttaggctgatgacaacattgccccaaagagaaactccctacttacgcaatcttgtcagtggaagtgttcttaatatgcaacctgaatacaggcatattcatgtatgaaattcacactggggctattgaactaatacaaatgtgtgctataaagaacacatagagacagaaagcaaaattgatgagataaaagtgggataaaggggaatttcagtgttttgtttgttgggagattcatttaagatttgtgtgcgtgtgtgtgtgtgtgtgtgtgtgtgtgtgtgtgttgttagaaaaaaatgaaagaggaagagagagcaaagagaaaggaagggggacagggagagaagttttgctatatagagttcaaagcccaagaagagaaatttggattgtgtgtaagtctcaggctatttgtttataatgaacatagtcctgttagaaactattattggctaatcagctatccgcaggctaatactggctttaatcaataactgactgtagaattccagggaattggaggaaggaagatacgaagagatccaaacttctggactgcttctctcacttctgaaatgaaagatttgtctacatgtgtctcccccagagattcatgtggccacatagtctctgcatagataaaatcctggtaaaatctgatatctccatttttgagtccatataggctcaatctatggaacaatacacagtgtgcacccaccaaagggtgccacactcctacgcatgtagatttggtgatagcattcctcccagttaattgatggaaacatgccctttggggtcacagcaaagcttttttgaattgctctttgtctccatacttactttctctcattaatagtgacagagcataaaataagcttcattttttttataggtcatagctctattaacatattgtgcaatcactcttggcttctaatttccagttgaccagaaaaacaaatttatggaaacgctactttccactacatcaacatgttgatatatcacataacattttgcttatatgatgaagcacttccagcccgatctggacgtcttggccctgccctcgccagcagttacatggatatgcctgcttacaatgccactgtcagtattttaggaatcatgtcccacttttcactttgggagacactaggtccctctttctattactggaatatatttgctaagtctccttactttgtgactattccactatagccagttaaagaccaacagtgaagcagaagaaagagctaagcctaaagtaacaatgtgaatgatatgtttccaacttctttgtcatgcacccctatcagtaaaaatattttcatatgcggccgggcgcggtagctcacgcctgtaatcccagccatgtgggaggccgaggtgggaagatcacctgaggccgggagttcaagaccagcttgactaagatggagaaaccctgtctctactaaaaatacaaaattagccagatgtggtggtgtatgcctgtaatcccacccagctactcaggaggctgagacgggagaattgcttgaacccgggaggcagaggttgcggtgagccgagattgtgccactgcactccagcctgggtgacagagtgaaactctgtctaaaaaaaaaaaaaaaattcatatgcaacctttatataggtttttatgtttataaactttacagttgaaccatgggttggactattgaaataatgtgtgctacaaaacatacatgaaaatgcacattttaaaccttgagactaaaaataatcagttgccaagtcctgattttagttgatcctccaatgaatcattttacattccccttaggatgtgctcaccccacgataaaggagacacttgaatcccctagaccctttaattcccaagaacggggtgcatgacacacagcagcggcagccatgtgacaaggaagctcagctctaagtgttcatgtcaatattcacatggggcttaaatgctcctgccagctctaagtgttcataccttcacttgtacaagggaatctgttttcccactgcccttctggtgggtaaagttaaatttagaagtaagacctgtgacttcaatgcaacccatttttgctgtcttgctaactgtgaggcattacaagggctctaaacggacataaggaagtagagaacagttcgaggagaccaaagagaagaggaattggttcacagaagaaatggggggtctccacacccccacagggaaaagccaagaatgcggaagcatgggggtgtggcctccactgcactgagggaaaatgatgagaacagttttcagtaactggtggattaatagaacattaaaatccctagaagcaaagctcagcctgtcattaattagaaagcacaaaatacactaacgttgaaaactcaaaactgcagagtcctggcctcatcgacgcggcacacaggccaggtgctgccaaagacaaatcttgacttttatgtgaaattccaacatttgaagacactgtccaagacaaaaagacatctaaagatttaaagcagagcgatgtcctctgtcacttctgagatttacgtgagctgtaaatgaggaagttaaatatcttcagaatgaatgaatgcctcaatcaatggacacacacaaagatacaaggaagaaagcaaacaaaaacaaaaacaaaaaaactcccgaacttccatcactttacacctaagctatccataatttagtcatcattcttctgtgtacgtttccacacccagtctataattttatataaataggatcatgccgagggctgccatatggccatgcaacttgtgactggctaaccccaggaggctttattcatatagagtatgatatgaatggggcctcatacagtggagcagtgtacaacctgcacagctgtgcacagtagctgtgatgacagtagtcccactctatccttggaggatacagtccaagacccccagtggatgtatgaaaccatggatagtactaaaccctatacatactatgttttttttctacacatacctatgataaattaatttataaattagacacaggaggagattaacaataataactaataataaaatagaacaattatgaaaatatactgcaatacaagttatggcaatgcggtctctctcaaaataccttcttgcactgtattcaccctttttcttaggatgacgatgagaggtaataaaatttctgcacaatgagatgaagggaggtgactggcacaggccctgtgatgcagcattctgctactagtgacccctggcaataggtcagaaggagcgttggctactagtgacccctggcgataggtcagaaggaacgttggctactagggacccctggcgataggtcagaaggagcgttggctactagtgacccctggcgataggtcagaaggagcgttggctactagtgacccctggcgataggtcagaaggagcgtcctctgctgcaagtgatcctggagctgagtcttgatgtccatggctggatgtcaggaagagaccatgtgggtgacaagggggcaggtgtctcatgcaggagggttgcgagtacaggacaaaggaatgattcatgtcccaggaaggatggggctggcagcacaagatttcatcacactactcagaatggcatgcaatttaaaactcgtgaaatgtttatttccggatttttttttttttttgagacagactcttactctgtcacccaggctggagtgcagtggcacgacctcggctcactgcaacctctgcatcccaggctccagtgatcctcccagctcagcttcccaagtagccgggactacaggtgtgagccaccacatttggctaattttttctttttttttttttttttgagacggagtctcactctgtcacccagactggagtgcaatggcgcgatctcagctcactgcaagctccacctcctgggtttacaccattctcctgcttcagcctcccaagtagctgggactacaggagcccgccactggctaattttttctattttttttttttcttttagcagagacgggatttcaccatgttgcccagactgatttcaaactcctgggctcaagtgatctgcctgcttcagcctctcaaagtgttgggattacaggcgtgagctaccacgcccagcctggaattttccatttaatgttttcggaccccagaaagcaaaaccttggattaaaggatactactgtatattaaacatgctgctttgatcacagatcaccctggtctcttttctctaccagctcaagagacaaagcagctcaaagccagaaacgggctagccacctgccaactcaggggagcccagcggggagaacgaccaaaggcacagagcaagtgacatggcccagagggtgagccaagcgtggtgtcaagtctccggccaggctggctgatggctttggggacctcctgtctctcctggaatacatctgaatccacctatttcactccattaagcctagtctgtgggcttttatttttttttttaaattgccagcacagacagatgttcaatggcttttaaaaaccatcttagagctacatgctttctgcacatcgtctttagtcttcccaagcagctggtttgcctcctgacagtcaatgcatgagaagggtccccgaggccaggcattcctacaggtgctagctagttcatgggagatgtgggatgagtagaaacagggagaaggggctgcacaccagccaggagctgtgccagtgcgatggacagggacaccagctgttagaggctctgaagtcaatgtccccacccccactactcaaaataagtaaataataatccgtggctataaaggactgaagtgagtaattcgaggagagtaaatcaatctgcctctgggtgtgtttgttcattcactgattcattcaacaaactttttttttttttaattgagacagagtcctgctctgtcacccaggctggagtgcactggtgtgatctccactcactgcaacctccacctccctggttcaagcaattctcatgcctcagtctcctgagtagctgggattacaggtgtgtgccactacccccagctaattttgtgtatttttagtagagatggggtttcactatgctggccaggctggtctcgaactcctggcctcaagtgatccacctgccaccttggcctcctaaagtaacgagattacaggtgtgagccaccatgccagcctcattcaacaaatactttaatttctttgcaaagatggggtctcattatgctgcccaggctgggtctcaaactggcttcaagcaaccctcctgccttggcctgccaaagtgctgggattccaggcatgagctatcactgtgcccagcttcattcaacactttttgagtgctccctcttttcatatactcttcacccactggatatgcaggtgagaagaaacatacgttttctattgccatggaactaacattctagtggaggagacagaacgcatgcatgcacacatttcttacactgataagttccatgaagaaacaaagcaaagcaagaggtcagagggctcagtgtaaggagcggctacttagaaccacttaccttattttattactcatgtttctgaaaaaccataaagccagcaaggaacacacgcaggcaggcagaagggaaatacgtagacatacacagatgtcttttatgcctgatttgccctctgcctaatatgagactggagaaagaactctccttgttcctactgaacacagaccaccacccaacaacagtcaaggatgttatttaaatattttacaaattgttatgtgggaacattgtctatggattcataggaatcgttatgactccatgcagaccaggttttctcatttggaaaaacagaactttgatataggctgcacccctcaacacaccctcccagaaatggatggctaaattgggaggggatggcgagagagggtagagggacctgcattcattcatcaccatttccagaaacacagagcaaactgtttgcctcattgataccaaaccaataaacgacaacacattctgaactgcccacatgtcaatgattgggatgtggcggcctcattcttcgcatgtcactgagtctcccatcatggggtcatcaaataaaccagcagacaggcaaaaccagagtcccgctcctgttgcacataatgaaccctaagccatgtcgagtccttaacacggtgtctggtagaaaatcaattttagctatgatgatgattattaccattatcttctttgttacacagaaacctggatgccctgaatacctgaataaaattttaccccttttccatctcatccactcttcttaaaaacaaagccctgactcttcttaaaaacaaacaaacaaaaacaaagcaaaacaaaacaaaaagaaacaaagcataatccttgcctccaatgggagatatcagatgtgagctcaaagttctaatcagcctcataagttccaaatgtagccaagtcaatcacctcagcagagccagcaggacaaatatttgcagacaagcagctcagggggcctccccagcacctactatttcagaacactcaactaacttccatgttcccagggctccacgattcacagggggctgagatgtgcctagttttcagggtttaggataagacctaattttactgtctgttaagaaccacaaccccctaatttcattacattacataattgaactgtattgctattttctcagccttcatggttaccagtgttttagagaaattgcttaaatatacttatttaattaaagaaggcattctaaatcaaaagcggaactatggttaataaacgtaaattctcagggatgtcttttgggaggttgttaatttttttattaacaatttttcattgaaaaatggtatagaaacgttataaatattcaaatggcatgaatggggatataagagaagttcctcttgctacagacatctatcgtcaaacttctgagtttagtgggacattttctaagagattaacatacttagatacatggatttaaaatatatgtacaccaatgacaacacgctgtacacacagttatactacatatatgtatatgtaggtatatatataatgtatatacacacacgcatatacgtacatgcacacagtcatgcactgcacgacattttagtcatcaattaactgcatgtacaacaatggtcccataagattataatattgtatttttactgtaccttttctatgtttacatatgtttagacacacagatatttaccattgtgttacagttacctatagttttagaacaggcacatgctgtataggtttgcagcctagagcaataggctataccatacagtctaggtgtggagtaggctataccacctatgtttgtgtactccatgatgtttgcaaaatgacaatatcacctaatgacgcattccccagagtgtactcctgtcattaagcaatgcatgacagtaaattgatagatagattagaaagatggatagatggatagatggatggatggatggatggacagctggacagatggatgaatgggtgggtgggtgggtgggtggatggatggatgagttgatgagttggtgagtgggtgggtgggtggatggatggatggatgagtgggtgggtgggtggatggatggatgagtagggggtgagtaagtgggtgggtgggtgggtggatggatagatggatggatggatggatggatgagtgggcgggtggatgagtgggtggatggatggatgtaaggatggatggatggatggatggatggatggatagacagatagatagatattcctcaacttatgatggggttacattccaataaaacttactgtaagttgaaaatatcataattgaaaatgcattctacactctacctagtgaacatcagagcttagcctggcctactgtgagaatgcccagggtgcttctattagcctaaagtttggcaaaatcatctatagtgttgaatgtctcatgtaatttactgaaaactgtattgaaagtgaaaaacagaatggtgccatgggtggtccaagtatggttttcactggatgcttatcactttcacaccattgtaaaatagttataagttgaaccaccataagctaaggccatccacacaaatatatacataaaaacatatcttgggaatgtatcgatgtaaagcatttatagatccactgcattcttttttctacacatactaatccattgtgtgctagtatctgagcaaaatctgcttgactggtgccccctcgatggacacagaggtggttcctaatctttgataccatagcaagtgcttcaggaaactgccatgtccacacaacactgcacacacatatatgtgtaggataaattcttaaaaaaggaattgccaagtcaaaagagatgcatgtgctcaatttgtatagaacttgcgaaattgacattcagaaagatcctatacacgtttatatccactgacagtgtcttaaagtccttgttttctttctttttgatctttgcaattctgatgaacacagtatttcattaagtctgagtggtattgaacattttttcacatatttatctttgaatttttgtttttaagttaaacgtctgttcaaatcctttgtccatttccctgttgctttcttagtcttgtttttattgtttattaggaaattgatttgtaaggaaaatcccttggtccatttggaatttgttttagcatgaaataaagatccagctttatattttcctgtatggtttttaaaatcacactattcattaaatgattcatccagtacctgttggcataaatgccattggtaaaatatactaagtttatttgtgtttttaggcttattttcttggactatccacttgcttttattagtctgtctgccttctcatgcaccagtccctaaatgctttaaacacaatagcttatgacatattttaatatctggtagggctattttcttcctattgcttcattttcaggaatatcctaataccacatatttcagtaagaaccacttctgttagcacatttttaaagataacttttcagtttgcagaaagaaaagaaatgaaaagaaaaaaaagagaaagaaaaaataaaaactcacagaagactatcaaaaggtgctaccagactttgggacaacattcctcctagagattaaaagtaacacttatcagtcagttatgtgagtgacaacccacatcggtagttctctgagactatgataactggcaaatgtgttttcacagacatcagggtgactgagtcacaacaccgcaccagcgacctcaggatagcttcctttacaacagccgcatccctaagtgacttgtggtttgcgttcatagtatccattttgggcaacagccttggctcaatgcatccaatgaggctggcctccgacaatgatcagctttcttctttctggtcactgtgattgggtccaaacatattgatgaatcttgggaattttccaggagtgacaagaaaattattactccctccttcccagcttcctcattcctgacttgacttgggagagtgtgagatttgatctactgcaccacgaagaggctgagcatgatgtcagcccatgggaagggagaaaaatcaagtcctactggcattggggccctggattcaaccattcctgaagcaagatctatgcctgtcttttgttacaggagacatccagttctctgctagcccactttttaaatgttttaatcatttcaagttagaattttttcttttatttttcatttatttttactttttcttttattatatttttaatatttatatttcattgtggtaagaacagttaacatgagatctatgccttagacacatttttaggtgcacagtagagtattgctgactataggcacagtgctgtgctgtggatctctagagcttatgcgtcttgcataactgagacttcatgcccattgcacagcaactccccattctcccactccctgcctctggcaaccaacacgctactctctgttctatgagtttaaccattttctgacaccatcagctgaaagcatccgtttaggtgtagagagtaagtgtggtttcttgctgtctttacaacttctgagacttcttacacaagttcccatcttacagtgaagtgggaacaaaactaaatgttcattcaatagggtagttccactctggtgagaacacttggtttaactcttcaggtaaaaccgtctctcggagctgtctctcttctctccagcaagaggaccaggaatatgaggaggaacatggtctacatgggaatcatagcagaaggagggacatgtccaggtgcctcttggacatctgcactgtctgttctcaggttgtctgagctagcgtggggttcgatcatcacaggtgcaatggggcactctgttagcatcttctgcagaagccagtggctggggtcccctggggtttcatttgtgttatgggatcctcaaagtctggttaagacttccactggcctgactgtcccctgtcctgatgcccaggtactctgccctgcaatcataaccaagaatgtgcttattttatttaacaaatgtttatataacccttgtcatgtaccaaaaaagcttcaaacatccacttgttttttctcatatgaataaaataacaactttgattcattcctgaaaccctgttgctaaatgaaatgctattgaaaatacatgtctgcgtgtgtatattattcatattaataggaaagattatgatggtttccatttcaaataggcagctccctagacattagaaacctaagctacacctgcattctcctttagagcacgtatattaacattgtcaagccccagtaattcacagcaagcaaggagaggatccattgcaaggctaggatttaaattaagaagaaagctgcaaggtgggtggatcacaaggtcaggagttcgagaccagcctgaccaacatggtgaaaccccgtctctactaaaaataaaaaaaattagccaggcgtggtggcatacacctgtaatcccagcaactcaggaggctgaggcaggagaattgcttgaacccaggaggtggaggttgcagtgagccgagatcatgccaccgtactccagcctgggcaacagagcgatactccgtctcaaaaaaaaaaaagaaaagaaaaaagctgtagacaagggtagctaccattgtaaggagaattttggagacttctgaaagacatctttgcaagcagcttagaaccatctatttccatacagtttattaataagctaattaggattcatacaggttatgttagttttctagccttgccataacaaattcccacaaactgggtggcataaaaccaaagaaattgattttctcacagttcaggaggctagaagtcagaaatcactagctctcaaggccttgcttcctctggggctctagggaagaatcctcccattgctgcctctgcttctggtggcaaccagcactccttggcattcctcacccggggcagcatcacccccgtctctgcctccatggttacacagctcccttccagcatgtctgtgtcttcacggggccttcctttttaaattttttctagagacagggtctcactctgttgcccagcctggagtgaattggttcaatcataggtcactgcagcctcaaactcctgggctcaagtgatcctcctgcctcggcctcccaaggtgctgggattacaagagtgagccacggtgcctggccacgtggctttctcaaaggaatactggaccttgggtttagggcccaccctaagtgtgacctcatctgaacctaattaaatctgcagagaaggtcacattcacaggtacaagggatgagggcattttcaggagcacagttcaaccctcaacaccggtcatttcagcgggttctctgcaaacttcagtgggcagactttcatggatgccatttccacccaaacacagtgcacaattaaaatgttgttctacaggatgttctccaactagaaagtgtgagatgagtaaattgcttaaacctgtaatgttgaaagagcacttctcatagtgtgctgttggagtgaaaaatcaataccctactaaaagagtcttgtctgaaaactggtataactttgtaagagttgttatgaaaagaagttttaccccatgttacagattaagttctctgcagcacagagaggttgagtagcttgctccaagtcacacagctagtgggcggccgactccaggagctctgttcttacacactgtgctgtgctgttacttttggtcactggagggtctctgctggcaaatgtgacaatttgtgccctatttcccgtctcttcatagggagcatggatctgagtacatggataccgccaggctacagagtagagtcagcctgtgctgataggaatttacacctggcttcaataaaccctgcacatttagttgtcgcttaatcaccccgtggggcaatttccttccagaattcagattacttagagtggaggcctggccttggggttcccgcctatatccctctcccagattagggtctcagccccatcaggggcaggggagacacctccttcactcggtgctggaggcagtccgcagcactcttctcccttctctctttccacagtccctcaggcctgaatttatgtctgcagagctggggtttgatctttacccatcctgttcgcctcctccctgcccttggagtataataaaatctattaatgtaatctgctaggtctcccttatggtctattaaaaagggaaggaataggaagatttttcaagagatccctctctcagtcacgccataaaatctggctttcaagtcaactttcctgctgaggatgaaaatcccatattggatattaggacctaggtaatggcctgttctttttctcttcaacttcctgctgtagaaccagctatccaacatcacagaagagcctgctgaaacttacagagctcccacctgaatttgacacatgcctcttcggctcacacttcacatgtgacctcacctaacatcaagggggggtgaggaagtcaatcctaccacccccttccaacccaggtgaatggatgtgttggactggccaagaagaaagtggtttactcagaaatgcagaagagaaagcacatttaagtatttcaacaaacgacctcctttctcattttacaaacaagaaaacagattatttaaaaagcttccaaagactggatatttccttagctcacctgagtagactgccagacatgtgaaagaaaggagcacctctgaaatttcacatcactcgttgggtgaggtgattggtgagaattgtatcaccatttcctccagacacacagtgaaattcacttcctgatatggtttggctgtgtccccacccaaatctcatcttgaattgtagctcccataatttccctgtgttgtgggagggacctggtgggaggtaagtgaatcatgggggtggttcccccctactgttctcgtggtagtgaataagtctcatgggatctgatggttttgtaagaggaaacctctttggcttggttctcattctttcctgcctgccaccatgtaagatgtgtcatttcctccagacacacagtgaaattcacttcctgatatggtttagctgtgtccccacccaaatctcatcttgaattgtagctcctataatttccacgtgttgtgggaaggacctggtgggagataagtgaatcatggggtggtttcccccctcctgttctcatggtagtgaataagtctcatgggatctgatggttttgtaagaggaaacccctttggcttggttctcattctttcttgcctgacaccatgtaagacgtgcctttactcctcctttgccttctgccatgattgtgaggcctccccagccatgtggaactgtgagtccattaaacctctttttctttataaattacccagtcgcaggtatgtctttatcagcagcatgagaatggacaaatacacttccctactccctttgactttgggcatagtcacgtgtttggccaatgaactgtgagctgaaggcctgtttgtcacctttggtggaagctagaaggaataaagctttgttatgtcatcttttcctttaccccttgtgaccgtaaatgttctcagaggtgcctgctctgttagctcatgcccttgctgaggacaatctaagcaagacctcggcaagtctgtaatgtgtgagggaagtaaacattgtcggcctcaaaacacgaaggtcttcaggttgcttgttactgaggcctaacctggataaactgtgtcttaggaaaaccttctctggctctctttcctgttaggatataaacatacaaactaaaagctggaataagaatatgtggatgtttacccagctctgattatataagagacaaattgacctggttgtcatgagaaagattaatagagtagaacagagataattttccagattctacagcaagcactggatgaaaaggcagagggcacatcttatttttgacaaagctaataattattccatactggtatttttttttctatatttttacactaaaaaaccctgaaagagcaacttatggattttctaacttcaggaactaaagatgaggattaattcctctgcctttacaactgtaaaatgggatttgtctaacaagggattaatcactatgttccccctctctgattgcccctctgaaatggttctttcttccgtatttcccagcctcttgattgactcccaagcacaatgcttggcagcccactcctgggccgctcctttgttgacattgcatcttggcacttagcagcccacatgctctaatgcggtgatttgtcagaagccaggtgttccactctgtacaacacttaagcaaccatttcacagccattaccagtctgcagtaatgacactgggtgaaagctaagtgctaaactggttgtaaactacaaagaacaccaggggaggtgaagacagacactttgataaacaagaagggacagcttgtaccttctaattgatcagtttaaatctccactcagctttcctctcactacttcagtccacttggtgttcagcagatatggcagattgtatttccagagatgaccacaacagtatatacctcctaaccctagcacccttcctcccaacaggcaggaggaggaggaaagcttgtgcctgagatagaagtcacactatgaggctgtgagttctgttatgagaggaagatcagcctccaccatcctcttgtgatacttggagctcaaagccaccacttaagaagctcaaggccaccatattgtgaggaagccccaccacaaagtagtgccatgaaccagtctgaaaccccaacgggggtcccaggcaagagccagcctcaaccattgcacatgtttggagtgggccttcacaggatcccaagcttcagggatctgccagctcctccaagacttcctggctgaggccccagccattgtggagtagaggcatctactaacttttgtccttccaagttcctgacccacggaatccaggagcataagaaaatggtggttgtttagagcattaagtttgtgtgctttgctatgcagcgagcaaaagtggaacaacagtgttctgaagtgaaactggaaaatcattgcctgcctgccctgggtctgcacagaggccaggctgggcttaggaaggcatgtctctctcttgggagtcattaaatagcagctcaggggttgaatgtgtcctacaaatattgtccctaatgtaattttactccattttgatcatctgagccaataatttaaaattaagacatttgctttaaaaaaatccagatttttggcttgtcttggaacataacacaataacacttgacctatctactttagtatagcgccaatcagttggggctgccacctttaaacagtgcctgatttcttccatctgtgccagctcccacgattcatggagcacctccaaacacaaacctctctcttctacacgccctgcctaattcatttcattgtattacctgcctgtctcactgaaggtcatagagttgggaacctctgcttctgcccttagaattcaccaagggtccaaagtgctaatgcctgagtaaccacagattttaatagtttgattatcatcccctgatattaaaaataaagagaataaagagaactcaacaccctctgatattttggttggggtgagggatatatcactgggaatatgacaagtagcatatatgggcagaaatgaagttgagtcctcttctgaccagaaagtccttatacataggcgagggaagggtctctcttgctctaaattccttcctacaaaatcaggaaaaagtactagtgttgggcctgagagtaaatgaataagttgtgttcaggaagaaatatcacaaagaaatgagggaggtatatccatgtgctatcaggacaactccaagtcaaaccatttaaatacactgtatgtagatcagcaattgaaggattgagtttgcaacaagaaagtaactttgtaactgttttcttccatattaaaatctaacatattgtctacctatgcatttatgtctattatctatcatcaatccattatctatatatctggctacctatctacttattatctatatacctaacatctatctgtttatatccattatctattatctacctatacatctatcatctacctatctacctagcatctatccatctacctacctacctagcatctgtttatattcattatctattatctctctacattatcatctattatctgtcatctacccatctacctagcatctaactacctacctattatctatcgatcgatctatcatctatctgttcacatccattatctattttctatctattatttatcatctattatttatctgtcatctacctatctacatagcatctatctacctacttgcctgatatctatccacctagtatttatctgtttacatccattacctattatctatctacattatcatctctattatctgtcatttacctatctacctagcatctatctagctacgtacctacctattacgtatctatctagcatctatctaccggtttatatccattatctattatctatttatattatctatcatctacctatctatttatcgatcagtcatagctagtgactcactgttctccaagtataaagtgtcaccttttgatcctggcatttaaggtcatccacggtccagatccaacaactacaacatggatgccccaagtccgagtctctggggacaagaaaggtcacgccaccatccgagccccagccttgctggtctgacagcatccaccggagcagcttcggttactcaacctttcaaggccaggctcttccccttttgagactccgagagtgttgcgcgtttgctcccagctgtgtctgagtcactgcttgtggctcatcagtcaggctccctgctggtcgctctcaccactgctgccccgatgcccagctcttcactctgccacagtggcccgtggtccctggctgcgtgagtccatcctggggctacgagactttgcacctgtgctgctgctgtcaggctcgcctttcccctgccccctcactctctgctctgtgcgtgtctgtgcactgacaggtccatggcttccatatgtaacatttaccccatgataggcactcttttaggaaagactcaaggagaaactaccacgttgtcacttggaaacactgtacgtctgtgccttcaggcaatgaggctgactcagtggtgggatggaaaatgttttgcagctggcagggagagggagcgtggataccagcctgatttgtaacacctgcccatttccatggtgtaaatgttcccaccatgactgttttcaagctcccaacatgacagcattgaatgtgtcattgggaagagatgcacaaattgggctcccccaagctccagcacaccacaagcactcatcttcctttcatctctaaatttatcactctagaaagcccgtctattccgcagtcctcttccattttccagttccctggtcatgctatttatgtttcctcatgatcacagacacaactcagattctttgcccatgaggatcctcaacccctaagtaagttaacgcaagtggactccatgggagaaatgtcacttcccatgctttgcgtatgtccaaaagccagggcccatctcaaaggaaactctccaagctttctttccgggtctctccacaaatctttgattatcctttaatcaacactatctaatcggtctttcctcaaaattctagatatagtcccagtttctcctcaactaggtatatgtcggaattcctgtcttctccatactcccccctgtgtgattatgtcccttccacagtttctattccttaaaacagtggtgctcacggctcacactgcatcatcacaccactctttggccacaccaagccagggtcagagacctcatctgaggactgccctttctcatctggctggtggcctgtggactgtgatgacagctcaaaatgtttaatcagatttgtttctcccagtaatttgaaccacaaggcactaagtaacgatgccaggtggtgctgggtttcaatatggaaaattcatgcaagcatggcctaggatggacagccatctgcaagtggaagagaaaggtggtcgagagagagaagcgtgcagcagagacactgagagagaaagaaaaaggtgacccttgattcctgagggcatcacagttgcttactgtgggttccatgaggcctcatggtacagtactttatgttcatgaacagccatgtgattttcttccttctttagacaaccctctcttctgaatcttgtccacctataaccaccttctctctactgtcacctcttacacagagacctataacatgggaccacttgttgaactggatattttccgccagtgactttcctttattgggaagataaacctggagacctgctttcatggggaatcacatcagatgctgcaggagggaggccaaaggcttaggagcaccaggtgggtcagacttgagtccagcttcctacaacttctcaaagaggtggactccaactagatcagattctccttcatcaggccacaaaatgtttctgaaatgctgacggcctggtctcctttggtgacttctccctgtttttcatggagttccagtcgcttgcataattctctcttctagccctactgtggcctaaaacctccagccctccaaagaacatattctccccagctattttagcatctctctgtccttccaagacaccaaatatcctgccaatgcttaggctgtcagtgaaaacaatgacaataataggattgtagcacattgctaaattgattgcaatgccttcatttccacgttggaaaaggaagctgattgcacagaatttagtctcctttttattagtactcaacagcccgatggtattcacatacagcttgctccataacaccggtgttgaatgcatggaaatgtacttagcctacaacagaacagacttgaattcgagaataccccaatgaaaaagtaagtctgtttcaggcagtacctttcacggaacaagcctaaggtgggatgaaagttgggtctacagaaacagaattaccctgggatgaccctgcttgagcagagttggattacctcaaaagcagaaaaaaatgtcggccttattaaccatacatgttaaaatagctagggaagcaaccatacatttatttcgaagagtttcatgtataaaatgacattcgaaagtcatcagaagaagaaaaatgtttttggaccttctaaaacttattttgcagatcatattttgttgttggtatttcaaactaattgtcagggaaagataagtgtgacatgcccatcaatgtccaggccttttaaagttcttaatgggactctgctaattcaccacatatccttttataacccaaatacaataaaaaacaaaaaataaaaataaagaaaacactcattgattatatatattagttggtgcaaaagtagttgtggtttttgccactacttttcttggagaaaaccgtaattgcttttgcatcaacctaatatttaagtacaaagattttctgacaatatggctttcattgtctgtgtctctctctgtagataatttaggtgcaaatatagaaatgtatgagaaagctggacatacacatcaaatttgacattcttgggtgatgggttacacgggatttatgtgttccgacttatggtttttccatgaaaatgccagttttctgtcatgaatgtacatgaactagacaccaacgcaaagcatggaacaggccacagggtgctccacactccctttgccttcactacacgagtatcaaggttgcttaagtcagtcccgaggcaggtgcaaggctttgggaagaacagtcatgctctgttctgtttcattctctaacacaaacattccaccgctgctcgtctcacccagcagctgtctgtgcaccaacattagaaaaaaaggtgctgtttctgcctctgccaccacccctgccaacacctgcccacctgacacctggatcggcaccgagcagaggcaggtcccgaagactctgctccatgggtccaagctgagcgcaaatcctagcatgtctctcgccagaacactggttcttatcatgtcttcccctggcaatggggtggagcttttttttttcccccagaggtgttttagtgagaagcagagggttgtctcagtggtgaccgaaaatggtagaaaaaacctcaaatactaatataataggttgccttccttttaaagcagtgaatagaaataactttgcaattttacttggagcttttttatacctggtagtccaataacctagttaccttatttgcatacatctgggaaatccaatgtccaaaacgatagcccctgataatggaaatctatttaaatttcaattagttaaaataaaatgaagtaaattcagctcctcagctgcgcagcatcactttaagaactcacagccacatgtggatgggggttcccatattagacggtgaagttagagaacactgccatcaccacagaaaattctattggagagaaatgctccagaataattttgacaaaactttgtatccccaggcacattttaaagttgacatttaaaattttccctcctaagctgcaaaggttgaaattttcagtatattgtaactattgacattttaaaattaaactgttatatccttcttttaaaagtgttcactggaatctaaataccatggtgatttgatacccaccattattcacttttaaagaaatatatagacaacctcttccttatcagagttaagttttatagcggtttactttttttagcttccatttttattttacttatgccacagaattttgctctaatgtgttctatttttacgttcaaatatcttttattgattactctgtcatacttctcagcagtaaaaatatgcatatagattcaaatttattttttatctgtgcttataggctctaaatgttcactcataaatacagacagtataatggtgactgccagggtgtgggaaatgagagaaatgaggagacgtgtttaaggggtgaagaggtacaaactttcagttataagatgaacaagttatggccgggtgccatggctcacacctgtaatcccaacaacttgggaagctaaagcaggaaaatcactggagtccaggagttcaagactagcctgggcaacacagggaagccctgtctctacaaaaaaatcagaaaattagccaggtgtggtaaggcatgcttgtagtcccagctacttgggaggctgagacaggaggactgcctgagccttggagatggaggttgcagtgagctgtgatcacaccattgcactccagcctgagaaacagagcaagaccttgactcaaaaacaaaacaaaacaaaagcatggacaagtgatggttctgacattgagcatggggctgatggatgggtaaatctgattgtgacaatgattatacaacatacgcatatatcaaatcattacattgtataccctggataggtacaatctgtatttgtcaactaaatattttaaaatacataaagttctacattgagatttccttttaattatattcagtatacacataagcaaaaagacagtaaaataaactatatattttaaagagcaattactcaacataatacagtgaaccatttatcagaaatgagtgctatcaggaatggggttacatagtcagggtggtgtatatgctgaagtaacaaccccaactcttgctggcttaacaaagatgtatcacttgctcaaatttgatgtttatagggacaggcaagaatccaggctgatggaacccatcttaggacggatgttgccctcactacacattgctttggaatttcctgaccaaatgaagagacagcatgaaagatcacattctggctcagaaatgcttctacatggaagtgacacacatcgtttgggccaaagcaagtcatgtgaccacagcctacttcatgtggtcagggaagggtcccattcctatgggtttcatctggacagaaaaactaaagcagctttagaatatttcaattagagagtgtttaaaatgaggaattagaaaccactggcaagcaaggggtaaggatcagggggctacaggcgactagatcagctcagtgggtgatttcgagcgtgggctcctaagctgctgggaacgtgagcaatctctgtgaagccacaggacacagtgactttctgtctaccttccaaaacctcatgcctctcattggcagaccgtaacccaggaccacacgggaaaagggaatctgggaaagtcaggtgaagcgtgctcttctgaaatgcagaagagaatgtaaagggagtgtcaatgactgataactgatgttctagtgctgaggcattctcccctaaggagacgggtccatggactggagaagcgttgcatttactccaagagcaagacagcatagcctcaactcaatccctacatttcaatgttataaatgttgtcctgagaaacactgaatggagtgtactttgtcatagtaatggcactcaattattggaactcctacgacaaaaactgtacagtaatccgtcatcaagagtgatatttcaagatctgacaatatgaacacattctcctcctactttgttgaatgcaaagaatcagaaattacatggatgccaaaggagttgatatccagtcattagagtaatccactttctcaaagaccattagagtaatccactttctcaaagacatcagcatccctaaatgtcttacagggctgtcagcccataaggttttacaacccaacacaatccacctagataagtgacaaaatggctttatttataaagtaggtacaaaggcaaatgtggagctgagttctttaactctaggtatttttcttaggcagatcaattttaggaaagagaatacacagaagtagagaactcagaaaacagatactcttgaaactatttacatccatatatcctttgaatggttttgcatagcaacaggtatacacgtagcccaatttaagacctctgcaattagcaaatttcctcaggggtctaaaaggagacgagaggtctcgtagatgaacaatcacagcacaactcgcccacacaaatgggaagacgctggttattttttccagcaggtacaaaagcctgtgagtcttacgcacatgtaatattttacgtgtgtgagaggtttcataagttattaccatctaagagcataaatggtaaatctctattttaatttcattcctcttcatctaacatagatgtcatgatgtaacctagaattcttcttgcttcctgaatcagaagtgtttattaaaagtccttctaccttgggctctatgctggaatacaatcccctcaaaaagtcaacttgatagaatctttaatattaagcctgccttaatatacttcaatttctttacaatatttatcgatgtaaaaatcacaagcatacccttgctttctgtcgtgtgaatctaatctaaatccaaccatccaaggaacatgttcatggagaaaaccccctgggaaaacaggatagcatgcacgtggaatacagctgctggcctccagtgaaaagagtactgttcagggtaaggagggtttggatggaaaaccaacagctgttgaggccagaacaatgtatgaatgttaaaggaagcatattttaattcaatgtgaaaagtgtaacgctgacagctctatgggcaaccacataaagtgtgtggcaatatgtagatttctaggagtgggctcaactcttcataggtgggcaccaagcaagacatccaggggtcttaatgtacatcttctttgaaaacacttaacattcaacatgcatcttctttgtgtctgacacttgttttttgttgtagtttttttgcttttgttttctttttttttttttttttcagacagggtctcactctgtcacccaggctggagtgcagtggcacgatctcggctcaccacaacctccacttcccaggctcaagcgctcctgcctcagcctcccgagtagctgggatcacaggtgtgcaccactaccacccagctaatttttttgtatttttattaaagacagggtttcaccatgttggccatgctggtcttgaactcctgacctcaaatgatccacccgcctcagcctcccaaagtgctaggattacaggcatgagccactgcgcccggccagcacttgttaattgctagagatatacaagaagacaaactagtcctggttcatactctcaaagagcttaacacccaggtaggaataaattaggcaggtgaaggtagcttatgctgtggtaacaaataccacctataaaacaaacaacaaaagtttatctcccattcaggtacttgctcaccaagggtgggtgacaaccttcttcagggagagtcaagagtggctctgccaccgggaatgctgccagacacctccattggagaagatgaaactttcatgttagttctacttgtgtctccctgtaagccacgcgtcactttcacatttatttttccttccttagagaaaattatatgagaatttctagcttcacagtgatggagaagtatgaactacttctctgcccagtagatattagtgaatggtggcaacagactgcagggagacaggcattaaacagataattactggatgacagataatggagagtgcaatgaaggaaggaaggaaaagttaaaggtgccatgagaaagaaaattggggacttaatttggtttgcgagattcagggaatgcctctctgagagatgatacttaaggtggaacgtaaaaacatgtctgtaagagtctatgaccttatcatcctgagtctaaccagactaactatccctaacttgggataaacagtctgaaccactcatccaaccaatatgagagctatgcatagatccttcaaatgccttgcatgggagcctaggttttgaatcctccctgacagcaagcactgcttttcacttggcaacagagaccaatgtatgttctccagaactaatttcattcatggaacgctaggcatggaatctcagctgttcttcatagcagagggctcagagtttcttcatgtcacactaatagtttcactgattgaaaatccacagcagacaagaattgggactccccgagatagtgctggagttagaataatttatggagagcagtctagcacaacataagctatttaaagctgcataatatacccacaaactcttattaagggctgaggttttcaaccctatgagacagaaaccagttatcattatgcatcaccatgaaagaagattaaaattaaatcaatttgtttatctctgggttctctgcccaattaacatttcagaaagggaaacattctgtccagataagaaatcagccctcatccaaattgagatattaagaatataaatctcaggaggttttcagaaataaatttaattatcaaaagggcagaagaccagttaaggctcagcttatgaattgttgctgctgtgagttagagtcagactctttggacagtatccgtttgaactgaaggaaggtgaaaagtttctgtgcaaattaattcagagcgtttaagtggacttacctccagaaatagaaatgccactttattttaatgactgttgtattttctaaaaaccttcttgaggaacattttacagtgaaacactgaaattttgtatagaatatactatgtattgattaattaattcataaaattcatgaaggacttgggcttcagctaaacaaggatttttccaaaatcccaggtatttgagtgtggataatccatctcagtggattttcatcatttcaccagatccaggtcatatctgggttcatgtgtttgaaaagtggcaatgtatttgcagattattccatagtagattgtaatggatttgaggcacactctactcttagtgaagaccagagtgttgctgcagaccaagttacccagctcgaacgccattccctactagcaagcatttttccttcacatcaggttattaaacagatcattttacaggtagataacctgtcaacagagaacagattcaatcagggaggttgtgaacaagccctgagtcactgcatggattctggaacctcatagaagggtataaatatctgtactcttacagaaggaagacccagactcaagatctagagatctggcatttaccagctctttctccttggatcataatgtctctgaacctcaattttctaatacgggaaatggtaagaacttgcttagcccaaacaacaggatcaactaagactgtgtgtgcaagaacttaaccactgttctccctgccactccccaaatcacccatgccctctatgcatgttaaagggcccttgctcatgctattcctgggtgtagaatatcctcccaaccttcgttccacctggagaaaccccgtgcttcctttaagacccggtttacagaaagtcctcttgggaagacttctctgatttaatctgctttgaccaaatcagataagcatcccctgtactccagtagaactctgtagataattctattacggcacctaccatcttgtgctgtaattgatataagcaaggcctaatttatcacaggaaacagcaagcgcctttatctgtatacttttcatcaagatagccctggccttgtgtgtactacgtgatcaacaagtatgctgataaaatcatcacatttgcatttaattttttttgaggccaggggtgctttggtctattccaaacatacatctggaatgctaaaagtaggcagtagagaataactgcaagataaaactctccaaagtaatgtttaaacatattattccgtcttctcttgtccattttcataaaaccttcaagatcttgttcaagggacacagtgacataaatttctgctgttttagaaggcatacagctttagtttgttcttttatgtatttttgatcctcagtgctcttagttttgggtatgtgtgcacctgtgcatagctgaggatatagatggatatcttttcccagccctctttctttgatctccttcttaatctttctaagaggggagagtgggaagacatgcttagacacacggagttggcaatgtaatcaggcactgtggtcaacctacgagggaggtgacaagagagatgtgtctgtttctggtagatatttcattctgaaaaatctgaagtgcataaaggctccctccatattaaacatcaaaggtcaaataaagttgtccttttaggatagattcaggaccctgagggaaggacagcctggctggaagaagatctgggattgtggggaagacaagagggagggtcaacccacagacattcaacccacagacagacattcaacccacagagaacacccatctgagatggaatcttgtacccagtaataatatttaaaaaatactgaacaatcaatacattaagagaccaatcaggatggccatgaatgctgacatggcggtactgcattgtgccagataaatgttagccttgggacagcgtttggggataaaggaaatgatacaaaagacagaatcaaactcctggctgataggaagcagcttctatttctgaagatgggcaacagctacttttaaacattgaaaatatttcaggtataactaagacgtttcagggtattttcattaattagtcccaaagtatcaggcacatggcagttgtagtgagcacctagctgacctgcctaggtaatcactaaatcttacatagatgagagaactgatactcaaagctgatgacatgcctaaagtccaggtgctaattaagggcagctctggtcttagaatctaagtctccttgacttgtcaagtctattaaaacaaaaccagggatttttctgatatgtcatgtggcatagttcctgcaaaacacatggcagaaagtttctgcatgttcataagatctgacagaattaacagactaaaaggaacatgatatgacaacctggtgccttctggcaaggaaatcactgaatcatctgggacaaggtcatgttttccctcctctttaagcactttgcggaggaagaagcccacagtctccttggacagttatcttgagcgtctgctatttttgccactcaactttcttttacccttctttcgttaaagcaattcacttgtatttctccagtgaacacgtccctcggccactctcaagccatgtggattggctggaaatgaccctactcttaattacaagtatgttctcaatggcttaagtcagggattctcaatgaaatatctgtgaagtcctgagggaaccccaagatattttcaagggttctgcaaagtcaaaactattttcacagtgaaaccaagatgtttttcacatttgtcactgtgcttccatttgtactgatggtgcaaaggcaatgatgggtattgttgtcaggctggcatgaccatggaaggtagcgaaacccaactgtgctaggaattggtgtactgttggagtaggcagatgactaggtatgagaaaagtggggagcccctgagaaaggaaggaggagaaatacctatgcaggaagaaatgcccccaaatgtcccttaagatgcctaattactcactctgtggttaaactgtcagaatgtggctagccacatgctgatgagaagaaaaatgggtgaacgggaaattcctaagagacacacaagtgcagaaagtacagatttccctgctctatgcccttcctggggtggcagcaaggagcaacactgccatcagatgagattcatattgatcaccagccccacacaggtgcatcagctgacagtaaagaagaatcccacaaacctggttgggaactaggtgggacaaagatggaaacctcacacagaagcaggaaactagacctagacaaaagcagggacttgagatagaggcagggacttaaagaaagagtttgacccaataaaaaccacaggaaagaactctaagggctgctgtcatgttgatatcttattgctacaaagagtctgttggtcagtcctaaggtgttgtaaaattaatgctcatcaggtgtgcctgaattccaaagggaggagggtatcatgaggcaggtgcaagcccctctttccattatgccctgaactagtttttcaggctaactttagaaagcccttggctgagaggagggggtcattcaatgggttgggtggctgagaattttatttttggtttccagcagcccattctgcctggtctttcagagcgaactgtctcttttaagcaaactctgttactacttaaccctcgctgctactgcagctcccagctgggtcagcccgctcctttcttggagaggaatcttatttccttaataaaccttttgcttggtttactgattggtctcttggtcgaattctttctcctaagaagactgagaaccaaggacccacacttcccagtgatagtgttagtcacggaagcacactcacaatgtgagaagtgccagtttcacttagggatgtccttgaagatgcagtaaacattattacttttattaaatatttgtcctcaaatgcacgtctttttactggtctgtgacaaaatgcgtatagcactataccgcacactgaattcctatggctgtcttgaagaaaagcacttaggtgattgagctgtaagctaagtttgagtttttcagggaacaccattttcactgaaaagaatgactaagaaattatggttattttgattaagtatttgacaaagattttctgaaaaatgaacaaagtgagctagtgatgtcaaaaaataataaacaaataaactggcaatatttgttaccaatgatcaaattacaggttgaaggcagaaatcagaattttggaaaactggtatctgctactgtgatttcgaaagcatctcaacattgcaaaccaaaagtaaaattctaagccatctaaccaactgaatgaaccccctcctcttagccaaggtccttctgaagttaacctgaaaaactagttcaggccattataaaaagaggggggtcagacgtgcctcattatactctcctctctttggatttcaggcagaaatgaccagcattaatattaaaatagagactgtaagactgacaaaacagactctttgtagcaataagatatcaatgtgatagcagactttgaaagaaatcaaagtattttacccactaatatatttcttgacatattttgaaatggccctgcaaagctgtctctggtggggaaaatctacattctgtagagaatccccttccctttccaggtcttttcctgattgaggagagaattaactaagagcctggcaccattttatgtctgataaaaaacatttataatctatttacctaagcctctaggattcatctgtctagtaagaaccttgatttccacaaccccttatcttaactcacacattcctgtctatggagtccaggtctttaaataataactctttcaacaaattgccagtcagaaaatctttgaatctgcctatgacttggaaactcctgcttcaagttgttccgcctttccagacctaaccaatgtacatcttacgtgtattgactgacgtcatgtctccctaaaacgtataaaaccagcttgtagctggactaccttgttgaccagttctcaagacgtcctggggctatgtaacaggtcatggtcctcatatctagctcagaataaatctcttcaaatattttacagtatttgactctttgtcaacaatacttgcaagctttcctgatgacattggtgctgatatttaaaagaaaatgtgattttttgatattgtaaaatgaaatgggtcaacatttggaagtgcaacatcactagtgaatcaatattttccaaattaccaattcatgatattatacaatcacgtgtagatacaagaaccattcaaaatgcaagatagaccagaagttcattgataggattttagaatccacattgcaactaactataagaagccaccacgtgacaagttttagtgtagtattaaaaaagtatatatgcaataatctgaaaaagctattaaaatattctcttttccaactacatatatatatgaggctgaatagtctaactatacttcaataaaaacattattgctacagagtggatgcaaaagcagatatgagaatttagctggtatctgctaagtcagacattaaagacatttacgaaattgtaaacagtaccacctttcacagtgattttcttttgggggggatataattgtttttcataaaattacatcatttatgttaccatttaatggctttacaattgctttttaaaataaatgtataaatatatattttttaattttctcagtttttgtttataatatggtgcacatctataggtataacctacataaacaaatgactttgcagaatctccaatagttctgaacagaataaaaggagccagggaccaaaaagattgagaaccaccagtttaagccaatcagcatatctcccatatgtcttgatgtctgaccaccataggtggtttagggatggattgccatctgagtagtgagcagttcaggaggggttctgggcattttaaaaaggaaaagagttttcatttctctcccattctgttcactctggcatgaggtgtctattacaggagctctaagtggggagatggaaactgcttgggtggcaggaacagtctgaggatacagcagcttcctgcaaaggcagagttcctgcaggtgtgctgctgcagtgtggagtccagtctccttaaagccacctcacatttggaattttcagtttcctaaggcaggcattcccttggctagtaagtccacttgagcaagttttgtcacttgctaccaggcaacttacacgacaacctggaggagatcctgtcaccccctggtccataatccaacgcactgacaaacgcaattccctgtgagtggaactagaggagagtttcatttcttgggagcagacataccccagagtactaagaaaccattgttttatgacacaattttctgtctgactgtctcttgggaattatcttttattatatcaacagcattatatgtgaatgcatctgttgctttcaaaaaatctcaaatcgaactattctcttctgtaagcagtcccacttgcaaatctgtggagaggcagttcatttcttaagaagagtgtttctgaaacaaagtgtttaaagtccttgaaacatattaagcaacacaaacttcttatgtttggttcattattctatatttcatgttatcttattggtatctccaattcattatatttaatggtatgtttgaagataacttgaatttgcttggttttgttgtttggttggttcagcataaaggaaaaccacattcaaccatagatttctacagtaactggaatcacaggtcaggaagctaagatgtcagtataaataggggcacaatctccactcttaaagcagtgactctcaaaccctggcatccataagagtcacctgggagggattaaatcacagaaggttgggccccatacctgaggtttctgagttagcaggtttggggtgagacaggagaatttgtacatctaacaaatgctgctggtcctgggtccacacttcgagagccactaccctggaatatcttagtgtgagataacatggttagctgctgactactaaagctgctgacagctacatttggaaagatttacagtaggtaacgggaagaacaggcatcctaacctaataacctgatcaatgagatctcaaatgggtttacacaatgctaaagatcttctgacttaatagatcaatgtctctgcactacaagtgcaaagatgctcagggcaaccagtagctggaatcaaattgaaggtaaacttggatatctggggagagttttattgcacaggtacaaaaaaaatggacaagagttttcaggttgacattacagtgctactcctgccaccaggcttagcaagtatgtaagtgccaccatctccttggatttgatctgtaatataaatattcattgagatcctatcacatgctagactcagtatgaagtacatggtatagagaggcaaaggcaaataaaggcatttctccttggtattaagacattttaggattcaaaggggtaaacacaattttattaaaattttcacaacgtaatttgcaaaagatgtaagcacaaaatacaagtactgctcaaggttacacagcgtgccgatttatgtaacaccctcaacgctgaccctgcaggctttatgaaatgactccactgaagtgccagcctaattctacccagctctactgtgagatgactggctgctgagaactgaaatctgcaaacaaaagttaaattatcacccactggctgctaccgtataaaaaggaggaaagttttaatttttctactgggggtttggtggtgggtggatggaaactgaacgtttttagttgaaatggacgtatcctacttcaactctaagtccctgcagaacagtgggtgtgtgatttttgctgaatggcaaataaagccagctgtttcttcaattctacgggaagagactcaaagaagccgagtgatggaaccaatttttggtagttttctgttggctgattaaatcaaccagaagtgccatagtgagtttaatggtacgatacaagagtctggagcacatgtcagcagaccagtgaagatgcttgtggcttgaagtaacagaagacgatctagaagttgcttaaataaataatgggtttatcctcttacaaaccatagaatccataggaggagcagtatcacggttggtcaattccatagctcaataaggctctactctcaggttctcctcctggtcccaagatgtccactgtagttccaagcatctcatggtgccacaaggacatctaccttcatgtagtttcattcaaatagatagcctgagacaaggattcgcgtgcagaaagcttttttaagaggtgaatccaagaatcactgggaaagatgaggagtaagacctaaaaggaaccacaggttcgtgaccaagaaaattgcctcaatgggtcactggaggttaatcccactgggacctctgggagcaggtgtgaaacacacacctcagagctaccctagggcaaatgtaactgccacaggcatctgatcggggctgctgttaggggtgataattccagtgcaattctgggtcctggactggtggttaaagactgcacccagattaaaatgaagaggtggttgattctggtaggattccatctctgctgttattggtggttgttattcgtatttatttctgaaatattcaattattgttgttactggtggctgtagcattcatattatgaaataagaaaacatccccagaagttgctcaggtcacatgaaactggaccaatcactgacatgaacgaggagatccctgagacgggcttagtaaacaatgactcgtctgctgtggctgggagatcatgttcccccagcacatagccagggacaggacgaatgcagaagccaagggtggctgtgaagtcaccaaggaagggggaggggctgatgggtcagaaatcaatcatgtttgctgtaattagactacgttagagataattctatgccatctgaatgtagccatacgttagaggtaattctattccatttgaatgtagccaaagggaagttgtcctctttcccgtccctggatggacactgttgaacaggaatttaatcccattcttaccgcagggtgaccacaaaacctctatgaatgctaggagttatttgcaggctactctttattgtctaagtgttagtttgaaatttaaggccgggcgtggtggttcacgcctataatcccagcactttgggaggccgaggcaagtggatcatgaggtcagtagttcaagaccagcctggccaacatggtgaaaccctgtctctatggaaaatacaaaaatacaaaaattagctagccgtggtggcgcacgtctacagtcccagctactccggaggctgaggtgggagaatggcttgaacccaggaggcagagcttgcagtgagctgagaccactgccaatgcactccagcctgggtaacagaatgagactccatctcaaaaaaaataataataataaaaaagaaatttaaaatgcacctgaagacggagggagaggagacacaaacagcagaagtggcttgcatgtgcaccgtgggctcatttcgaaaaaggggcactgccaaagtgtgtctttctgaatttaggaagcagccaattagaagtaaattgaccccatttttgatctgctattcccaatgcaaagggaagaaagtacacactaacttagagaaagaaaatatttagggattttttttaaagaccattgtgaataaggaaaagtttttttttaaaaaaagcaaaagctccttcctgattatgggttttagacagcacaatcccagagggtaaatgcttgctagtgggaaatgaggataaagctcagttgctacacgcaccatgaaaagcagcaaggtgtccctgccatgcatgctaacgggctatcaagaggtgacctcatccgcaggtactcaccctgcaggaactcaggatgacagactcccctctacaggaaacttcactgcctgtgggtgacaacgggcctcactgccccttcccgacagcgcacagtggaatccacgctgactcagacacagggcacagtcacattttaggtgaactagagtcacgtagatttgagagaaggcaaagtaacaaacgtgagtgaagcttcatgctgtgcacagtgtctggaataaggtcgtgctgccttgacgccgcctgttgaattgtgtggagctggcgggcagagggaggcctgccctggacggtgcccggtgtcccacacagggtctaaggcgggaagtgggagatgggatctgggaggcaggcaggcctgcacccagggcagagggtctgtttctttctttctttctttctttctttttttgttgagacggagtttcactcttgttgcccaggctggagtgcagtggcacaatcttggctcactgcaacctccgcctcctgggttcaagcaattctcgtgcctcagcctcctgagtagctgggattactaggcatgcggcatcacacccagctaattttgtatttctagtagagatggggtttctccatgttggtcaggctggtcttgaactcctgacctcagatgatctgcccgcctcggcttcccaaagtgctgggattacaagtgtgagccagcgcgcccggcccagagggtctgtttgtaaactgggggtgcactaaccccagtacctctgcttggaaataattactccttagattcttttccttggattctgaggaaagccaatttcgtggctttcaagtaatttctttctaaaatcagtctgatgaaaattaaattaattttgtaaatgtttcttagaatgcgacttctatacttcattgagaactgttgtttcagtgaatggatgcaatgtaggtaacgaagggttagatagacacattgaaaagatgttacttggaatattactcatatgctatacaaataaaaacaataaataaatccatctggtgggctcaggagagcaaagcagctctgtgtcgtggtgctaggtgactgcacagccaggggcagccatggagaccctgcgcctacacaaagacatctctcccaggggctcatcggccagctgtggactcactactgtgaggatggttgtgggccgggctggggatgaggaatgagcagagggcgctggagaggaagcccacaggggaccactccagggagagctgagatgaaagctcctgcttttcagaggcctgaggagccagacctgagagaagagggaggcttgatgcatccattgcccagacagcattcatccgtgcttatcatttcatcttagcagcttcagcttgtggagcatccaccatgcatctcactcagggtgaccgagggaggtcatgggactcacgtgagctcacccagttagtaagtgggagaggtagaatttgcccttagatcattagatctctctgaaacaaattctagagtccaaattctccaatgagtttttaaaatacaattgtggatcatggtaatttggatgtgtgactgtgtgtagattttctttgttcaaatattcatagtgactttatttagcatagcctcaaactagaaaaagcccacgtgtccaccaagaagaaaatgcataaacgttgatggcaagggcaggcactgaatagttccacagcagggaaagataacagtgtcttccacatgcaactacatggatgagtctcaggatattccgtgtgaaagaagtgttacacagaagcgtggatattgtatccttccatttataaaaaactctagaaaaggcaaatctactctaggatggaaaaaaaaagagcaataatttcctctggttacctaaggatgggaactgatgaaggagatgcatagaggaactctatggggcccgggtgatgatctttgtctcaatcagagcttgcatgtgttggaactcatcaattggtacatttaagatgtctgcatttcattgtgtgtaacgtttacaataagaggaacaaacattaaactcgaattagtgagaggcatgctgagatagttgggtagagtatatttatgcttgcatcttactttgaaatacatcaaaagtaagatggattaatagatgcaagaaggatgaacagattgatagatatgtgataaagcagacatggtttaaatgttaattatagaatctaggtgatgggtatatgggtgttaagtgtaaaatctgataaacatgactgcacgtctaaaacattttgtaataaactattgggggatatatacatgctgggtttcctctattctgaatcagaatctttgggaatattaaaaccctaaaagtcaaaaaacaattagagagcaaaggcatcctatgcactagaatttgaatttctattttgactaggggcgaaatgatgctacattagccagagcagcgattgtgtgcagagcaaaatgcatttcacgttttcgtgtttattgagttgttgaacaatggttaggagcacaggggtgagatgttatgaatgcccttctgagtggagagaaagctgaaactcagagaagaaaggtgaggtatccaggctcacataagccgtcagcatccacagcgagatgaaaacccgagaatatagctcagggctttttcacaatatcacggtgggtcccacacatgaacaactgggaaatctaaggtttgctgcgcccctcagtgttctcagatatcaaatgacaggtgatgcaatacaaaataaagtcaatgagaaagacctccaactaaggaagcagccaggtcaaaatgatggaagttcagaagcagccggattgccagggaaaaggagatgcagatgcccgaaactccaccaaacactcttcctgcttgcagagacgcagccagagcaacaatgcagtcaacgctcctaaggaaggcagctcactctctcatcggatctgcttggcgctacatatggagtctaagaagaccctcttaccacctggaacacatgaagatgctttgcagaaggatagtggaatgtaggccctcaatcccctagaccctttcttatgattttccgagcgttctcttttctctagcttacttgattctaagaatacagtatctaatacatataacatacaaaatatgttaactggctgtttttgttactggtgaggctacccatcaacagtaggctattagtaattaagttttggaggagtcaaaagtcattccgccggtcctgctcagcttggctgatggcacctgcgttattatggctccccagcggctgtctgctgaaataatttattgccactcgcttgcatgctggtgttagacatctctcactaaataatgtgaagatatccttgactgcaatggtcaaacctgaagtgattaccggggccggttggtaaggtaaacaaaccgggtatcaaagagaaggcagtgagcgctgcgtccatgtgccagactgagaagtcctgccttgctaaaatccgtaaatgccagaaagctcagaccaattgctaccaaggagaaacgcgggcctagtggtcagattggactttttaatgaaagacaaaaattccgtttttctggaatgaattttttctggaatgaaacctgtagatttgtggatggttaattcaattatgtctgcagatagatacattttttttttttttttttttttttttttttttttttgagacggagtctcgctctgtcgcccaggctggagtgcagtggcgggatctcggctcactgcaagctccgcctcccgggttcacgccattctcctgcctcagcctcctgagtagctgggactacaggcgcccgccactacgcccggctaattttttgtatttttagtagagacggggtttcaccgttttttagccgggatggtctcgatctcctgacctcgtgatccacccgcctcggcctcccaaagtgctgggattacaggcgtgagccaccgcgcccggcccagatagatacattttaagtattttccaggccagtcctcacatgtgggagccaatttcggcccatgcgtctttgcatgcaagctccgctttctctttgcataccctctacctacactgaccatctccgcgataatgctgcccgaaaaattaactccaaatggtgtgggttgaaactgtagcaatttcttcttaagtgttgcttgggtttttcttactataacgttttacaattaataattatctggatttgtaattaaaatagattcacagaatgagctccatgaaaatggtgactgtatcagggttctccagagaaacagaacaacagaatatatatatgtatatatttgtatatgtgtgtctataagtatgtgtataggtgtgtataaacatatatgcatacatatgtgtacatatatctgtttacataaatatatacacatatatgtgtacatatatctgtttacataaatatatacacatatatatgtgtaggtgtagctacacaaatatgtggaatacatattatacacacacacacacacatatatatgcagttgacttgaaacagctcagaggttaggggtgccaacccaaactccccacattcaaaaatctgtgaataacttctgactcctccaaaacttaattactaatagcctactgttgatgggtagcctcaccagtaacaaaaacagccaattaacatattttgtatgttatatgtattagatactgtattcttagaatcaagtaggctagagaaaagagaacgctcggaaaatcataagaaagagaaaacacatttccagcactttgcagtatttatcgatactgtacgtttgtgtcgtttgtttacaagatgaattgtctgtctgaaatagtggcaaccatggctgcagacctcagtctacagcacatcccaagcagttcacctttctcttgcaatgtcataacttttctctgcttcttggaagcacttccagcatcactagtggcactctgtatgggccccatggtgtcaccgaaggtttacagtattgcactaaacacaacgaaaaatacttgagaaccactagagatcactttttattgtgatatgcaatttactggagatgaactgcccatgccaagatggctagcagcacacagggatttaagcagatactcacaactctcaggcttgccaaaacagcagcaggaggcacccacaaaattactacagtagtgcagtgtatgctgcagttaactttatgcagttgtgatatgtatttctatgtatatcctcttggttctgtttttctagagaaccttgaaatacatacaattatatatatataattatataaatatatatctatatttatataaataaaatagaaatattcaacactgcatctttacatttgtttacatttcttttgactataaatgacactgtgaaggtctgccagtgtatgcaaaagttttgataaatgttgactttttatattagatttgtataattttgtggcagtaaatactgaaaagagactagtatctgcatatattatttgcattcatgacatacctaacgttcagtttttgatatttgcaggccacaaggttcatgcgcaacttttttcaatttgtctcaaatgttcaaaaaatttccactatgtttatttttaaaaatctgcatgagtgtacccatgaagtttcaaactctgttgttcaaaggtcacctctgtgtgtgtgtgtctgtagagagagagaatagttaatcgtatgtgtcaatttgactgagctaagggatactcagatagctgataaaacattaattctggatgtgtctgtgaaggtgtttacaagctggagagattagcatttgaatcagcagacagagtaaagaacatcatcctcgccaattcaccatccaatctgttgagggccaacgcagaagaaaaaggcagacgaagggtccattttctctctctctctcttcttgagctgggacatctgttttctcctgtctttggacattgaagcttttggttctcaggtcttcagattccagaacttggaccggtgcatcctcttctcccctcttcctcagtcctcgagccttcggtctcaggctgggagttacatcagcagccctcttagctctcaggccttcggactcagaatgaatgcaccccaggcttccccggggccccagcttgcaagtggtagattgtgggacttctcaaccaacatgatcatatgagacaatttcgtaataaattacctctcatatttctatgtatatctgattggttctgtttttctggagaacgctgagtaatacaattatgtgtgtgtgtgtgtgtatatatatatatgtatgtatatatatatgactaataatattatatataggggataataaaattatatatctattatacaatacacatgcgcacacacacacatacacatatatgtgtacgtatatatataaatgaagagatttattatgcagtattggcatattggcccacacaatatggaggctgttacatcctacaatctataccatctgcaagctggtgacccaggaaaggtggtgatatcacgtgaaggccagagaactggggagctaatggtgtcgtttctgggctgggtctgaaggtctgagaaccaagagtgatgagggcaggagacgactgatgtcccacttaagcaactggtcagagttaattcaaccttcctcaatctctagttctattcagaccttcaacgggttggagcatactcacccactttgctgacaggagatctctactcagtccactgattcaaatgctcatctctcccagaaaaacccacacagacacacctagaaataatatttaaccagctatctgggcatcccacagtccagtcatgttaacacatcaaaaattaaccatcacagggacttggtcttattaccattgaaggctcactatccagaaaagtacttggtagtaggtgttaaatatttgttgaaataaataaatgaatgaatccctctttaatattaaaaacaattttccaagggaaaaatgcttttgaacgatgaatgctgatcctatcctattagatgccttttgtaaagagagaaacattgaatgtatgggcaatattgccacaagagaaagttgaaatctcaatgaaacctaccttctttcacctatccttagaatttacacagatttttgtttttagttagtgtattagtcagggttctctacagggacgaaactaatcagatatacgtatatatggaagggagtttatgaaggagaactgacttacacaaccacaaggtgaagtcccatgatagactatctgcaagctgaggagcaaagaggccagtggtggctcagtctgagtcccaaagcctcaaaagtggagaaaccgacattgcatcctctagtctgtggctaaaggcctgagagcccctggcaaaccagtggtgtaaatccaagagtccaaaagccaaagaccctggagtctgatgttcgagggcaggaagcatccaacacgggagaaagatgaaggctggaagactcataaatctgctccttctatcttcttctgcctgctttttctagccatgctggcagtcaaatggatggtgcccacccacattaatggtgggtcttcctctcccagtccactgactcaaatatcaatctcctctggcaacatccagaaacacccagaagcaatactttacatcattcaattcaatcaagttgacactcaatattaaccatcacaatgagagacacataagcctggattctgccaaagggaaagcctacggtaaagttgggtatgagtggtttatttggaaatgtgatctcagggtgcaggagggagagggactagcaagagcagaggaagagggacaataaagacaagacgcatcatcacattgaccatccaaagaggtaagtggctacttggcccatggtacttcccaataggccttaaggggtcagtgcagagctgcccacttgaggaacgaaaggaagggaggtttatctcttggctccagctccccagttagtcaaggttgtcccaggaagcacttactcctccacctttctgggatgcaaacaccttttcttcaaggtgaaaaaaactcgggtcgaaaataagacacacagcctaagtgaaatgtgaagccatcagattacacctgcacccatccagctgaagcctgtacaggactggtcaccacatccacgcctgcattcgagttgaaatcgagagaacttgaaatagtgcccaaaggtgtccaacatgaatgtcttgtgttattaaagaaagttccccacataaaatgttggaggaaggtttggtggaatctacagtcatcttcatttagtaacagatgtctacatctttttagtatcatcttaaaaacctacagaaacaaatactgagatccctttaaaaatcacaattagctgggcgtggtggcatgcacctgtagacccagctactcaggaggctgaggcaggggaatcgcttaaacccgggaggcaaaggttgcagtaagccgagatcgcgccactgcactccagtctagtgacagggtgataatccatctcaaaaataaataaataaataagtaaataaaaataaataaataaataaataaataaatcactgtctgttctgacctttatcctgttagtgtaaattagattgacatagttcatcactgatattcagaaatttcaaatcatgggcaggagtctgatatggaactctatacctccaaattgacatcagataatgattaatgatttatagtgatagccatcaattgtaccagttttctcaattggcattactctgcaatgcacggacaacattactggcaaatgctgtagtttctatatctgaccctccaaacttcatgttgaaatttgatctgcaatgttggaggtcaggcctgccggcaggggtcatggtggcttggtgtcatccttgcagtattgagtgagttctccctctattagttccctcgagagttctttctagagatggtttcttagcaactttttctcttgcttcctctcttgcccacgtgatctctgcacagccagctctccttttccttcggccatgagtgaaagccacctgaagtcctcaccagaagcagacgttggcaccatgcttcttgcaaagcctgcagaaccatgagccaagtgtactagggttctctagagggacacgactaataggatagatgtatatctggaagggagtttattaaggagtattgactcatatgatcacaaggtgaagtcccaccataggccgtctggaagctgaggagccaggaagccagtctgagtcccaaaacctgaaaattagggaagccgacagtgcagccttcagtctgtggccaaaggcctgagagcccctggcaaactactagtgtaggtccaagagtccaaaagctgaagaacatgcagcctgatgtttaaggtcaggaagcatccagcatgggagaaagatgaggtagaagactcagcaagttggcttttcccaccttcttccatctgctttatcctagccgagctggcagctgattggatggtgtcacccagactgagcgtgggtctgcctctcctagtccattgactcaaatgtcaatctcctttggtaatgccctcacagacacacccagggacaatactttgcatccttcaatccaatgacgttggcaatattaaccatcacaccaagtaaacttctttctttataaattaccctgccacaggtactcctttataacacacgcagactgagacagtcaaaaacagacttcgtttgaacatgatttgcaagtcatcccatttgcccagaacaccatcactacccacagcatgtttaacactgagagcatcaatgagatacagcaggtacagacgggagggtcagtatcagctgtgctatgccaaagagagttgaggttttctctggttttatttcccgtcttgatgaaacacgtctgctttttacattgtgtcagaacaatgacttacacatcacagtccacatggccgatcccatgtatttttgacactgtgatcacaattttgacagcatcccaagtcccttttccttccagatgttttgggagcacgtagatgctgtacttctctcaacgttgttgggtatttggcttgtttctgttttaatcagccatgctgcagtggaactcatctgacacttagtttacttcggagtgtggtcctggtacttaccccccagagatggggtcacagacccagggttacaagtaactctattgctctcaatgcagagtgtcaggcactggaaacgtatgcacactcacccatttcactgctgagtatctctgaggcagggggtgatgagctctgccttgagggctggctgctggggtttgtacattagcttagtacttcctagtgttgagaacttaggtaaatagtatttgaactacttgtaagacgtgagactcattttctttctttctttttttttttttgagacagagtctcaccttgtcgcccaggctggagtgcagtggtgtgatctcggctcactgcaacctccgcctcccgggttcaagcgattctcctgcctcaccttcccaagtagctgtgactacaggcacccatcaccatgcctggctaatttctttttttgtattttcagtagaaacagggtttcaccatgttggccaggctggtcttgaattcctgacctcaggtgatccacccacctcggcctcccaaagtgctgggattataggcattagccaccacgtccagccgagtttgttttttgttttgttttggagacagagtctcactctgtcaccaggctggagtgcagtggcacgagctcagctcactgcaatattggccagactggtcttgatctcctgactttgtgatctgcccacctcagcctcccaaagtgctgggattacaggcgtgagccactgtgcccagccctgagactcattttgatcatctacagaatgaatgggaataatttaaaagaggttttaggagattgtgtccatatgaaacatttagaataattcttggcacgtggtaagcctcaaaaaaatgttcatcgtggctatgtactctatgattaccttaacttgatggtctagaaatggcaaaactatagtgatgggaagcagatcattggctgcctgtggtctagtggagagggagggaggtgaggatttcactaaggaatgacaacatgaaggaagttttaggatgataaaatgtttcgtgtattgatggtggcaggtacagaaatctgtgcatttgtcaaaactcacagaactatacaccacaatgggtgacgttgactctttgtaaactaaaatctgaattttaaaatggtagtttgcttttgtagctgaaacaagcagtcatcattctaggcactgcgggtgagaggtaaacacacatgcttccacagagcttgcactccagtgagaacagaccaacaaacaagatgaatgctatgaagaaaataacctgcgctatgaggatagagaaagacccgtggggggtgagcttgccttagacagaggaatgaggcgggtctgtctgagcaaagaatcccttggagacataaatggcgagaaagcatcacccaagtgcagaatcgggaaaaggatgtagcagcttcataggctgttcaccaacacactgagtgttttcatttaattatttatttcctgattcaacggaccaaagggaaaaaaggtagtttgtcaacctctttgattattagttgatcagagtattcttacaaattttctcttttataaataaatatttcggtttctgaaacctgtgagccttttgttcaataggaaacagttaatttttttattagacctccagttaaacatgcctcaaaagttagaaattttaaatcacactgtgtagtaatagaaagaaaaggctaataaatagttggtcacaattcattcctactttgaaagcttttgattgctatagtttttgctgaaggagtacaaggtgaaaaaaaaaatgaagttgtcaaaaagtttcaaagaatagtaagatctttcttcctcttccacccagtatctccccagatgcaatttctgtctctagtgtattgctaatataagtgatagatttctcttattttcagtactaatgtttttacctaatagcaaaccctagtgattgatacagattgttcatactgcttcttgcttaaaagaatagcctcctttccactctttctatgcaagaggcataatttgccactttcacgaccttcgagcatggctatatgacttcctttggcctcatggtgggtgggagttactccccctccctttgactttaggctcagccatgtgacttgctttggcctctggttcgtggcaagcatgaagcaagccacccggagacaggctggggtggatggaattgctttatcgcacctctgccatcccaacggagagcacttcttagctggcccattgctctaaagaggacgaaggaaccagatggcctagactaggctccacagggcttggcttcaacctgtgggttggaaacactgcattatttgaaaggacattcttagtctaggaaagactggcatgttctcagacagtgttaaaaagatctccagccattcaatcatacataatgaaattaccgatggaaagaaagaacggctccacatgtgttcatatgctagcaaaagagaggggaatctctctcatgtggcaacaggagagtggggacagagccagcatggggtgttgcatgtggagtctgctttaaatctgagagactctgagctacttatttaaagtgtatgtggcagtttcctcgattgcaaaatgaagaaaatactagtatcactgaggtatggatttgagaattaaagaaatggatacaaataaagtcactaaaacagtgctgacatataacactgatcaatacacagtgtcttcattatcattttcattaggaattaaggagaggcaatggcatttcatccatattaaggaaacaaatgaaatcatcagaatggtagaacaatttaaaacatatgttattaagggaaaaagccaagagtgttacatacacactgtcatgcccatgttctacatagccaaggacgcccacattctacatagcagggatgaggttttgtgaggaagagaaagaaggtggccacacactcaaaaccacccatttgttttggaggcacaattcaggaatctgcagagaagatcagcaatttttcaacacatttgaaagtggagcagccgcagggctggcaggagcgctgtcattggttggctgcgtgtgggccgcgcgttccatgcgttattaaccgtaactgaggcacttgtggagattattggcatgtaaggagctgtctcaaatgattcctcaaatgcacaaatgactggacagttgtgtgatttgctgacatggatttccaagtttgatttttcaaaatttcattaatttttatcacatgttaaatgttcccggaattctttcaaagggatttcaaattggccattttagaagcatctagcacaaagatgagaaatataaaaagattgatatttcctcaaaatgaaagtatcatataatgcatttccaatcaaaataccaatgagatatgcatgcatgtgtgtgtgtgtgtgtgtgtgtgtctgtgtgtgtgtgagggggtatatcttgataaattttaaaaataattttgcaagaggaaagcgaaaaatatttgggagggggaaaagaaaaacataatagagaaagattcatcctattatatgtcaaaatgcactgcagaattgtaataataataattaaaggagaattgtgctgaaataagaatagacaaatagttctttggaataaaatagagggtctagcagcagaaccaggcacacattgtactgtggcagagacacggctatgtgttcaccttagttcttcctgcctccattcacaggactacgaaagctcccagcctcctctgcagttaggttggggacgtccagctgagttttgcctcctgaatgtgatgggaatcatgtaagcctcctccagccttagaccttatagtcacgacttccatcctgtggccaacttcaaggccaccttcaaggccaccttcaaggccatctgccacagatagaataacattaagatgaaactgtgacctatcttagattgtgcttgtgggacaaattcagggtgtttttggctatagtgtcttagtcactttaggctgctaacacaatgtatcccagactgggtggcttacaaacaacagagattgactcctcacacttccggagcctgtgagtctgagatcagggtgccagcgtggtcgggttctaggagagccctctaccaggctgtagacaactgatttctcattgaatgctcatgtggcaaggagaagagaactctctgagctacaccgggcactaatcccattcctgagggctccaccctcataacccatctcccaaagtcccacctcctaataagtgacgtggagttagaatttcaacatatgaacctgggagtgaacgttcagtccatgatacacaccaatgatcttcaaggcttatttgttacaataccatagcctagcctatcttgactaatgcaggtacataacatgatgaaggtggcattccaaatcaatagggaaaggatagaagactcagtaaatggctatacatgttaaaaataagaaaatatgagatagataccatgaaccataaacaaagcccactgacttcacacagtcaaaatacattaatccctcacaacacagtaggatataggtgtaaaggccataaaataagttggaaaatgctaataaaaaatcaaatgaaataaaaaatgtaaaaatagcatgtgcatagcaatttcagctagagcaaaacatatcactacagcactactcacaacagcgaagacatggaatcaaccttacatgcccatcaatgatagatgggataaaaaaaatgtggtacatatacaccatggaatactatgcagccataaaaaagaatgagatcatgtcctttacagggacatggatggagatagaggccattatcctcagcaaactaatgccaggaacagaaaattaaattccacatgttctcacttataagtagaagctaaatgatgagaaaacatgggcacgtagagggtaaggatacacactgggcctatgtgagggtggaaggtgggaagagggagaggatcaggaaaaataactaatgggtactaggctcatttcctgggtgatgaactaattcgtacaacaaacccccatgacacgagtttacctatgtaacacaactgcacatgtacccctgaacttaaaagttaaaaaaaaaactcgctccagagccctcaggaaatgcattcccaaagctgtaaatatggaacggtttgtacttatgcagatgcctagctttctcctgagtcacatttccattaaaattcaaacgtgacaccttgacattcaccttaggccttctcggctctcaccatccctattcaatgggcagtttccacaaaggagccgtatttgtgtcaccacaaagtatgacaacaaaacaaacaacaaaacataccttcagtgagatcaggatgctggccagggggtatattattctcctattgatgatataaaaaataaaatcgcacgcatggtgcctcaaaccaacagcaattaaccacgttatagctctgaaggtcagaagttcaagatgagtctcagtagattggaatcctggtgcagacagacctgagctcctcctggagacaccggggaagagccacttcctcacccttcatggcttctgatggctgcccagactccttggctggtggccccatatcactcagacaacttgccttattagtctccatctcttactctgaccctactatttcccttctgtaaaaatgcttgtgatttctgtggatttacataaatcattcagaaaagttccatatatcaagatcattcgcttaattccatattcaaagttcctttcactacctaaagcagcacatctacagattctataggttaagccacagtcttctttgaggggctcttttcagccctcacagaggactgagctcgctggctaaccagcatgactcacttgtgctccggaatcactcaacatgtttataatctccagacctgaatcactcgtcaatacatattcacaattgtaaatgttaagtttgtaattactgggaacctactttggtgtaaatataaatgccttaagacaaataaaagaaatgaagaaaatgggcctgaaataggatgcatggagttgccagagaaggtggatgaaaggtgaattgtggggttttttccttatttttatttatttatttttattattattgtttttgagacagtcttgctctgccacccaggctggagtgcagtggcgccatctccgcccactgcaagctccgcctcccaggttcacaccattctcctgtttcagcttcccaagtagctgggactacaggcacctgccaccacgcccagctatttttttctttttttttttttttttgtatttttagtagagacagggtttcaccgtgttatactcatttataaatccaaataatgtttaattttaatatattaattatttgcttctggaatcataccccaaaatggaaagtagcaacaaaattactcattggtaccattcctgaaagcattatcagaatgccttccttcagccgtgccttgtgatacacaatctggggtttaaaatagaagaaaccttcttgcagtggttcgaatggcttggaagcactcatctttttctttcctttttttaaacaagtaggagacatcagtcagaagctctttattttgtgaggtgatacggtttagctgtgtccccactcaaatctcatcttgaattgtagctcccataattcccacatgttgtagagggacccagtgggagataatggaatcatgggggtagtttaccccatactgttctcattgtagtgaataagtctcatgagatctgatggttttatgaggggcttcccctttcagttggctctcattctccgttgtctgctaccatgtaagacatgcctttcacctcctaccatgattgtgaggcctccccagtcacgtggaactgtgggtccattaaacctctttttctttacaaattacccagtctcggttatgtctttatcagcagcatgaaaacagactaatacatgggggaagggatggacaattggtacctacccgcatatgcaaggacaaacgattcaagtatacaaataagtattcacttccagctgtccttcttgctatctcctgctcctaccccgtgtagacccccacacatatttcaaccagcaactaataccctagagaaagaacagtgatgcaggtaatatacattctccaggacaactagctgatctcctttggttggctgcttgatgacttgtgggcaggtggaccaaagcttatcgtcatgggtggttgagcaaatctacagccacagtccctcggcgagcagacagagttatcgcagctcaacataaaaacatttattctgttcttaccagtaggattaattccatcaagtagtgaatctcctgctgcaagattagtgtgatcaaatagatttcatctcctggattgttccctggacttttatagtacatttctcttttctgaatttcattgtttttactcactcccctctgagactaaattaaaccatcccttttcatgtatcttgtttctaccctctcaaatatgttctattatgttctcttttagttaccacttagccaggagtacatatttagttcctttaatctttcttcataaatcaattccttcagtaccttggttaaagtgttgctctttttatattttgaatttttttcattcctctccaaaccctgtccaatttatctgtgtctctctgctaatgaggtgtctgggatgaaatgtgtttctccaggtgccgtctcatttgtgaggttgagatgagcaacccccatccttgccattttgtcactttgctcctgagacacaaagggccaccacgtcagaactgccacattctgacaccgccacggctggaacagatcgctgcagcaggcttgcctccaccaagtcccttctaatacaatcaccatgcaaggcgcttcctccttccaattacccacttttcatattgctgctcccacaggtatactgttaagtggcaaatgcttccaaacgttatttcactttctgcccctgtttctcatggatcttgtaagaatctggcaacatgtccaatgaataggacgcagaattgtgcttccattctttttcactggctgtgtaaatgaagggtgagaagatcgctcagaagaaagttgcatctgctgcagcaaagaccagaaatcacagaggcttaaatgagacagccgtctgtttttccttaggctgtcgggatgcaagcagcccagagctcaatggcaacagggcttgggcatcctgtgtttttgcttcactatcataactgttttgtcctccttcatccacacagtccaggacagctcattttctaaccagcatggaggagggaggaggtcctgagacctcacccccttgtcatggtccaatttgaaaattgcaagcatcatcttcagtcatatttccattgaacggaccaccagcatctgacttcatctatgcaaaagagaagctaaaaagtcaagtcttttattcacagtggtcacgctgaccatgtgaagctatggatgtgttatggtgagagaaaagaaagaaaaagaatattgaagacatctggacatctcaagaatccacaaaaggaatgaaggcagaacgtctccaaacccaaggcatgaaagaaagaggtatatacaaactccgaatagcaggcagaaggactggaatgaaggttgaggaagaagggggcactgttgagggcccagtgagtcagatcaaaagggtagccaatggcatatcctcatcatggcttccaaagattcgtgggtaacccttaaatgacaacatcaattatctactatgcatcccttgtatcggaggatggtgatggtggtaaaattcctagagcatgcatcatccatatcatcaaacagcaataatttcagaacagaggaactgtgctttggaagaaggcttcaagaagaatgaaaatccatgctgcactttgcaacggcttcatacattccattctttctttctgaaaatagcatgccaatgaaacagaatggattctgtcattcaatcagcattttgagtgaaattggcttttgggttttttttttctcggttttaggaactagggtggggccacatcatacattcactcaacatatatttatttatcaagtgtttattccaagccagtcactgaaggtacagtgatagcaaaaaataataataataaagaaagaaagagaaaaaagaaacctgacctcacgaagcttttttccccctctaatgagggggattatttgcaaatacattagttagaattaattcaaagagaaatgagaaaatgtaaaacatgaagaattttgagtttgagagtgtaggacatgatgcatatttaaatggataattctgactacttaataaataagcacaagaatgagtagcaattcatctctttccttcaaaaattcaagatgggtccaattgacagtaaaatacagcactgataataaaaatagtattgagttattaacctaaagattttgcactaaattgaaaacttatctagataacatatttgaaaaaaggctaataaagtttttttctttctaaaccacaataatctgatccgatttccattataaaaagtaccatgttttattagaatttaaaccccactgattataagacatgtcttaattcgtgtaacactaaaatattcaccaaaactctgcagaatataattgtaagaaactactgaatataatgtccatctgattttagggagtaaaaaaaatagctgacttggaactgggaagatatggttctctcttcccaggttccacggatcatctttctagatggaccgagatgtagcaagaaaaactaaaaggcactcccaaattattgccatttgaaatactactcttgcctattctaagtactatgtcattatttttatttttgaaatcttccctttcacaggataatccaactggtctatagaatttggcaatctctttctttggctcaacttctaagcatttaggagacagatatgtgtacacacatacaatatgatatgtgcataaaatactttttgtggcatgatataaaataaagattgggaacaagctaagcatatcctagtaggagactggttaaataaatcacagtacatgtgcccaataaaattatttgtacatattcaaaagaatgagccagctctacatgttatgatatggaaatgctgtgtaagatgcatttttcatggactcaaagtaagatgcaaaacaaacagtgtgtgctatgtgaacgtttgtgaagatggagcaaggattataggtctatgtgtgcaaaagtgggtctcagaaagaagatgcagacaaaggacacagctccgaagcaggatttctggaagacacaggaaagaggactattttattagtaaaaacctctgtagtttgtaattgttttcatgtacatgtgctgtctattcaacagcaatgaggaggaggaggttgaggaggaagaggaagagacacaggagggtggacacctgggtaaattcccaaattgatgccacatggaggtatggaagttacagagacctatgaggttcaggttttctgaattttcttccaaaagctaaaatacacattctataaaactaatcactctggggaaaaaaaaggttaatcgtttagaaacaagggtatgtaaaaaatcagggaaattaaatggttggaaagtccttctgactttcaagcttagaagctgcaagaatactggactttttgtttgtttggttggttttcttcctagcaccatcatggtgaagtaactttcttcaatggcatcctggcaaaactatcccaactcaaggaaacagaagataaaaaatgtgatgtgattccagatattttattgtactatacaaattctattacaagcatagaagaaagacaagtaaaactggtcacacattggctgggtccaagtgtgttttaatatgtccatgaaatgaatcaggtctcagacacttgaaggctgggaaaagttttggactgattttaaatgtgctgaaagtgggtggggagcaggaggcagtaaagatgtgaagggtgggttaaaagaaaattcttgatgacaaaccctgaaatattgcacttttggcttttgggaaagaccggtaattgtcaccaaggaattaaggcccaccttggagaggaagatgtttttcctttacttgctcaatactcagtattgcagactaaaataaattggcattgtgccggatgtaaagcctgtgcttcacaccttttaaagcactgggaggtgcagagaaatgcagctggcatcaaacgtcacggggaacttactcctcttgacatgtattttttttaaaatgtcaaattccttaatacttgcagggtttttaaagtttttatatttcagttacaattcacccatgcctttttcttcccctcatctttgcacatatcatcctgatattaggcaaccccctgttatgtatcatttagtgtcagactaagaggtctcattttgacagatttccaaggcatgccaacagaaaaccaaggggctcacttctggcttccgtggttcctgtgtaagccggcagtgcaagagcaaatatccctttgacatggagggtacatgaagcaaacaggaatggttcagagccacaaccacggggcgcttcccagcgctttccctggttatgcagaagtggggttaaaagctttttaaagctgatttggcttagcaaccccataagccatatggcctccttgaagatgatgattcgcttccacgtgatttgtacatttcaggtgagtcaagagattttcttgacagtcatcacatagatggccagctacatgcacactaacgtcacatcaaagtccaggggaaatgaatatgttgttttcatagctgccaggaggagtgaaaatcaagagagatcctcagtcatgcacagtaagttgcttttggtttctatgagaaaaatgtaaaaagggatatttcacatactgtccattaagccaaaatgtatagactgttggaaagcacagcctttactcgaaaagtggctaaataatttttcactaagattagagaacacatgcatagtccaaaatgatggtagcaagcagtcatacttggcattgtagcaatgtgttcaaagctctcctaagtcctgtggaagttctctctcagtactgggcactttgcctttttatactgatgtttcacatttgctattcctgtaagttcccggtagcaggagtgttgcctccctatcatccacggactccccctcccctctctaatgtggcctctgtacatagtagggacttcattaacacttgctgagaaggcttgcaatatctgggactaccgctcagtttgtggaaataccacttcccatggcactcaggaatgaacacaatgcaaatataccttgttcaatagactcagggtttataatcacagacaggtacagctgaaagcaaagtatgaacctatataggttaacggctttgttttacataggaggaagcaaatgtgataaagaggttacttgctccaagacacagatcatgttaaaagcagattctagactagaaacctgatctcctcattaattctaggtgaaatcagataatatgcaaaaattaatgtgaacaggaagtgacatttaaacctatcatccattcagcaacactgtactgagtgcttatcttgtacctacacagctaaagttcctcagggtagatttatggaccttatattctagtgaggtgggaggaacacagatagtgcatacgtagacaagatgatttgaagaaataaaatacagtgatgtgcagagatatctttggtgcaatgttactttaggataaggattacttctgtgaggtgtctcaaatgagctaagaactgaatgaccacagggggagagaagaggtgtcgtagcttgaaacggtggacctgatcctttacacctctcagtacccacaacccttgctactgtgactttccaattcctcccaaaaaaggggcgggggatatttctccatcccttgtctctgacttagacccatgggtcatgctttggtcaacagaataaaacaggcatgactctaagctggttcccaagcagtcttgtgcattgccatctgtgttcctgcaatttgtctatggctgtaagaagaacatcaaagggtagccttctgaccctgggggccagatgataggtgtgtggaacagagccacccgcagaggagctgaccgactgcagatatgggacggagcccaggcagggccagaagagccacctcactgagcccagcctgcatgagccagtttccagtggtccctcagcctcccagtgccatatgagctagagaaatgctgatttttatgctgtacacgttttgtaaacacttattctacattattgtttggccatatcccactgacacacttgggaagaagttggaagcaggtgttctaaaaaaaggaatcaataagttcaaaggcttgaaacaaagtcctggctagagtttgaagaataggcagccagtatgactgagaagctcattaaatgtgtgataatgtgatagagcacaatttcaaacatgatgtacacaggagacaaattgggtatggttttgtgggccatagtggagatgttatcaggagtacaatggaaaaacactggaaggttataaattgagaaagtagctgatctatagctcttactcatgataacaagctattctgtagggcatgggacactggcaggtgagaacagacccaggcagatgaaaggaggctattatgatggctctggtgagacgatgttcttcttcttttccttgaagtatattgtgtgtgtctatgtgtgtatacatatacatgaatatacatgtatactcgtatataatcagatgtattctatgcattttttatatacagttgtcccttggtatcggtggggaattggttccagcacgccctgcagataccaaaatctgtggacaccaaaatctgaggatgctcatgtccctgatagaaaatagtgtcggtcatattgcatataatggcacacccttctgtatactttaaatcatgtctagattacatgtaatgcttaatacaatataaatgttatataaatcattgttatattgtatagtttagagaataatgacaattcctacttttgaattacttcttctatttccccactcactgcttttgattgaattccatatgcctctgacctcattcgaatggtgtttttttttttaaactcctgtttgaatgtacccatcaccccatccaccccccgccaataaagcccttctaaatataggacccagtctgaactcggtaggaaattctgtgattgtctgagctccacagctagtccaaggcagatgggaaaatcctacctttaaggcatttgatgatgtgaagagaacacttcaaccaatgcacctacacgttctaaatgctatgttatggttgaaacgcaggtgagagtgtgaatacaatattttggttccctgactacacatttttatttttaaagggatttctttcatgtttcacttaggggaatgatattttcgtccttggactgcctgagggaacatgttcagtacagactttttgtttccaaatattttctatccacagttggttggatccacagacacagaacccacagacacagagggctgactgtatacaatcaagataggagaggacatttttgctgatctcagtgggagaggtacttaaacaaacaacagtgatatactcctgtttactttatttgtacacattggtaaccagaatgtcataaattattcttcaggccctgaagtgttaaaaaagtatttataaataaaataaaaacaactttcctataatgaacaccccatacttacatcaaacagagctgtagcgcttaccagcatggtaagtaaaatgattataaaggtaagtgttccatcaagattccccagaagcaaataacattcacggagtacaagtaggacagtcccctgagacagtaatattgtctctgaatccatcatataagcatgttccctcaggcagtccaaggactaaaatatcattcccctaagtgaaacatgaaagaaatccctttaaaaacaaaaatgtatagtcagggaaccaaaacattgtattcacactctcacctgcgtttcaaccataacatagcatttagaaagtgtaggtacattggttgaagtgttctcttcacatcatcaaatgccccaaaggtaggattttcccatccgccttggactagctgtggagctcagacaatcacagaatttcctaccgagttcagactgggtcctatatttagaagggctttattggcggggggtggatggggtgatgggtacattcaaacaggagtttaaaaaaaacaccatttgaatgaggtcagaagcataagaattcaatcaaaagcagtgagtagggaaatagaagaagaaattctaaagtaggaacccagccatgacatacttgcaaaaacaacaacaacaacaacaaaaaactacaaaggaattcaactacaaatataaattgtacacatttggaaggtgtagaattctagcacactataagccggatttcctggacagattcttataaaattcagaagtgttttcacacattacatcttccatgaggaaaaggcatcctataaaatgctccttatttttttatgagctattgagaagcacagtttactctggaataactcaagggactttctttaagagggctgtaaagacaggcaggctccaggtcaaagcccctggccatataaacacaccaagcttatctctgatggacgtgactgacatctgaaaaaagattttctatggaatgtccaccccaaatggaatcatcacttccttcatcctctggagcacgttcccagctctactgcaaaattagaaatagatgatgtgtttggattttctgttgttgttgcttctaagtctttaccggcaatagtggcagaaaataagtaagaaatgctataatcctaataaataaaagccaaagaaacactatagaacctaataaataaaagccaaagaaatactacaatcctaataaatagaagcccaataaatactatcaagaaaagaaattaaaaacaaaaacaggcacggaatagtcacacctcacagaaaaactgtattgatttgtaaagatctatgttttggtaacgattgcagaaatttttctgcttttcaagaattcattccctctttctctgataccacaagctgtatttccacctgtccctcactgggagtacatgtggatgagtgggttgattctattctaagctgagatgggcctttgattaaggcctggctgctcagaccatctcatggcactgcattgtaacttgcttagaaatgaatatctaatgacactaaaccaatcacagaaaatgcttatacttctgaaggagtttggagagaatctctttcccctggggttgttgagagagaaaatgcaagcccaggtttctggcagccaaatttccatcaaagaggggaccaagctgaggatgcagagaggagagcacagctgagaagtagaaaataatttatggctgtggctctgtttaaatcctagagccagtcatgctgaaagcagcaccacctttggaattcccagttttatgaaccaataaattccccattttgcttaacccagtttgagtagggtttctgtcacttgcaattaacatatccacaactaatacatttcagtgaattattagcaatcctttgtttataatcagacaaaagaaataataaaatgtgattttgaattacagaggcattacacaccagccactatctattctgcaaacagggtttccttccagtcaaatgacagtgaatttaaacctaaaacatgactactgagaccacactttgtttaatccgtcagaatttataattgctttgaagctgtcacattttaaacataaccctacaaccataaaactgttgactgtcatgaatcagtgggattcatgtattgtataattcacacattttaagtgtgtcacatatatctagtgcattcaggcatattttctagatattgtgggtttggttccagatcatcataataaagcaaatatcaccataaagtgagtcacacattttttggtttttggtttcccagtgcatatacaagttacatttacacaatgctgttgtctagcaaatgtacaacaacattatgtctaaaaaaactatgtacatgcttcaatttaaaaatactttattgctaaaactgatcatcatgacctggaccttcatcaagacctaattttttttgctgctgggaggtcttgcctccatgtggatggctgctgactaatcaggttggggactgctgaaggttggagtggctgtggcaatgtcttaaaaaaggcaacaatgaggtttgctgcatcaatggactcgtcttttgacaaaagatttctctgtagcatgcgatgccatttgatagcattttacccacagcagaacgtccttcaaaattggagccaatcttttcacaccctgctgttgctttatcaaatcagtctttgtaatattctaaatcctttgttgtcgtttcaacaatgctcacacgtcctcaccaggagtagattccatctcgagaaaccactttctttgttcatccataagaagcaattcttcctctgttcacattgtgtcatgagcttgcagccattcagtcacctcttgaggctccacttctaattctagctctcttgctgtttccacacctgcggtgacttcctccactgaagtcttgagcccctcaaagtcatccatgagggttggaatcaggttcttccacactcctgttcatgttgacatttgggctcctctcgtgaattgccaatgttcttcatggcatcaagaatggtaaatcctttccaaaaggttttcaacttactttgcccaaatccatcagaggaatcactatctctggcagccatagccttatcaaaggtatgacttgaaagccaaaattactccttgatccatgggttgcagaatgaatgctgcattagaaggcatgaaaataacataaatcttcttgtgtgtctccatcagagctcttaggtgaccaggtgtattgtcagtgagcagtaacattgttaaaggcatctttttttctgagcaacagatctcaacagtgggcttaaaatattcagtagacagatgtgtgctgtaaacagatgtgctgtcatccaggctttgttgttccatttatagaacacaggcagggtagagtaagcataattattaagggccctaggaatttcagagtggtaaatgcgtgttggcttcaacttaaagtcaccagctgcattacccaacaacaaggaagtcagcctgtcctttgaagccagaaactgacttctcctctctagctatgaaagtcctagaaggcaccttcttccaatagaaggctgtgtcatttacacggaaaatcttttatttagtgtaggcaccttaatcaatgattttaactagatcttctggagaacttgctgcagcttctctgtcagcacccttgctactttgccttgcacttttatgtcatagagatggcatcttttcttaaatctcatgaaacaacctctgctagtttccagcttttcttcttcagcttcctcattgcccccagccttcatagaactgaaaagttaggctcttgctcaggataaggctttagcttaagagaatgctgtgactagcttgatcttctatccaggtcattcaaactttctccatatcagcaagaaggttgtttcactttcttatcatctgtgtgttcactggagtagcagttttaacttcctccaagaactttttctccacgttcgaaacataaccatatgatacaaaagacctagctttcagcctgtctccactttcaacatgccttcctcactaagcttaatcatttctagcttctgatttaaaatgtgagatgtgcaactcttcctttcacttgagcacttagagaccattgtagggtaattaactggcttcatttcaatatttttgtgtctcagagaataggaggcgagaagagagggagagagatagaagaatagctgtctgtggggcagtcagaacacacacatttataaattagggtgaaaatcttacatgggcatggttcatggagccacaaacaatagtaacatgaaatatcacggatcacagatcaccataacaaatataataacaatgaaaagttgaaatattgctagaattgtcacaatgtgacacagagatgacatgagctcatgctgttggaaaaatggtgccagtagacttgttcaatgcagggttgccataaaccttcaatttatcaaaaaaaaaatctgcaaatcataataaagcaaaacatgacaaaataaattatgctgatactttcattatcacttgttttgagtggtataataatgatttatttgtctttctcattggagtccattcacttctaccttcagtacataggacagggtttagcaaagatatggttcttcattggcagaacagctacaagggccaactctatcatcaaagaccatcaggtagaaaagtaaaaactgaaaactagaccgcctgtatgcaagtattatatccacactataggctaagaatgtgcagacacctacccatatctcagtattccacctttccaaaaacagagtaccaaaaactatgatggatactaggaaataaaaatgtcaatatagctatccgtgagctcactgaattttacttcctaaagcagatagaaatgttgcctggaatttcactggtttatttaaattgtggagaaaaggcaatggtaatatgcaaagtaagagaaaagagaaaaaaaaaactgaaaagtagataaaaagacatagggaggagaagatgaactgaagatagtagatttatacctatcccatccaactccggtggcagaaatgtgttggcctctgctactgatactagtcacaggggcatatgacttttgttttcaacagaccttgtttttcagagcagttataagttcacagcaaaattgagaggcaggtacagagatttctcatacatccccttccccacacatacacagccctcctccttatcaccatcccccaccagagggttaatgtgtgtattagtccattctcgcctgcaaataaagacacacccaaactgggtaatttataaagtacagaggttcaattgattcacagttatgcagggttgggtaggcctcaggaaacttacaaccatagcagaaggggaagcaaacacgatggagaggtgctgagcaaaagggttggaaaagcccctaataaaaccattagatcttgtgataactcacttaccatcacgagaacagcatgagagtaaccgcccccatgattcaattaccttccaccaggtccctccctcgcacaacacatggggattatgggaactacaattcaagaagagatttgggtggggacacagagccaaactatatccatttgttacaactgaggaacctatctctacatatcattatcacccaaagtccaaagttggcattagggttcacacttggtgttacacattttatgggtttgaacaaatgtacaatgacaatgtacccactgttaccatatcatacagagtagattccctgccctaaaaagcctctgtgctctgcccatctctccccaacccaattcctggaaaccactgacatttctactgtctccgaggttttgtcttttgcaaaatgttctacagttgaaatcttacagcatgtagtcttttctaatggccttctttcccttggtacattttttcttttgtaagttttcctccatgtcttttcagggcctgatagctcccttattttttgcactgaataatattccattgcctgacttctcaacagaagacatttatgtggccaagaaacatatgaaaaaaagttcatcatcactggtcattagagaaatgcaaatcaaaaccacaatgagatactatctcacaccagttagaatggcaatcattaaaaagtctggaaacaacaggtgctggagaggatatggagaaaaaggaacacttttacactgttggtgggagtgtaaattagttcaaccattgtggaagccagtgtggcaattcctcaaggatctagaaccagaaataccatttgacccagcaatcccattactgcgtatatacccaaaggactataaatcattctactataaagacacatgcacacatatatttactgcagcactatttacaatagcaaagacttggaaccaacccaaatgcccatcactgatacactggataaagaaaatgtggcacatatacaccaaggaatactatgcagccataaaaaatgagttcatgtcctttgcagggacatggatgaagctggaaatcattattctcagcaaactaacacaggaacagaaaaccaaacactgcatgttctcactcataagtgggagttgaacaatgagaacacatggacacaaggaggggaacatcacacaccagggcccgtcgaggggttgggggtaagggggaaggagagcactaggaaaaaaacctactgcacgtgaggcttaaaacccagatgatgggttgataggtgcagcaacccaccatggcagacgtatacctgtgttacaaacctgcacgttcagcacatgtatcccagaacttaaagtaaaattaaaaatatatatattccattgtctggatgcaccacagtttatttatttatttacctactgaaggatatcttggttgcttccaagtttgggcatttatgaataaaggtgctataaacatcccggtgcaggttatttgtggacataagttttcaactcctttggctaaatgccaaggagcacgagcgttggatcctacagcagcttaggtcatttttaattcagaacactacagatgtcatcatttccagacctgacccaactttccagcctctggtaattgttttcagttgaattagagaagaaaagatgctttcaaatcactgtaatgcacctaaccaattggaaaatggcatcatggaagaaactccttcccctcatgcctgaagcattatcatacttagatactgaagcatgagatttaattatcattatcgttatctaagcttgactagcttcaaatgaattccaagttccagttccagagacccagctaagacacaaaattaagacgctattagcagacttaatattcaacaatacaaatgcataccttactaagaaaatagtttaattaaaatagccttggccttgagagaaggggcagtgaacaagaggagatgcaagatacttatttagaacctctttcccactttagtaatctctcagtatgctaattttagtattttcctgttcattgtatagatatgcataaaagtaagtcacttacccttaaaaatatactagtgatataaatctgagacaccttcgatttggctcatttttaaatgttctcatcattgttccggtttcagatttttttgtcatgtattttgtagtttgtgttctcctgtgtgacacccaaaaacccatcagtgtgccaccaaatgcttgggacatgacgggcatggttatcaaactgatgtgcacttgtggggacattagttttaccacggtattgtagattggctcattactgactcatgtctaaaagatatatatacaaaacacaaaggaagaggcaacttattctctggagaacacccatgcaccctactttaaatctctcacgttatatggaagttctatcatctctctcacatccaggaaaaaatggtctcgtctgatcttatattctcctgaatagtacttgaatgacacttgcatccagcactagaaaatcatacatcagttccccttggaatgatcttatgccccacaagcagcctttaaattattatgggaaattaggcattatatatatatatatatacacacacatatatatatacacacacacacacacacacacacaaatatacatatacatatatatatatatatttgtagatagaaagtgtgctgatgagcaaatattcatgtggaaaccttgacagtcattttttccattgtaaattaataaactggcaatggcgtttctcatacatcatttttttcatgggtcagagttgtggtttgcagttaacagcagctatattgcaagggacaagtaaacaagcttagattccacaaagccagaaacaatgcagccaagaaaacagccaggaacctggctcagccgccccatagagctgctccagctgcaactcccctgctgtactgtggcctccagggtggctgtgtatgctagagaattaacaatcaacataccattgaggtggaacaagaacttgaaccctcagctactgtgcttactaaaatcaaaaaacaaaaataaaacaaaaaagacactttctctgcacagtgtatccttcactgggatggtgctcacatctctccctgggtcttcacaggggtgccttcagggtagaacagtacctcgattctagatggaaccctagctgtgatagtcttcgggaaatgtcattttagtttccatccactctagttcagaaagcttcaaaggggcttggggcaattgttgatcgagccggtccacagactccacagtcttccttgagtagggcttggggaaattgacaaaagatacatgaggggtatctaggtctgtcatatgtatgtaggtagagagtccctaagttagctcagagtctgccgcagccccggagccacacagagaagcagctaagatctcttgcatccctgagatggtgtgggcgagctcagtgagagagagacctggcaagtaacgtagcaacgataaggctctgatgtgagcaggcagacagctgaggaccaggctggacaagatgaaccagtgaccacaccaaggtcatcctccatcactccaaccccaatacaggcactacagaaaacacctgaaacttagaagcaacttttgggaaggatagggagaactcagaactaacaaaaagacactaagttacttgtaactgagataattttctgcccacttgggtagaaagtgggcggcaagaaaaaaagttacattaaattggagggaataaaaactacatatcttaaacatctgagtatattatctgattcaagaactctctaccaaaatgcttgttatatgatgtaactctcaaaatgctacctgattctaaagaatgcatttgctcatagaacagtgagaggtggcaggtgcattgttcattctcttggatttccaacgaacatttattatgcttttctgcaattgttactttccttgtctatcttggaaatgaagaaactgtgttctcatctctgtgtctccactgcttagtttctttttctttctttctttctttcttttttttttttgaatagtcactctgcaattggggagggtcgcaagattaccttgttcaacaatttgttagaagaactcacagaatgtggcaaagctggtatcctcaccatcacagtttattatagcgaaatgataccgattaaaatcagcaacaagaaagaaaaggtgcttagggtaggatctctgggagcctgggtgtagaacttccagttctctcccagtgggtcacgcagagtgggctcattcctcgcagcaaaaacctgcgatcgcatgcacagagtactgctaactggggaaacccctctggagcttggcatgcagaattcctacgaagggttgctcccacggtcagggctgaccacctgcaaggctgacctcaacctctagctcctccagagatgagtcaatgttgggtggatcaagcctccactataaattcatttttagcatagactatctgtcttggcccaaggtctccagataaacaaagacactcttacaggcaggaaattccaagggcttagaggctaccacccaggaggccagacaaagggccaagcctttttctggtgcagttaacccttgactgcacacactgagtgttcattcaataaatagaatgaccgactacaggatgaatagatgaacagagaccaattccaaaatgaagacgtatttttaaatgcctttttctgtgttttggagtacctgtagatttcataccagctttcccccactaccctctaagatatagaggctgcttgctgagtttctcatggcataaatccagcttttaattccacccatcaacttatagcatacttttcaagcccagaatcactattgctcaagtgtattgtaccagataatcacactcagcccccagtgaatgtgctgactgcggcgggggaggagccgacagatcagcgttgtttctgtggagtctgtgaaatattgattgctgtgggggaaaaacagataacacattgcaagaagaatagaataatcacccacaaacccctggcttttaaactaaaatcactgtgaaggaacagcgaagtgtgttttaaggagttttatctacccctcttcatcctgaagcagcagaaataagaactctgatgtttactcacttgaagtgcactggcttttcaattaacggaccagaagagtttgcaaagactatcaaaataccaacttttctgcagggagtgagctgtgatgcccagactaggagacagacactctccctttagaagcccaacctaatttcagtctggactaggacttgttgctgttttcagtctgcaaaaatgaggcctaactatgtagatgatgaatgaaggttcggttgtcactaaaaagggtaccaaggctctgagacaggtcagagcttagacaaccaaagctcctatttggcaaatatctgacactgttgatgagagactggcttgctcgctggatggaaatgcagtcaattttcttctgaaacctctaagcattctccttgatatccactgtttctgaaaaaatcatgtcgcgtttacagctaagaaagaacctacatattccgtagaaaagcaggtagcctcttttaatgggtaagcccaaaatatcaaagttgatgaagccatcagctccggcctttctccgtctgtcatgcttagcatcctcatttcttcctattctacaattaccaaacaaacctcctcctgatttggctgccaaggaacctataagaacagagcggttctcaaagttcactcgcactcaaattgcctggtggccttgttcaaatacagattcctaggccccaccccaaattttccagcttagtaggtctgggctctgagttgggccctcaaattgttcttttttttttttttgagatggagtctcgctctgtcacccaggctggagtgtagtggcgtgatcttggcccactgcaacctctacctcctgggttccagcgattctcctgcctcagcctcctgagtagctgcaattgcaggtgcccaccaacacgcccagataatttttttttgtatttttagtagggacgggatttcaccatcttggtcaggctggtctcgaactcctgacctcaggcgatctgccaaccttggcctcccaaagtgctgggattacaggagtgagccaccatgcctggccaagttgttcacttttcataggttccaaggtgatgctaatattgatggttgggaaccaccttctgtgaaccactatctgaaagagtcatcaacatatcacgagaaagaaaattctacccttcttagagtaggacatagtgctacatagagtcttgccaaggactcatcccatcctttaaaaacccccgtggcatggttggcatcccaaaagagacaaaggcctcttaaaaagcgacaggaaaactgacaatgacgcaatgcctgggaagtcaatcctggtcattagcaaggcttggactcagccttgatcaaatcttgatcaaaccagggaaagggctggtgctctcccaactgcaaatgctgggctggcaggtgagtgtttaagccaaggttcagcactacgttgttcatgctctggtccagacactggacaagggccagtgtctcctcatcccacgaagaggtcgggcccctcttccccagtcagatgcccgcctttctgagctctgtatgctgccctggacagcaacgtggaacggaaaccacacccctgttaccacgtggatcttccagtaaaaacccaatatgattaaagacacagaccagggcctcagggaacacactccccactgggggtttatccctcaagccttgtcctagaaaggggcgtggtctacatacagctcatgacaacagtgacatcctctctcctttaggactaaataaagtgaaaagagaggggaaggctgggcacagtggctcacacttgtaatcccaacgctttgggagaccgaggcaggagaatcatctgaggtcaggtgctcaagaccagcctggccaacacagtgaaaccacgtctctactaaaaaatacaaaacttagctgggtgtggtggtgggtgcctgtaatcccagctacttcaggaggctgaggcaggagaatagaattgcttgaacctgggaggcagaggctgcagtgagctgagattgcaccattgcactccagcctgggcgacaagagcaaggctctgtctcaaaaaaaaaaaaaaaaagagagacagagagagagggaaaagcagtacattattgaattgattgaattgacacgtgcattatacattcttctatcttaaaccctgtaccccaatctccctaaatagcttcaacaactatattccctaatatattaaagagtcaatttcctgttctaacataggagcttcacttctactttcatcttgatcacctacttccataaagcattaaaacaactcaaaatactggagtttctttttctagaagtctggctcattctcgtggggttgggtttctgttgaaggtactctgagaaaccaccgtccagccaactggctgggaggaagtagcccagattgcttgcatagagccatgtccagcatcacttaaatcgtcagatttatgaatatgtgggctctattccttgaattacaagcaagtaagtaattgatgatgttaacataaaaaaaaaaaactttagaaggctgctctcttcttccttaagtgaattacgaacttgttcctaggacatattaggaagtaaacagcatataatcgcagggatttacagggcaattaggttaagcactgcaaaagtgcattagtctgacactgcacaaacattctgataacagacagatcaaggcactggtccaaattgctccccagagggaagcgtgcattcacctagatcaggcagaaccataatattcatcaatccccaaactcatgatctcagctgcaccccaggaatccaaaaaaatctatggcagaattcaaaccaggattgcttgagaaacattagacgcctgcttgcctcactgccttcctttctttttcttcccttctttatttttatttttgcatttaccatgtgtcagaccctatccgaagctctctccacatagtttaatacttagaacatcctatgaggtaggtactgtagtgtctagattttacttttaagaaaacgaagacatggaaaggggacctaactttctttagcgagatcagctaactagtgtatttttcatggtaattaacactagctaccctcagtttgcatgcggattctgtcatttgggaagaattcccttatctgtaaatgtccacagctcttggcattttgaaaggttcttccttttgctgtgatcctccttgtctacaactgaaatgggggttgtggatatttttcccagttacttccttactcatggaagcttgggggcccaaggcatattttaagtgtaagtagcttagcacaacaaactttttcacttagaagtccaatggacgttgactggggctctcctccatccagtgacttaaggatccaggctccctctaccttgtaatgccaccatctcaacacagggcttccaggttcactccatcatgggaggacaggaatggaggaggcaccctgatactgaagtgccttgaactagagataattcatcattgatgctcacatttccatccgctacaatgtcatcttgtggcctcagcccaattgtagggaaagtctggagatgtaggggagcacagggctattggatgagcataaaccctcagcaaagactgtcttccagccccttcccacacattgaggaatacacttaacagctcccattctgttcccactaagagaaacatccccaagtctcatgctctcactccatccagctcacaacgcagacactgggccgtggccggtcgcagtaccctatggaggtgtggctcttcatagaaaggagacaactgatctccaccctagacccaacatgcaatggtggaccaaggacagaagaaggaagatgcactcatttgcgaaaggagagctggggagcacacagcagaccatgggctgtaacatccatcacatttcaatgacgggccctgtaagttctccctacactgagcatgggggtgtccttgttcactggctgatcttactaaggggaggaattccctgtccatcactgcctgcggctcttttctctgctctcctgcagctctgccctttccatcctcccccttgtcaacatccacagtgggtgtagaggaagaaggaacgcctcctggccaagttgcataaattctgcagcctgcttcttgctcctggacgcttgggggaccaagaattgtttcacatcttaagcagtaaaaaaataaaaataaaaaatcctgttaaaactgggctaatgatttcttcgacagggcaatttccttaaaagtgtagtaacgtagtagacttactcttacaggcttaaagcttagtaaccttaaaaacgtatttgcttctggtctgttccataatctattaattatacccagagttctttttaaaatatatatatatatatttctgagactcatcttatttctttgtttatcagtcccatactgctccccaaaatgtgggaagacatgttgttaatttggccccaggcaactcatctgatgtacgcttagtctgaccttttgcccctgaatcaaagacctgggctttttggaaggcagaggttgcagtgagccgagatcacgccactgtactccagcctggcgacagagcgagactccgtctccaacaaacggacaaacaaaaaaagacctggacttttgttgcccaaaggttttgtcaatctaatattttaacatttcatgtctagacaaagtctgtttttcaactttgtaaggccctgaatttcagaaatccctctatccctcatttcctcttgcaaacacaattccgtcctgagcccatctgttctatttaataacttgccaaacataaaatactaacattctgatattaaaccttttttcctagaactacgagttggttaggcacagggtcccagttggttagacacatttcaggaaacagctcaccccgtcactttggcacgtaactgccaagtcactgccttggtttaggtttttttttagaaagcacctgacttctattatcaatttcttaatttgtctggtaatttaacctaaatattataagagataaaccccgaattcctgcattgtaacaaaggtctcatgtaagttgatggagccgctcctctatccactgtctcctggatctgctccatcctcatgcaaacagagaatgacagacactctcgtctcaacagggcgtcttccccatttgctgtgattggggaagataagactggagaaggcacacccattctgtcgtgcccaggcccagcagcaatatgtcatttttgttcacatcgctgcttgacagaactcagtcacatgaccccagtttaaactatgcaggaggctgcaaatgtcaggaagcatacggatgtggctagtgggtgtgccatcgcagcaacttctagggaattgaaaagtcagcatcagaaccgagaggactgtctccagcacccagaagactggctcgagaacccaggcaactgtctccagaacccaggggactgtctccagaaccaaggtgactgtctccagaaccaaggtgactgtctccagaacccagaggactgtctgcagaacccaggggactgtctgcagaacccaggggatcggctccagaacccaaccagctccagaacccaggggactgtctgcagaacccaggagactggctccagaacccagagtactgtctgcagaatccaggcaactgtctccagaacgcaggggactgactccagaacccgggggactggctgtagaacccaggcgactgactccagaacccaggtgactgtctccatcacctaggcaactatctccagaacccaagggactgtctccaggacccaggtgactgtctccataacctaggcgactgtctccagaacccagggtactgtctggagaacccaggtgactatctccagaacccaggggactggctccagaacccatgctcttgaaccctctatcagtgaggactgcacttgttgcaaacagcagaaacctaagtaaagtggcttaaccaaagagggactgatttttctcacatcattggatgtccagaagtaagctgtttctgagatagttcccatagctcagtgagctcaaggccagagggactgatgccctgctgcaaagaggacgggaaggtgggtgaactcttagtcatgaatggcctgggtcaccctgagttcatttgcaaaggagaaagataatggaatgcttaataaccaagagggtcagatgcaatcactctgctataatccctcttagttcaaacagttctgtctggagtttaaatcccaatcactaatatctctgaagtatctttgccatagcgaacggcagtccaaaattcttcaaggaagaagcaaaatctgatccactagttacaaactcagatgtctacagagtccagataaacagaagaaatgagtgaaaccaggctgggcggggactgtggaaaacgaagacccacacacacacgccccgcctaaccacagcagcagctgtaagtcacagccatgcacaccggggaattccagctctccccggaatccaaatgatatgagaaatgtggatttcatgtgatacatcttgattcttaaaagctagccatgtctagttaattttaatgtgcagggcaaactaaatacctctctttgccctgagaatcttccatttctaacctctaactgaatcaatacatctaccctggcccctgcattccggtatttatatctcttgtaatcagaagcacacttgaataaatgtctcatggattcaatgacaataagctcccctgacatacaatgttacctaacagcgtattatatggcaacacaatagccatcgtgagattggacactgctatctactgtcacagggcacaaacacagaacagggaaatttggattctgtctggaaatgatacactgaattatttcactcctaggcaggctctagaacagggaaatgtggattttgtctggggatgaatcactgaattatttcacctctaggcagactctggagtccacagcaacctcatcatcagggatgaatcttccgtcaagctcacttctcccaatatctggccgtttgtttaggtgaaaggttacaaaaggagggttttcagttcatcgtcacagatatggtgactttggctcagaaatagcttaatttataattacatttaaattatataaaaaaaaaagtacggccgtgagaccaggcatggtggctcacacctgtaatcccagcactttgggaggccagtgtgagaggattgttcgagcccaggagtttgggatcagcatgggcaatatagtgagaccccatctcaaaaaaaaaaaaaaaagaacaaaaaaactaaagaaaaattagctgggtgtggtggtgtatgcctgttgtcccagctacttgggaggccagggtgggaggatcacttgagtccaggaggtcgaggctgccgtgggttgtgatcatgccacagcctggatgacagagcaagactctgtctcaataaaataattaaaacaaaacaaaacaaaacaaaataaaataaaataaaataaaataaaataaaataaaataaaataaaataagatagctgtgagaacacagacttgctacccccgtcccagagccagaactggcttgagttgagtggcagctcctctcttctctactggcccctcctacattcctgtcacctgcctggcccagggaggcattcagatgtgcaatggctggtttgaagaaacagaccactaagcaaagtcaaccattacaaaacaggagaaacaaaacaacacattagaaaacaagaggctgaggctgggacacttttattctacttccttgtttggtgggtaaatacagaagagagccaaaattatagtttcactataaatgggatagatgccataatgccagaaaacctgcatgctgagactcacaatgaattaagtgaaagttgaagaagttgcggtagccttcagccatttctgatgcatcagcgccccaatctcatcattcagtatttgcttacatgaaacccaaggcagactggcatggaaccagaggaggaatagatattatcgggagagggacaccatgactgaggggtctttggccttctttttcattgaggggcacagtggtgtggttgtatttgctgatatgagagatgacattatagacttaattattgatatggtttggctgtgttcccacccaaatctcatcttgaattacagttctcataatccccatgtatcgtgggagggacccagtgggaggaaattgaatcatgagggtggttacccccatgctgctattcttgtgatagtgagtgaattctcacaagatctgatggtttcataagggacttttccctcttttgttcggcacttctccttgctgccgccatgtgaagaaggacgtgtctgcttccccttccattatgattgtaagtttcctgaggcctccccagccctgctgaactgtgagtcaattaaacctctttccttcataaagtacccagtctcgggtacgtcttcattagcagcgtgagaatggactaacacaattatgtgcattgtgttttttgttattgttgaagtttgttctgtatgagcaaaagctgatgtaaggaggctgagtagacaaggagatgaagaacactggattttgtcgctgttgtatatttgtttgtgggtttttgtttcattttgttttttgttttttgcatgcatcattcatgttccctacttttgtcttccccaaatcagcagggctgaaggccaggcagtgcatttctcagactcctgtactgccagagttctgaaagcaatttttattttgtccttgagatgcactcacaaagaattttctgaatcccatgggtgtgagtgaagcctgcaggtgagaactgatggagaaaacaaggccatggtaccaacgattcagaaccactggctttgcttacaaaggttaatggaaaatgaagaatggaaaataattaaaggatcctaaaaacagaaaccctagccacctgacttggttgagtgacagacattcccaggaaggtcttctcccacctactcaacccagttgttgtctcaggcctcagcttctcacttcacctccctgtaccccagctgttcatccatgagatggtgtcttagtccattctgcccactttaacagaatgccacagacttggtagctcataaacaacagaaatgtcttactgttccgggggctggaagtttcagatgtggcagatcttgtatataccattcctgaggggtcttgaggcttctttttcattgaaaggagcagcagtgcggttctatttgttgatgcgagagatggagtcacaggtgccatcgatgaaccaggagataaagtcaaggtgctgtcaacggtgcctcacaccagaggacctgcttcctggttcatcaatgtcatcttctcactgcatcctctcctggtggaagggggcagcatctctctgatgcctcttttcataagggcactaatcccattcatgaggttccaccctcataatctaatcacctcccaggggccccgccacctaatacatgggggttaatatgaatactagggggatgcatatattcaagacacagcagatgggaatgtggctttggaagcagactggcctcatttcagatctcaagtctgatgctttctggtacctcgtagctctgtggcctcgacatcggcacttcacttgcctgtgctttcacttcccaatccgtgaaatgaagaaagccacagctagtgggcagtgttatgaggaccagagacaacctagggagcctgctaaacacagagcctggaggcgtaaaatttaattacataagccaacgtgaaatgccatgaatataaatgttacagatgcgagggtcctattccagtaagtttttaaaaagattgtgtgctcacttgctaatctctggacccaaaattgtgagggttttgtttttgctatgttttagaaaatcataatatctaaaatcattcttaaattattaaagcaaaataataatgaggtcagagtagtaatgcttcagccatcataccaacatcagaaagcaattggaaccctattctctgacaaaatttacctgatgtgtttgttcgcttaacagacattgcttttgcactatggttttgtactagtcaatgttccatcccatggtttggcaaaccttttctgtaaaagttgagttactatatttggctttgtagactatatgttctcttaaaactactcatttctactacagataaccttcaaaaaccagaagagaagaggaatcaaatagtgagaatcaaattccttaaaaattgtacagccttctgataaagtcactgtgtatttaaattatttaaaatgcacatctatgtacatacatacaaatacatactgtgaacccaaaagtatttgagacaggtcaggatcaaattaggacatttattttgccaagataaaggatgtgtctgtgacatagcctcaggaggtcctgacatgtgcccaaggcggttgggtacagcttgcttttatatactttaggaagacagaagacatcaatctctacatgtaagatttacattggttcgatctggaagggcaggacaactcgaagcgggggctgcctggtcataggtggattaaaaactttctgattggcaatgggttgaaagagttgttatcagcagaaaggaataactgggttgagataaggggttgtgaagaccaaggttttttatcatgcaggtgaagcctccaaatagcaggctttagagagaatcgattgtaaatgtttcttatcagacttaaggtcagagttgaggttaatgctggaggggataatgaggcatgtcccaccccttcttccatcatagcctaaaatcgattttcaggttaactctgaaatgcccttggccaagaggagaggtccattcagatggtcgaggggccttcgaattttatttttggtgtacaatgcatacatacgctcaggaagagaatcgatctgcatccctgttgaaattctctgataaaaatggtgctctaaaagggacaggttttatcacactgtgatagcagagatccccacagtgctttaaatgcatgtgcagaaatgtccctgccaatgaacgacttatgacctaattaaatatgggaacacttagccaatttccctatgtctacataattttccaagctgtccctattcctaagggattcatttgtctcgggttatccactggctcccccagccccaccacccatttgattttttaacttccgccaaattgccttcatttaaactcaattaacttttaacagaaaaggtatcactgtaatcccatttgcagaactaaattcttttaatgtccccattataaattcctgtttccagtgtttcaaacatgaggatcatctgacatttggtttaaaggtctcaatcaggagtgttaatgaaactcgttaaacaacacttctttgactcacaccgaatttcagtaatcattttcttcttaaatatcatcagaaatagtttaaaaggacatttcattttgcaattgagtgtattatcctaacagaacaggagcattcaggatatgaaaaccagagcttgtctctagaaagtcatccagaatgagtcctattaggttacaataccctaaccacggcccaaagccacgcagcccaggtcagcagtgtgtctaaaccatacacatcaatttctgcttctgtccctaaacctgctcatcctccaagtgatccacgggttgctgtcaccacatcgccagggccatcttcgattctgcacatcctttcaagtccaaaagcaggctgaagctggcaactcaacttggaaggtcaccacagccactgctctgcccaagctctgtctcctggaggctggaattaccgtggcagccacttccctgctcttgggcttttgcttttgcccttgctagtgtattctccacacagaagccaaagacctccttcaaaaatatgtcaggcctgcagaagcagtggctcaggcctgcaatcccagcactttgggatgctgaggtgggaggatcccttgatcccaggagttcgaggccagcctggacaacatggcaaaagcccatctctgataaaagtacaaaacctagctgggtatggtggcacatgcctgtaatcctagctgctcgggaggctgaaacttgagaatcacttgaacccgggaggcggaggttgcagtcagctaagattgggccactgcactccagcctgggtgacagagtgagaccctgtctaaagaaaatgtggtacatatacaccatggaatactatgcagccattaaaaggaacaagatcatgtcctttgcagggacatggatggagctggaagccaccgtcctcagcaaactaatgcaggaagagaaaaccaaacaccacatgttctcacttaaaagtgggagctgaacgatgagaacagatggacacatgggggagaaaaacacacactggggccctcttgggggatgaggaagaggaagggaaagcattagaaaaactagctgatgcacactggggttaatacctaggcgatgggttcataggcacagcaaaccaccgtggcacacgtttacctatgtaacaaatctgcacatcctgcacatgtattccagaacttaaaacaaaaataaaaataaaaaataaagaagtcaggtcacatcatgcccagatccaagcccgcagtgtcttcccacgtggttccaagtggaggttgacacccctccatggctttggtgaccttcagtgtttctggcactcccactcctctgaccaccatcccccatatccttcctcatctcagaacaaacactgtactttctagaaggcaccaagcacactcaggctccatctttgccatggctgtgcgctctgcatagtgtgcccttcctgattgtccctctctcccttccagctctctgttccagggggccttcctgcccaaacagcacccgactgtccccacctgccatcaccctggccctctcatgctgccacgatgctctctggggagctcagcaccgccaccctccccctgcccccactgccacatgttgtctattcatgcacatttctcctctctctccactagaacgtacacttgaggccaagactttgtctctttactcactgccatatccccactggccaaaatgctgtgcttgcaccaccgatgcacccagtgaatgtttgatattaacattctctccccactcctctgccttggtgtccaaataaagtgagtgaatgcttaggaagtgctagagagtgaggcaggtggtgtcccagagctttaaaagagcgacatgttaactattccaaccattatgccagcctggtcaattaacacactacatcttccagtggaggtaggtactatcactatctccaacaaagagtctgaggcacagagaggctaaatgacttgctcagagacacacagctgtttacctgaggcaggtttcgaacccaggtggtctgggactagagccccagtgcgggtgaaaccacctccctttatggatgctcttccttcaagtttttcttccttcttttctccttccttccttcctgttacgtctatgctatggtctgttctctccctagcgcccatttgattttggaaaaggagagaaggttgtgctcctctctggagggaaaccctcaagtgttacccagtctcagtgaggcaacttcctttcgcaaaaagagcctcagtaggtacgtgggggaactctctcttctcagagacacacataaaatccagggaaagtggaaatggttgaaacaataagtgaatcgttaggccacacaaagtctgcatttcgaaacggatgaaaaagcagaagccagcaagagtccacaagccccactcgtccactagccccacaggcataatctggagagaccagggagcttcggtgtgggcgatgacgagaagatgacgttgctgtaatcggcaccgacagtgggcgcgtatggggcagtcagcacgcaggaggggctcttacgccttggcaagggtcactagggaatccttggatatctaatatataatgcaagaaattgaaatgtggataaattttggggaacgtatacctaggtagaggttcaaggaaaagtccagctgaccgactatatcctacatcctagccagatctaacttctctacatatagaaaagtccaggtcaccactcacctcccccaggaatatgtccgtaactatatcagcaaacagggctttccctctgctctgaactctactatatggtgttatacaagccggagctcttttctgtttctgcagtgcagacatgcttggtttcatctacgtagaacctggcggggaccatccacttcttttccatgtggtcccaaaggggctgtcaatcatagtgcccttcccaccagccacaggagtgatcatgtgactttgggtggccaattagagtgacccattgtcattgccatggtgattggttcatacatgggcaaatgagccaatcaaggatgctaagatccctcctttaaactctcagttaaagctagtgtggtaaacctggttttggctaatgggggaatacaaattggggctggaggtggcatctctccagatacgaggtaatgtaagttcatccgcaatagaagaaaatgggaataacacatagaggaaatcagagctgagagggagggggaaggggagagagagatggagagaaagagactgagatttctaaggatagcattggattcatgggatttacttgtccctgaagcaaggagcatgctttttgcttaaaccagtcggatttgagttttctctcacagataatatgtaacaacaaccaactaccttaactacacattttatttagcactttttgttactgtgttgttcctctgggtgaattctttgctttttattttgtattttatttcaatagctttaggggtacagtggttttttggtgacatagatgaattatatagtggtgaaggctgggctttcactggacctgtcacccaaagagtgtgcagtgtacccagtaggtgatttttgtatccttcatccaccctcccctcttctgagtctctaatgtccattataccactctctatgactttgcatacccataacttagctcccacttgtaagtgagaacatgtggtacttggttttccattcttcactcaggataatggtctccagttccatctaagttgctgcaaaagacattatttcattacttttttatggctgagtagtattccatggtgtgtgtgtgtatgtgtgtatatatatatacatatatatacacatatatatacatatatacatatatatacatacatatgcatatatatacatacatatatacatatatatacacatatatatacacacatatatatacacatatatatatattccacattttctttacctacttatcagttgatggacacttaagttgattccatatcttggcaattgtgaattgtgctgcaataaacatacacatgccagtgtctttattatataatgatttattttcctttggatagatacccagtagtgggattgctggacagtcgagaaactcacaatacacttttgtataactctccatcttaaccctagcgcacagcacaatgtcatgcctataggccattcctaaatcaaatatttggttgaataatacatgagtgacttagtcatatcccctgcctttgtttatcttgtgttgctgggaaaactatagagcagagactacataagtctctctgatctgcatgtattataatctaccttagctaattatcacttgacgaatacataagctgtttacactttttcactatttcaatactgttgtggatatccatctccatgtcttttaggagtccaatgcaaaagcttctctttaagaatgaataataaaagggtcagaggggctgcgtgccttcaactttcttcagagacccggcagaacaaaactgggacccccaaatgggacaattgtgaagacttttatgaagagccaattcaaagacatgtgagtggaacaaagaagaaccagtgagggccaatgagtcatccccaggttaggagctgtgtgggacccagaggagcttggggagataatggtcatcagagctcagctggaccagcaggacaagaccactgcagacagcacagtggcatccagtgaagactgcagccactgtcagcccacgccaatgaggaaggagatgggcagacacccagtgctcaccttcctctgccttctgatctcctgccagtgcctcccatgggctgaaagccccagaaaccagacagcaaaagagtccatgctgtgctccatgcaggtcagcctgtcaggcacagggcagagtgaaccagacagcaaggcagtccatgctgtgctccatgcaggccagcctctcaggcacagggcagagtgaaccagacagcaaggcagtccatgctgtgctccatgcaggtcagcctctcaggcacagggcagagtggagaaggcatctggaggcacaaatggggagtcccctccagatgcctctgggaagctgcagtgattccctctggcgacgtgtgagcgtttccattgctccacacctcacaacactcaacattattgctggcttgacagatgccttcacatttttcaacctgattggcatggctactgcctcactgtgcaggtaattttccatgtgtccctgatcattcctaaaattcctcatccgttcagtctcattggctctcccagggccctctctgagcttgcctattcataccttttacccattttccttttggtattgatactttttcattcatttttaagaggtctctacattttctcgatactacttagccattcttttcaatatcatcaagttacggcacaggtacccaacatttttgtaagtttcaagaaaaagacacaaaacctaattttctcaaataaagtgacattattcttttaatctgttttccctctttacaaagtattgttctttcttccacctttggcacctgcacaccaaaaggtttgttttcatcatttccatacccaggggagctgggaaagtgtaaaataaaacctcctgaagcccagaatttttctcctggactgacatgttcactagctctggtctccccaatacgagacactttcattgctctaggctgacgatatgctcacagtttttacaggctgtttcagtgcacagaccagcaaaacaactactgtgtctctgacagagtgtggatgagatctgtaacgctttaggaatactagtcaaacatgaggcatttcaaaggaagccctgcacagcacttgcattatttaaaggcaggatttattaccttcaacacaatttgtcactttatacttgtaggatttttttaaactccctaatctgtgtggttgcatttaaataatgcccactcagagggggtatgtgtaaagtctcaatttaggatgtttactgttgatggctgctgtcaaaaattagatacacaattcagtccaactttaaacaacgtcacgtgtatgactcttcttcaatttaaggtttaaaagcatagaattcacagtagcagcaggtggcatacggctattagaagcatagtaactgacagttgttttccaattgtgtcttctggaaatcttgttcctaatagaattttaattggtgttgagctgggaaaaaaaaaaaagctccacggtctattaattttgaaaaacactggatcaataaagctcagcaggttcttctctgctcaacttctcagagcctttactggtcccaggctttgggaatctccaggaggaagataaggaatgcactattctccaaacttatttaatgctaacttgtttgtttttgttcgtgaaacccttaatatcccaaagaacataatcgaagacaggatgtgcaattttcccaggatttaggaatataaatacttaaaccaagttttagactattttggaagaaaacatcaacattcaacaggcttgtgtgtacagtatttgcatactactcaattgtactttttttctacttttatgtgccaattttttttttctgagatggagtctcgctctgttgcccaggctggagtgcagtggcacaatctcagctcactgcaacctctgctttccaggttcaagcgattctcctacctcagactcccgagtagctgcgattacaggcacctgccaccatgccccactaattttgtatttttagtagagacggggtttcaccatgttggctagtctggtctcaactcctgccctcaagtgatccgccctcctcagcccccataagtgctggaattacatgcgtgagccaccaggccggcctagtgcaacatttattatggcaattgttaaattggctaatgttttttatttttaattttctcatggcttttattagggagctatcctcatcactaaggtttctggaactaaaagagcagtatccatggccccaaagtccatcgacttgtaaggtcagccaagtcagcgttggctaagactgatttttaatgtggatactctacttcttggcactcagaaccacctgtttcaaaaaaggaggacgatatgcaatgaagaattggaaaaggaagcatattacgttagtgattgtgactagtgtgacaggatcaagccagcacaggtgaattgagacgatggcatcactacacccaaaatacgagatcttacaccatctttacacatgacgagaactaggcaagagagcagttcacctgacctccccaaacagtcatgcactgcacaaggacatttcagctaaccacagaccgcctatatgatggtgctcacatacgaatcatgtaagaatataataccatattttgactgtacattttctatgcttacacatggaaatatttaccactgtgttacaatttcctgccatattcagtacagtaacacgatgcacaggtttgtagcctaggagcaataggctataccatatagagtaggtgtgtagtagactggaacagctaggcttgtgtaagtatactccgtgatgtctgcacatcaatgaaaccacatttctcagagtatgtcccatccttaagtgaccctgactgtatacaaagtatcccataaagctgctgaacaccaatgggagaaaccagaaaccttttttttagagaataaaaactaacatatacacacaatatatacacactaatatatacacaagtatatacacttactatgttacccacaaaaataagaaaataagaaaaataaaatttaaaaataataatttagaccaggcatgatggctcctgcctgtaatcctagcactttgggaagccaaggccaggtgatcgcttgagctcaggagttcaagaccaacctgggcaacatggcaaaacctgtctctacagaaaataaaaaaaattagccgggcgtggtggcgcatgcctggagatccagctactttcagggctgaagtggaatgattgcttgagcccagggggtcaaggctgcagtgagctgagatcgcatcactgtactccagcctgcgtgacaaagtgagatcttgtctccaaaaaacagtaatttatatcacacaaaagatttccgataagaggaggaataacacattattattgcaagtgttttaagactaaattgtaattttggattattattcattttgttgataaaattcactagaaatcatttggtaaatgagagaaaatttcaataaagcaagtgttaagtaatgaatatttaacaagaatatcacatgtgttcccagaggactgtggaaagatcatgactttagaatgtgtacttccagcaatttcagaaaaccttgattagaaagaaaagaaattggtggttgctacttctatcagccataggttgtgtgctgagtttctgagtgacagatccaaggcagagcagggcaatgtcacaggaggcaggagggatgggtgcatgaaaccctgttcagccaggacacctgggatgtctcggcaggggcggaggtgtctgtatcagggacgtgtctgtaccctgctgaccattaggcaggaaggcttgcccagacattctcttgcttcttcttcattccacaaataaacacagaacactactatgtgctgggaactctgctagactttggggattccacagtaaaccagacagacacagcccccacctttgctgaacacattgcctcatcggggaatcattcagtggacaaggagagaaatgaacaaataaggtaactgtagaacatggtaaatgttactaaggaaaagcacagtgtggggatactcagtgtgatggccatgtctgtctccctctctcatcttcccatgaccatcttcctacatacctgctgcttttagaataaagccagaatcccttaccatgtggcttggcttccaccaccttgctatcctcatcagtttcctgtccttctcctactctgtctccctccctctccccatcttccttccttcatttctatctctctttctctctctctcctctctttctctctcatgtctttttctctgtttctcatttctctctgcccctctgtctctctctctctccatctttacctggttctctccctctatcccttctctccctccatctgtatgcccctttctccctctacccaagacttacccaccttcgtgccacccttggctctcaccacctgccttctaccatggtgcctttgcacctgccactccctccatctgggatattccctcctatcccctcactggcctctacttctcttccagatcctgtttgcagcatccctgcccttgggaaactcctctgtccggcccatctgcagaccctactccacattatcagagccccagctaatgctccctggtggcactttccagaattataatcttatcttcaagatttttattcaccatctctgtttttgctcatcatttcagccccagcatctagtccagtgtctgacagagttatactcaacagagatttcagaaatgaatctttcaaagctcagttgaaatgctttctccagaaaatattctccaccctccccacctaggaggcatcttccttgatcccatctcggtttaactctgcctctcccatgatgtccgtcttccacattcttccatagagttaccgatcttcaagtgtttcatttcttattactttattcgtggtgttgcattttacttaggatttaggcccaacagttaatgcctaataataaaaaaaaaaaactatacaaacaaacaccatccgtgaaaatcccccggacagccaataagctcagtatgcatgaccttgtatacaaacctttgtgtacactgtttcttgatatggccattatgaaggagttttgtggtggctgccacatgacctagcttggcttgtgtttggcacctgatttatatctttaaagtagcacacagagttgaatttgtgtagtcaaatgtggatctggtaaaattataatctattactcaagatcaagatgtgcttctgttttatctttgaattgagccagcacttgaaaaggagctttgcaggtagcaggaagttgattcatatctgctggatggctggttccattgttgttgttgttaaatggcatatgtgaatacaaaacagacacacaaaaagaacttgcacatgacctccacatgtagattttccagatatcccagctggcctggaacccctggttcactctattctcttgtcagaaaaacaggagctgtccactttcatttataagagctccagtatggaacctaagttatatgtcacgtgtgtgtttgagaaaaacaggcagctgtgaacagtggggctaaatgttttaaatttggacttcaaggcagctggacatgaagagaaagaaagaagaaagaaaaaccacaggacacagattgagtagatatctcaccatcagatgggtagccaaggagtattaaggctgaaaatggctcattttcacattcttgatatgggggttgttttactataaacaaaaaggattggtggttttctagaacatttcttggaggtttcctggaaggtttcttggagtatttctaagaaggagaataattcaaaacactgagagctagcaaatagagataggaaaagttagcctgacccagaaattgccatgatatctgttattcaagtgatcatggtaggaattagtcataactgatatttattcaatacttatgatatgctaagcaaaatagtaagtccactatgtaaattattgctttttattaactttcattttaggttcaggggtacatatgcaggtttgttatatgggtaaacttgtgtcatgaggatttattgctcagattatttcatcatccaggtactaagcctagtacccaataattattcttctgctcctctccctccacccaccctccaccctcaagcaggccccagtgtctgtcgttccccctctttgtgtccatgagtctcatcatttagctcccacttgtaagtgagaacataaggtacttggctttctgtttctgcattaagaaatggaatcaatcggaatgcccatccatgacagactggataaagaattattctcttaatcctgatggtgacctaccccatatggggtaggatgctagaattatcattattattcccattacataggtgagaacaatggggtgcagagatgctaattagcttgctcaaggccacctgaggaggaggtacaaaagccaggattcagcctggagctgtctgacatcaagaactgcttccttcagcgctactgcgtctttctctttcataaacgctcaggtgttaatggataaagattaaagaactctggataaaaccatgggcaccatccccaaattatcagtcggcctatcttatgaaaaagagcagaaagcagcaaaatgcaacctgcagtcgtaaagcctgggttaacagagaggggcagaaaggatcctgggttactcataatctcacaaacctccaaaacaacagaggaaacgaatccagacctgactcgagaagttgcacactaacacattaaggtattcatgagaattactgaggaaaaattctgagcatccaaactgagtgattaatttcctcatacacttagaaaagcaaagaatgtctcataggagcagaagaaatgggatggagagagaatcacatgactgatgatccccggtgatgcgtctgataaacccttagctgggaaaggatcacctagagacaaagtgagtgccagtgattctgcaaagtcttgtctcccagggagctggaatcgtcacggaataggtgtggactgctaatacctttttgattgacaaccagagggatacagaattggtgagccattggcatcctaaagaaaaagatccccccaccacaccctggttaatatgttgtaacttgactgtaactcctgtaccttgaaaaactcaacagatcctcagacttaccacataagagccatataatttaagagtcaggttacatacacacaaaacaggacctattccaaggaataagtaaaggcaaaagggaactccaggaagacgttcactgcagcattatttacaacaggagcattatacacaacaggagcattttacataaatacgctaggactagaaaatgacttcaggtatttcggtgctgacttatgaaagactattaaagggttttggaaatcataattaggaatataagttagcaccttaggaaatgcttatatgtaagcggagaagctgagcctgagccgtgtgtatatataatcatgcctcggtaaaaatcctgccctcggtggctgaggacggaaggagaacacaaaacaagtgcctacggcttgcttagttggaatggcaggattgggggttttgttttcttttctctgaaacctttttcggcagtaaaaacaaggaagacatattatactcagttctgatgagattagttctcagttcaaaagctgttcatgaccctcttttttgcttccttcctgtggaattagatccagtcttcggagttctgtcttcaagacccattataaaatggatccgacctccccattcatttttacctcctgtctcctcctggctgtgttttcttccacctgggtgggccactggcctgcagacatggctgtccgctctgagcactttgccagtccctccctcgaggccactccatctgctttcttctctattctcagctgtggaaatcctacccaactgtcaaagataatctttggattcccttttattccaccatccacgcacgagctccctctccgcatcatcccttcctacagccaacctgtctcctgcagtatggaccccaagctgccttattaatacctgaagtcactaactattgatgacctttgtcatcacttgggtgccactttgtgacactttgtcagccacttcggtgcattcacgcatcttctatgcagtcctctctttgctttgactgtccccctctatgccccctaagtagacaacaagttcattcagggccaggaccatgtctgattcactttaaatcccacataggggtaagtaggatgcttggcttaaatgtttttttctgtattcaatacaactaatttttttatcttaacagaaccatcatctgtcctccaaaaggaacaaaaaactccactttaccgtcgcattacagacaaagcaaaattcatgtacaaagagacaaacatcttccccctggatatggttggctttcctctgtatttttctccaatgtttcataacacttatgaattatagatcaaccacctatggacatgtggaaaatcagacaaatccaaagttttcaagatacattgtttccaattcttacaaggagcttttacctatttaaattcaagaaacaatataaatccaatgagcttagttttgtgggactcccggccatagtaggtagaaaacccattacagctttcttatatgtcacctgagaatgaataggcacataagtagaaccaaattccccaggaaattgagcctactaagggtttagcaaatattgagtctgctggtttgtatttcctcatgtgcattttaataccccttgaagtcaaggggaccatgattcacacccggagccttcctccactggattcattttgtcagctctttgggaatttaagtacatctgaatggcatctctctttcatggtgagagtgtgatggatggccggagactcccaggctgtcaggacccatcactttccccatccatctcccatttaacggtccccgggcctgacagctttctctcacattggttcatgttctcattgccaaaaaccactaatgttttcttcacagggagccaggaacaatgggaaggcaaacacagtggatttggagccttttgctcctgaaacttaaaaatgttcattccaatgcagttaagccagtaacttctgagacatgccttcccacctaagttaatagaacaatattaaaaaaagaaaaaaagaacaacaccttctcccccaacatatatctccgtgttgcggaggaagtcctggagctttgctgagactattatggctctcagaacccagcatattaattctttcccactccaaacacccgcatcccatcctccctggcgttgtcacgtgtgggaaggcctccacagcagtggtgtcccctgcactcagttcagtccccggcacacacactgggtacttaagaaattgtccaggcaggacacggtggctcacatctgtaatctcaccacttttggaggccgagacagaaggatggcttgaggtcaggagtttgagaccagcctggacaacatggccagtgtctgtctatacgttaaaaaaaaaaaattagcggggtatggtggcctgcacctgtggtcccagctgctcgggaggctgaggcaggaggattgcttgaacccaggatgtcgaggctgcagtgagctgtgattgtgccaatgtactcaagcctatgtgaaagagtgaaaccttgtctcaaaaaaaaaaaaaaaaatgaaatttttcaggatggcactgtagtttaaaagttctgaattcattgaattatttgtagagtcttaattgtatctaaatcttagaaataaacctgatgctttttatatgtctttcttggactatactaaattattcatgtgatcaatcatttgtgtctaaattaaaatgccagagacaaggaaaatgaaacgttggcaggtcagagttggaatattgtattttaaaattatgttgttattttgttttatagaaaaggttttattatttttgccttcttagtattctctgcactaatttttttaaaattttgcctcttttaaaatttgccttatagttttattagcacctaagagtttacaaatataaataattctaagctactattctctgtttcacaatttacttatttagaaacattatgctgctttgaggaactagaaccattttgtgtaagaatttttattttctgggctccttataccattcctttattgaagtgtttaaatttttaaacaaactcaaaactataatgaaacacttccccacaaagtacctacatcattagcatatatgtaattacatctacataataaacatgatcataaagaagaacacttctaaatgttttgtctaaatgtaacagcctcaccttccctcgctgtcccagcatccaccactttgatgtagttttgctacctcatttgcctctgaaaatgtttttgacctgaggtctttagtagtcatggaaacagcaaactcctcatttccatccctctttctttctctctcttttttgagagctgatgtctataacttgatctctgttgggatctctataacggtaagtcctcagattacacaaacaacaaacagacaaaagaaatggcaaggagagtcatccacagagaggtgcaggatgctcacagcgttgtgcagcagcctgaaaggaaagggagggaaagcacccctgtgcagtcgccctccttaacatctccaagaagcctcaggtcaagggaagctgcactgtctctaagcaccagcagacacctgttccccagtgcatgcctttactccaaccacagctaacactgaaaccagcgctcaggggacttgtgttcccttcatttgatggtggagtgctctcattactcaaagtccaagcaagttttagttaattaagttacgcagagatgacaatgaaatacttggagaaatagtattgaggaaaagagccaagctctgtaaaatatttatagaggtttatcctgagccaaatgtgagtgaccatggcccaagacgcagcctcaggaggtcctaagaatgtgtgcctaaggtggttgaggtgcagcatgatttgatacatttcagggagatataagacattaatcgatacatgtagggtatacattggttcagtgcagaaacactggacaggacaactgtcctgatgcaggggctgaggacaattacagggcataagtggattcaaatatcttctgatttgcacttggttgaaagagttattacctaaagagctggaatcaatagaaagtagtgtctgggttaaaataagtatttgtggagaccaaggttcttattatgtagatgaagtttcctgggtggctatccttagaggcaatagatggcaaatatttcctgcttagatctttaaaaggtgccagactctcagctaactcttcaggagcagaaaaagccctggagagggaaggggattatctacagaatgtaggccttccccacaagagacagatttgcagggacatttcaaaatacatcaaaaaaatctattttgggtaaaatgctttggttccttccaaggcctgctatctgtcatgtaatgctatactagagtcgggttagaatttggtatttcattgctacaaacagtttgttttctcagtgtttatatctctgtgttaatgttggtcagttgtccctgaaaaaaggaaggagggtgtaatgaggcctgtccagaacctgcttcctatcacagcctgagctagtttgtgtaggtttcttttgaaatcccctcagtcaagagaagggattcattcagtcagttggggggcttagaattttatgtttggtctacatttgtcaaagcaaagacttttgtctaaattcctgtgatttggttatttcctgacattttcccaggtaatgaccaagtaaattcatacagaaatgtgtgtgtgtgtgtgtgtgtgtgtgtgtgtgtgtgtgtgagagagagagagagagagacagagagagaaagaaagagatatcaatttggttcaaaagactggtatgaacctgactggtatgaatctccctttattcagagtgaatttttctccatatttgacaattggaattgtcaagatttaggactaatgtggaccagttacactggcaacctgaatttgtagcatacccataataaagaattatgttatgtacatagaagaaacaaaactctcatttctacctcccccaatataaacacagtacaaaatgatacacacctaattttcagcacgaattggaaatatgcatgctaaatttccagtcaaagatgactcacgtgtcgacagttttaactgctttaggtaaaatctcctacatcaccctacaactgcttttttcttaaagagatttaactataatagcctttttgaaaatgtcaaccttattgaaatagaaattactctgttcatttgtttcaggtatgttgtattcaaatctatactttgtctctctaaaatttacactgaaaaacaaatttgtaaatttgcctttgtctcagaatttcatggtgtttttgaatacactgggaagagtattattcacatggtttgaatctgtgtccctaatcagctctcatgttgaattgtaatctcagtgttggaagaggggcctgttgggaggtgactggatcatgggattggagttctcacaaatggtttactaccatcccccttggtcctgtgtagtgagtgaattctcacaagaactggttggtcaaaagcgtgtggtaccttacccccacccccttcctcctggtctggccatgtaaagatgcctgctccggctttgccttccaccatgagtaaaagctccctagccatgcttcctgtaaagcctgcggagactgggtaatttataaaaaaagaagtttaatggcctcatggttctgcagtcagtacaggaagcatgatgctggcatctgcttggcttctggggaagcctcaggaaacttacaatcatggctgaaggtgcaaggggagcagggtcttacatggcaggagaaggagcaaggaaggcagggggcggaggtgccacatacttttaaaccaccagatctggttagaactcactcacccactcactatcacaagaatagcaccaaggggtggtactaaaccattcatggaaaatccacccccatgatccaaacacctcctactaggccccacctccaacactagggatcacgtttcaaaatgagatttgggtgaggacagagcaggtattgagctgtcactcaatactcactccctgcacaatttctgtgtaagtgaaatgaaacacaaatcagccgtccagccaggggctggaagagatcttccatcaccatccatagaaatgtcaaagtgatacagtacagcagaaagaatagtggagaatggctggagccatgtgtccttacccgttttattaatttggtctgtttggtctgttagcatcatcatggtttcaccatatcacatgggaagcccaaatatgctgcctactggctgataaaatcacctccaacctttacccccaaattatgtgacacatcggagggtaagacagacattcttctaggttcagctcacttacctcgattacactacacataaaggtaaagtaataagccacaaatggcaatttaaaattaaatttcctactttcattgaaaaaaaatcacactatatatatagtgtgattttttatatatataaacatatataaatatatataaatatataaacatatataaatataaacatatataaatatataaacatatataaattatatataaatatatatttttatatatatataaattcagcatatatatatatatatatgctgaatctctgaaggcgtttagaaaatggacccatggaattctttctgcagtttccggtatcatcagtatctcttgctaaaatgtcttctgagctttggcaggggagtacatcaaccacacaggtgcgatgtttgtgaacaagagtcccactcaggtccaatgctgtaagcagtccccgcaattatgaatctaaaaagtaattaacaccaaaggtggccacattgctttcccacttagaggggcaaatgagagtgcacattagattaagtacagactaacacagcatatgcaaagtcgggagtttcaaatgaaaaaaacaaacctggattgaagtatccgagaggatacatttccaaccatcaagataataaggaaaaaggtcaactggaaatggacttcaacaggacctggcagtttctaattctttgagaaaaatattaactttgagacacattaaaaatcaggggcgggcatggttgctcacacctgtaatctcagcacattgggaggctgaggcgggcggatcacttgaggtcaggagtttgagagcagcctggccaacatggcaaaaccccgtctctactaaaaatacaaaaaatagctgggcatggtggtgggtgcctgtaatcccagctactcgggaggctgaggcaggagaatcagtggaacctaggaggcagaggttgcagtgagctgagattgagccactgctctccagcctgggtgacagagcgagactctgtcttaaaaaaaaaaaaaaaaaaaaaaaagtcaggaaacatttatatcaaatttcagtatgtgcatgaacacaatgtccttctttactccaagggctttaaatgattacttccttggagttcctgctcattttctttcttcatacctgttctgtccagctaagtgtccccagtggcccagaacacggggagaaccttccacctgtggccagcatttgcacctgggccccctacagaccatgtctacacagcaaacaacaagccacattcataaaagtacaagtcagggtgcatctccacctgctcaggaccctccagtcgcttctgtgcccactttgaagaatattcaaactccccgaatgtagtttacatggctctatatggcaggcactatgagaacctaggcccaaaagtctggctcgaacctgcctttcttcagagtaaatttttttttctccatttttttactgacagctgaagaccatgtcaagatttgggataattgtgaaacagacagtgaagatagtaatttgcatttataaagtgtccataataaagaaaaggtgctatgtgccacagatgtaagactgctatgtatcaaatcccccaatactaacataatgcagaatgctgccacatgtttcttggcatgaaataaaaaccacacgtgtgcacacacacatacacacacacacacacacacgtagaaattccaaagcaactaggctatatggtacagcctttaaggtcactcgcctattaatatttcccctaccatttctccttcacttgcttcaggggcctgcaccctttttctggaaagagccagatggtaaatatattaggttctccaggccaaggaatcgtctttgtaactattcagctctgagagtttagcaggaaaaaaaagccacagacacaacataaaagcgtggattttcataaaatccacatcggacaaaaacaaatatgcttcatattcactctcctgctgctctcgcttgccataagaatgggatgcttcttctaccctccatgttcccatgggggaccccttatcatcaccagatgtctgctcaaattcaccttctcctgaccacattatccaaagaatctcctgaccgtgccactttggagcttcacagtgagctattggggaaagaaccatggaaatgctaaggtgttgggcactcccagcccctggggaatctaggagggacctggagaggccacagccccatctcacttctggtcataacctgctatatccacttcccccactgtgacacacagacattaattcctacataacaagggtccccaacccccaggaccagtaccagtctgtggcctgttaggagccatgacacatagcagaaggtgagtgatgggtgagtgagtgaagcttcatctgtatttacagccactccccaacgctcacattaccacctgagctccagctcctgtcagctcagcagcagcattagattctcataggagtgccaaccctactgtgaactgtgcatgcgagggatctaggttgcacgctccttatgagaatctaacgcctgatgatctgtcactgtctcccatcaccctcagatgggaccatttagttgcaggaaaacaagctcagggctcccactgattctacattatggtgagttgtataattatttcattatatattacaatgtaataataatacaaacaagtgcacaataaatgtaaagtgctgaaataatcctgaaatcatcctccccaccctgccccggtccatggaaaaattgtcttccataaaactggttcctggtgccaaaaatgttggggtctgttgctatgtaaggcacgacaaaaagacagtaggaagccctgctctatcccactactcttggaaaaagaactagcactcacgacttgtgtattcattttacttctattcattcatttattcattctctacccacctagaaggtaagctccatgtgagcaaccaccctgtctatttcagctcagcatctccaacacctagaagaatgcctgtgaaaggccctcactaaataccgttggtgagcaaatcctgaatcctgaaagcaacagaaggctgccatccagcagagatcacaaggtgctactaacgcacatccgtacaacttccaaaactagtccaggtcatctcacaaatttcatgtcatttccaaaaagccttccagagacccaacagaaaatggttccgaatctcatgttggcctaaggtggtttcatccagacaaatccctctgttcagtgcatctgctctgccagggccagagtgacatggagccctgagactcccattccatgggctcttgtccctgcttctagagcagagggggctgagacaggctgagattcatcccaccgcacttgtctttcagatgagttcgaccagcttggaaggtgcttttcctttcacaatgacaagtcctgcagcagcgcatctgaaggacctattattctattttcagattttaacagtgcaaatgtctcattgcagctcattttgtaacttactgagctgtgttatatcatgcaaattttccaaatacaaaccgaacatgtctcatagaacactttacagctccatcccatcttaaaccaagcagaaaatgcagcagttcagaagtgtggggatgacagtattcctagcagagagacgggacgctagccaggaggcctgcagctacacgacccaggattaattgaggaagtctaacggaaggggcctctgctgtcagagggagagggaagacaggagagattttatgacagtctttgaacagtcacaagggtgaatgcaatcgtttaccttcccagccaaacaaaatactcctaaattccactttctgtggttgctaaaaacagtatcatcagatatcaaggccaagggccctggcaggctgcaatgttatgatagggttagccccaggtacaacacagagcctggtctgggtccagcatgcatagcatttggaagcgcaccttcgagagcagcagagttgctgcttcacagtggccagatcaaccagtaaactctctcctgccaccctgtcacttcatttccactcctgactcctggatgcagctcttccttccatccacactcagacctagcctccagtccccagctcagctcccagttcactcctacagattgatttctctctatttggctctatcctttggggtaggccacctaattctgagcttattcttcatttactataaaatgtgcaaattggacaagaacggtattttccaaaccttagctattcaaataaacccttcaagatttttgaatccatttactttgcaacgcaacctcaccttagttctgtaaactaaaagttgacagcactgttagaaaactcttcgcttggtgatggtctatctttacctcctgtctttgctgcaatcagaaattacccaaagtcagagaaacgttaaacacattctgacaacaatggagaatttctccaagacacaaccaaagaatttacaaatctttttttttttttttttttttgagacggagtttcactcttgtcaccaaggctggagagcaatggcacaatctcggctcactgcaacctctgcctcccaggttcaagggattctcccgcctcagcctccctagtagttgggattacaggcacactccaccacgcccgactaattttcgtatttttagtagagacggagttttaccatgttgaccaggctggtcttgaactcctgacctcgtgatccacccacctcaagctcccaaagtgctgggattacaggcgtgagccaccacacctagccacagatcattttaagaggaactactttcttactccaggcttcaacttcacctatgctatattgtggccccatctaaaatcatgtgacacaccactagcgcagtgtttggcaaactacagcccactcaccaaacccagcccaccgcctgctttgacgaataaagttttattggaacacagccgtgcctatgtgcttacatatgttctctggctgcgttctctgcacaacagcagatttgctggccacagtagaaactgtataccctgcaaagccaaacctatttactgcctggcttttacagaatagatttgctgcccccttttctagtggatggacacaattctgtgaaaggaaaatcaatcttggggcccccaaatcactaagctaaagggaaaagtcaagctgggcactgctgaggggaaacctgccccattctattcaaagtcccccctctgctcactgagataaatgcatattcaattgcctcctttcgagaggctcatcagaaactcaaaagaatgcaaccatctgtctgttatctacctatgacctggaaggcccctccaggcttccagttgtcccacctttccggactgaaccaattccgaacagaaccaatgtaccattttttttttttttttgagacagagtctcactctgtcaccagactggaatgcagtggttcaatctctgctcactgcaacctcgtgcaacctcggcctcctgggttcaaatgattctcctacctcagcctcccaagtagctgggattataggcatgtgccaccaggcccagctaatttttgtatttttagtagagacagggtttcaccatgttggccaggatggtctccatctcctgacctcatgattcgcccgcctcagcctcccaaagtgctggggaacctatgtacttcttacacatattgattaatgtctcatgtctccttaaaatatataaaaccaagctgtgccccaaccaccttgggcatatgtcatcaggaattcctgaggctgtgtcacgggcatgcaccctcaaccttggcaaaagaaactctaaattaactacgacatgtctcagattttcagagttcacaattcttagagaatcttcgcttcttcaagtcccttctctgagcaggcttcctttgctccacgtacatatttccatgacagcctcactgtggccataattgtttgtccttgcagctgtaatagactatcagccccacgagggcaatgtggactcctgggaaggccgttaccatgggagtgagagagaccaggcagtgtgaatggggacacactacccacccacaggagacaccttaaccctaaaagtggaactgcagttaccattttacagtgccgttacaacaataagagagtactatatgtaaccatcagacacagtataatctccctcaatgagtattcagtgaataaaatgaaggaaattaaaatattttaccctgggccaggagcagtggctcacacctgtaatcccagcactttgggaggccgaggtgggcagatcacgaggtcaggagatcacgaccatcctggctaacatggtgaaaccccatctctactaaaaatacaaaaaaaaaaaaaaatagcccagcgtcgtggcgggtgcctgtagtcccagctactcgggaggctgagtcaagagaatggtctgaacccaggaggcggagcttgcagtgagccgagatcgcgccactgcactccagcctgggtgacagagcaatagtccatctaaaaaaaaaaaaaaaaaaaaaaaaaattaacccaaacatattttgaaacggctgctgcttggccagcaaagataagtagccttgcaaggctgtcttctgtgggaaagtttgcaaccctggagaatctccattaatgcagccaagccccctcagctttccatccctttcctggatccaggagagattgagagtccgatacctctgaaagtctgaaaagacacatttaccatctattatctctgaaggaggcttcacctacataccaaggccacctatgctagccaggccttttcctttctctctctcttaatctgtcttgcccctcaacctgattttccaacataacctgattctggctatgctctgagtttgccttccttgctgtggcctcagggtggtatagaagcttctataacttactgttcgcttgagtcttcatttggaaggcccccacatatacatgctgaataactttgtatgccttttctcttattgatcagtctgtcttatgtcggtgatttttcagagaacttttagggggccaatttctatggccctcacaaaatgaatgaaggaacaaaggaatcaatcaatgtatttttaactcacactgacttttgtcttcatttcatgcttaacacccttagaattattgataattataaccagtgttgagataggggtttagcaagactagtttcccaagacccagtcagaagaccccattgataaaagaggatgcaatagagaagccaggccaaatgcactaaaaccaagatggtgacggagtgacctctggttacccttgctgctcattatatgctaattataatgcattagcatgctaaaagaaactcccactagtgccaggacagtttacaaattctatggcaactcctggaagttcccctatatgttctaaaagggggtagaaccctcagttccaggaactcccctccctcccccagaaaactcatgaatattccaccatttgttgagcatacagtcaagatgcaaccatatatatggccagtcagcagcgtatcggggtgctctgcctatggggcagccacccttttactcctttactttcttaataaacttttttcactttactctgttggctcgtacttgaattatttcctgcatgaagccaaaaacccacttggcttcccaggctgagccccagccttggggaactttggcttataacagctcccattacatttttctgccccagagttcacaaaagtacatttcgcactgtctcttttattctccacaaccacctttcagcaggtattattttacccactttgcagagggcgatgcagtatgtccaagaggataaggactctgtctaaggcaatgctggtaggaatcaccagtctgactcctaacctttctgctactcggccatgactctcccagccattgcatcagcacctcctagagcttcttagggtatctcccacataggctgtcaagctgagacagggacaaaggcttttgtattaggggatatttcaggaatacaaaagaagtagagagtagtataatgaacattcatgtccccaccacccagagataaatactcctcccaaatactctctggactctctctctccactgaactctctatttcccccaagataattacaatcatcaacttgcatttatcattcctagctgtgttcttatacaaatgcgtgggtatgcgtgtatatatacaatatgtgcaaatgtgtgtatatgtatatatatataaacatgcattcacgcacaaagatataaacacacatataaataacatgcattttttttttttttttgatatggagttttgctcttgtcacccaggctacagtgcaatggtgcaatcttggctcactgcaacctccgcttctcaggttcaagcaattctcttgcctcagcctcctgagtagtggggattacaggtgtcgccaccacgcttggctaattttttgtatttttagtagagacagggtctccccatgttggccaggctggtctcaaaccactgacctcaggtgatccacctgcctcggcctcccaaagtgctgagattacaggggtgagccactgcgcccaaccacatgtttttatacatacatacatatatatatatatatatatactcacaaacaaaacagtattattttgcatgtttttcaaattgttatattgtcataacatatttctgcaatgtgcattatttgctgttcctttgtttttctgttttttttttttttttgcaatttgtccacttgtgtacatgcagctctagtttatttattttaactcacatatattgctgtattgtatgcacatgccctgagactttgatgcattctttcctcgagggatgcttaggttgtttccaagccttcctcacgacaatcagtgaatgttttgtagttgcttctgacttcagatgtaggagagcttctgggtgtgtgtctagcagaactgctggatcatggaggaaggctgccttctgctttgctagatattgccagattgctctccaaagtggttgcaccaatttacactgccacgtgcagagtaggagagttcccaggattctttttgtgcgatattacctttgccaatataatgattgtggaatggtattgcttattttgtatttccctgattactggagacattgagcattgtttcatatgcttattggctgctggtattttttatgtaaattaatccacacatcttttgctaatttttctactgtgttattttgctttttctcattgatttgtagaagatctttaagcatcctgggtaataatttttgtcgttttgaaaccacctttgtaaagaatataacagtgagaaaattatgatgggaaaaaagatctgccctaaccgatttgcctttaacctccaagctgccctagttcatttctgggcataggctgcactaactttgggaggaattaagttcgtagtttaaatttgaaacaaagatgataataacccctccccaaaacaaagtccctccctgtttggagaccagaccgctttgtaaaaccaatgcatttttcacaagattataaattacggctcaggagtcctgcagccagaggccacaaggctcctaaccttcccaatcgctcctatggataacatcactattgacaaacctgagattggtgtttggggtatgtttcagcccttgcattctgctggatcagctggcaccacccagattggtacactgcctcatcctgtcctgtgacctccacccaggagctgattcagtgcaggaggacagctttgactccccatgatttcatcccgacgtaaccaatccgcattccctattcccttgccccctgccctagaaatttcttttaaaaaaccctagcctccaaattgttgaggagactgatttaagtaataataaaactccggtatcctgtttcgtggctctatgtgtattaaactctccctattgcaattcccttgtcttcataaatcagctctatcagggcaatgggcaaggtgagcccattgggcagttacagttcaaggcaaagcctgttttatgcttctcttgtcacatacattgcacatagcccgtgcattaaaaaatatttattgatgaataattgtttcactcttaataatgtatctatgttcaattggtatacaagtcaattttattggcaacaaatcaccaaagtggtgcctaaaccacagtattttatgaatacgcatttgatttcaatgaataatgcatcaaataaatggggaattcagcagtaaaattttcatatgatatgcattttcactcaaataccatctataataaatagggtttttcctttataaaaaaatatatatataattggtaaattaaaacctcaaaatgaaggaactgtagaatgcgggccaaactggagaggtctcccaagccccatgttaagcacacttcagagttccaactgactccggagggaaggaaaacatctccagatggcaggatgctgggtgcttttggtttgggttttcatttcaccctcacaataatcctgcaaagtagatggtttttgaccccatgttctcaaatgaagaaaccaatatttagaggggataagaaacttcgctcaagtcactccataaatgataaagtcaggattcacactcagatctctcatttcttattcaacaatagtttgtttactccagtcaggtacagggttctgacaacagagacgaacaaggtgtcatcaggaattgaattccatattccttcactttctccttggtacccatctccagcttggaagatggtacagaaaaacttggaattgctttaatataaaatgcctccacaagccaccaagtaaagttaaatacagatgtaacctcaagaaagcacccccacacagggtaaaatacggcatgaaatgagacagaaattttgtaatcatttgattgggaacctgatactccccaccactctaccatctttgcaaaataattatgataactataaatatttttctctcatctccagtaaattcttaactctcataagttactgacttatttaaattcttttcttacatttgcaaaatattttaaacatacaatagggtatagaaatatattcatatatatgtaaaaaacaacctatagaatatactgttctatataatagaataaaaaggtatatatacatgcataatccatgttattctatataatacataaagatatatacacatatgtatgtgtatatgtgtgtatatgtatgtgtgtgtgcgtatgtgtgtgtgtatgtgtgtatatgtgcgtatgtgcatgtatttgtatgtttgtatatgtgtatgtatgtgtgtgcatgtgtgtatatgtgtgtttgtgtgtgtgtctatgtgtacgtgtgtgtgtatgtttatgtatgtgtgtgtgtgtgtatgtgtatatacagaataatcacccatatacctaatactcagaggaaatagaatacaaaatattgcaaatagaactgaaacctccatataacttgcatggtgtttgcttccctcacacacctctctgcccgctctaaggtattttctatcctaaacctgccacttatacagatacaaatacattgtcaatgcacaatgcacacatatatccatatctgattttatatataattgttttgcaagttttcaacatttacataaaggctatcctattgtacgcatctacctgtaatttcatctttttgctcgatattatgtttgtgatattgatacagttacagttcattcattttgctaccatagaatacatatggaatgaatattgcatgattcagacgttgtatttttgatgagcttgtaagttgcttccaatgttttactattaaaaacaatggtgttttgaacattcttgtatttatcatattttttgtgagcaagagtttcttctagaataaatgactagaagaaacatcactgggttatttggcagctgcatcttcaaatttactacacaatgccaaatcactttcaaaacgattgtaacaagtcatcccttctctggtggaaggtgagagtcctggctgcttcgtttcatcaccaacaactggtgtttccaggctttttaacttttgtcaatctaatgggtgtgaaatggtactttggcgtgactttaattttccatttccatggctttcatttaatttctttgttaaactgatcatctcttctcaagtctgttggcagtgcagatttcctcttttgtgaactgcctgttcatgtgtttttgctcattttatttctaatattattcaccatagaccaggtgatggtaacttttgaaccattaatactttatatataagactactaccttatttgcagttggtaatggctgactgacttttgggtggatagaaaagttagaaggaggcatgtctaagccctcagggctctcaaaatccatattaccttctagctattgaatccaacacatcatttcaaaatatgttataagcatctgactgtggtgttccttatctatttatcaatcccgggtaatgaatgaagctttgactagttgctgtattcctttctggatctgccaataagtttgttatcatgtctgtgtgtgtatgtgtgtttgtgtgtgtgatcattttgaatacttaatcctctctcccatccagcaaagcacaaccatgatgcaaaaaacacagatttaattctattggttcaaaaacataatatcccttttttaactgagcatattcttttcttttgtgaccaagtcgcattgatactacagggaagtggaattgtatgaaaagcattgcaccagtgcttttcaatttatttttaaccttggttcatttaggcaaatgactcatgtttcagcttgtttcttcatcattttgtactctccaatgcgggaatggagtgcactgaactagtaataacctttgtataagcaaaacttgggggaaatatatacacacctcaagcaaacatggtacaaatacattgatatttaaaccacaacgtgtctgaaagagcacctagtggaaagttataggctattaaagaaatagtttatctggcaccataatcactttaaagttaaacaactccaaacaaattaagctgataatggtaaaattagcagagttattcataattaagaagcaaggacagcagcaactggaaagcacaagcaacccaagacattctttccctgctatcctgttcacctgagcatctttgaggagtcatgcatgtatacagtaggagttctgggcatacatgtatacagtaggaactctgcaaaattgccaggggtcatgaaactgtagccttcccaggagaattgcaaaagacttcagtaaatcgcagtaaaataccaattttaggctttgaattccaaatttctgcagttctgacaacctacttagaagacgcctagaaggtaacctttagtcccaggcaaaaatgaagttggtgacactccaaatcatttacctgtgagaactaaagcgaggacctgcagctctcagtcagccagcataggaagaggcatgtataatctccaatagcactttaggactttgaaaactagttaatgaatcacttgcacaacacatctgctttgaatcaagtcagtactttggaatcccttcaaggttcttccaacgtagaagaacggtatagaacttgggtatatattttctgataaagttcagctggcaaccgtggggctggttactaagaattgttgatgtagagcactcattcattcattcgttcagcaattttattttaagcactggtggcatgcagaaaaaatgaccgtcaaaagatgctcacatcctaagccctggaacctgcgaatgtattatgttacctggcaaaagagaattaaggttgaagaaggaattgaggttgctaatcagctgacctcaagataaagagatcatcttggattttctgagcgggcctaatgacaagggtgttttaaatgtggaagaaggcaggaagctggagtcagagggagatttgaagatgccaccctgctgggttttaggatgcaggaaggggccacaagccagggaatgcttgcagcctctagttgctggagtggcaagaatgcaaactcttccctagagactccagaaaaaatgcagttctgccaacaccttgacttagtccagtgagctctccttcacacttctgatccacagaactgtaagacaacacgtttgtgctgctttcagccaccaaagctgtggtagtttgttacaacagccacaggaaattaacataagcatcactctttgccagacacgtgccaggaactggatgtaaagtcatgacccaaggtgtctgttcacatggtctctgcctgccacaccacatcccacccactgtctcagaaggcagatgacgaatgagaaaacaatcgtacgtatttaaaattgtcttacatctagaaaggaagagaacctggtgttatgttaaagaataatccaccagtggacgcattttaagtcagatggtcaaggaagctctgttggatggggtggtgttgaagctagcccaaccgtgtgaagggaagagattggaattccacgctggaggtcatgaggtgcagagtcctaaggcctcaaggcattgggtgatttgataaccaggatgaggaggggctgcatggtttgggcatacagggaggagaacggctcaaatgaagtctgagaggcaggcagagatcacatgccaggtcaacatcatcatcacacagccagggcttccggctaagtgcaatgtgaaggtgctggaacagctaagcctggtgatggccgatggatggtatggggcccgtgaacaatgacatatcaggaaagatatttctccatggaagaagcagcacattatctttaaattcactctatcttgttactttttctttgaggctaactgataagaggagaaaatagagagcaggaaatctggataagataattcgtatcagagaaaccagcagcgacttcagcattggaatgagttgcccagcaatatgaacagcctatctccacgacgccaccaatggcaactggctgtgtacatatagtcatgtttcccaacccttattgttgtcattatcactccctacagagctccttttaaaaataaaccttttttattttggaaccattttagatctatagaaaaatggctaagatagcacagaatgttcccacacacgccacacagcttcctcttcttttagatcttacgtgagccggtacatttgctgcaatcaacgacccaatagtgggaagtgattattaactacagtccatacattattcacgtttcttccatttttctctaatattctttttctgtcccagaatctcaaccaaggtaccaggttacattgagtcttcctatctctttaggaggctcttagttgtgactgcttcttagaccttccttgtttttgaggatctacatagttttgaggactactggtcagttactttgtagaatgtcctttgactgggatttgtctgttgtgtttctcatgaatagactgaggttattcatctttgggaggaagaccatagatgtgaagtgttattttcctcacattctatcaaggatacatgccgagctttggccactgggagctctttcccttggctcctgtgtctctcagacatgttcccatcagtctcagtctctctctttctctctctctctctcactctctcgtgtgtgtgtgtgtgtgagtgtgtgtgtgtgtgtgtgtgttctgagcacttcctttttgccactataagatgctcctggtctaagaaactttggtacaggtgtttttcctaatcactcttctcgagaaaattttaagcctaaagatgtaccgtataactcttatgtactataaatagatctatgctttgtacatgaaaagagtaagattttcttcccccctaataaccaattttatgcctttggtgactatttcaaccccactgaaaaatgcataatcaatatctatgtttacatttacactttttaacagatatcagaatgagaagcccccaacaaaattcatgctttgtgacgctaggtcactgtatagtttccggaggtggcaatcatttggaccctcggcttgctgaaagtacacaacctcccaaggccagtggataaatgctgttctctggtctatttagggcttctcctttttactctcaagagctagtcaaagactttggacatttgacacctagaaaaattgtgtatatctgacagaaaggaaaggcagccccttcaaacagagagagaaacttctaaaaacacaaacaaacgaacacattttcatccaaaaacattgtccttccattgttctctcatttaatttccttgaattccttttcttttttttttcctttttgagacggagtcttgctctgtcgcccaggctggagtgcagtggcacgatctcagctcactgcaacctctgcctcccgggttcaagtcattctcctgcctcagcctccacagtagatgggactacaggcgcctgccaccatgcctgtctacttttttctatttttagtagagatggggtttcaccatgttggccaggaggctcccgatctcttgacctcgtgatccatctgcctcagcctcccaaagtgctgggagtacaggcgtgagccactgtgtctagcctttttttttttttcttttgagaatgagtctcactctgttacccaggctggagtgcagtgatgcaatcttggctcaccataacctccgcctccctggttcaagcaattctcatgcctcagcctcctaagtagctgagattacagacatgcaccaccatgcccagctaatttttgtatttttagtagagatggggttttgccaccttggtcaggctggtcttgaactcctgacctgaggtgatctgcctgcctcggcctctcaaagtgctgggattacaggcatgagccaccacgcctggtccctgaattccttttctacttacccttcgtgggggcgttgcaggggagtgcaggggactctgggatttcacacttcacctaaggccaccgagaggtgactccacaaaaccacaaagatgcagttctcatcctcccagccactgcaacaaagtccctcatttattctgtcattggctggagggctgcaaatgagctgctatctgttgaaccggaaaatagcatcatcttaaaagagccctttctggcacagagctgcatttagtcttctttggataatgctatattatgaaagaaatgcaaacacacagaaggaaggggacatgttggtgacttcctgcattctgagcccctcgggttacagacaaaaaactggccatggaaatacaacctgaagtgaccaaacttctctttcggttcctctcaaggctacttccaggcgtcaacgttactagagctgaagctgcttcaccaagccttcatcaaacccactttatcttaagcaatagatttcccattctataattagagtgcaaccccaaccattattcacttagaaaggccataaattccatttactatccagcaactcacgtttcccaaacatgccctatgataagatttatctggtgtagttgctaagaataaaagacgaaaagaaggaagataggaagggaggaagggagaaaaaggagagaaggaagaaaagaatgaaggaaggagaaaaggaaagaatgaaagggaagagaaggaaggagagagggagggaaaagaggagggagagagaaagaatggagggcttgaggtccccctggccctgtggaatcagaatgtagaaccaaaatcttcatggcagaaacagctgattatataacagctgaactcaagggtttgaaagctccatatctacaggagtcaaggcatttaaagcccttgtctcaggacacagagctcgctggttgcactcaaggactctagcctcatagtctgttttttacacctatactaggtgtggtaaagcatgactctggccagatgtaatacagtagaggggaaaagaccatttggatgcagagtatgtgcctacctaaaattggcggctacttctcagctctagatcaccactgccatgtggaaatgaaagcctggtattgaacaataattatcaaaattaacttttgagcacttactgtgcttgaaacactttttttcttttgcaaatgaacccatttaatagttaatcacttataagagataggcactattattttactaaaaaaatgtggtccagacaagttaagtatctcatctgatgttacctagctcagactcaaactcagacaccctcactgtctgatggagacctgtgctcctaaccaccacaatacactatttctttgaaattttctcaagaagacagaaatctatctctttttgaagggtggatttgtaaatatctactgtctcaaagatataaaacagatgaactgaaatatcatatgtgtccaaaagggtatctctttgatgttgccagtttgtaatccccagcttagactcacggaagttaaagtcctttaggataaacatgttggtaacttctagttcagctttcatgacaaagagaattctcctgagatgcatgtgttcaccagccctccagtaacatgtgcaacatctgtacaggaaatgatgtctccactgtgccagtgtctgtgccaccccaagtacagccccagaggctcatggctgaacagaggtagctggcactggtaagtcagggaacaatgggataggatggggctgatctcacatttccaccgtcaactggttaagtcagggaacaaagggataggatggggctgatctcacatttccaccgtcaactggttaagtcagaaaacaatgggataggagggggctgatctcacatttccaccatcaagaaggaaataaacaaagtctctaagcagccccttaaccgtcagtcaaatacatttttgtagttaaaataaatgctgaaggtcatcgtttgagagggcagcctccccttcaaggcaacaatgccttgcagtttataaaaatgtacgggtaagttaatggcaaacacaatgggccatttgcctttctctcatttgaaaagcacttggcaaccagtcatggatagccatggtctgcaggaaagcagctgtggccaagggagagaaaacttaccaaagtgtgtccttaaacttagacactggatgtttaacacaggtcactgagaatgtttaattttctgagcttctagctaaactgcatttgtttccgaaaaggaggctggtacctgcattttacttcatgcagtcaactattaattcagaacataatcatgacattgccattgtgcactaagcacaaggctaggttctgagttgcagagtaagcaaatcagaccaattctactagtggaacttatcttccagcagcttgggacagatgagcattgaaatcaaacaccatgcataaataatgcaatttcagctagtaacaagtgcttgagagagtagccagaaaaagcttttctggggaggtgacatttgaaatgggacctgctcatggagaaagtaaaaactatgcgaagacaatagggaataaactttctaggaaaagaaagcagcatcagtaatccagtaaacccctggttggttagaaaaaccactgtagtttgaggaatttagataaacagttgcaaataacttagataaagtaacctagaaatgtcttagatatttcttctttcatttctcctacaaagcttcaacaaatccccttagcctaagagggggtgtattacttgctacaaaacaatgcatgatttaattctattcctgtaaacttcttacttagttttgcatctttgtgtgctataaatgcggcctctacaaacaagcatttacagactagattagcaaacaccaaatggtagattaaagatggcttcaaattctctgctactctttcatcctcccagcaacacgtagcgtctgccctgaaacttggggtggcctcagaaaactgcttgacgaatagagtataatgggagtgacatgctgggacttctgagactgcagcctaagaagccttgaagcttcagcctaattccttaaaatattcatttttggaagcctgcaggttacttggtgcctgcatttactttacgcattcaactattaattcagaatgtaatcatgactgctctgagcccaccaagctgtgagaaggtcaagccacatggacaggtaatgaaggatgagaggccatgtggaagagagagaggccaaagagcaccaaggtgccagatgtgtgactttagcagtccttttagcaatgagacccctgtctggggtctcactctgtcatccaggctggagtgtggtagtacaatcttggctcactgcaacctccaactcccgggatcaagggatcctcctgcctcagcctcctgaatagctgtgaatacaggtacatataacaatacatggctaattttttttttgttgtttgtttgtttgtagggatggggtttcgtcatgttgtccaggctgatcttgaactttagcagtcatcttggaagtgggtcatcctccaccagctgccccagatgatgccacctggagtcaagatgaaccacccagctgaatccttcctgagtttctgacacaacaaattgtcaagaaaaatcgatggctgttttaaatcactaagtgtggggtggttactgatacagtgatagataaccagaatgcaagtttttcagcaagaattccagcatgacaaagctggttgttcgatcaagctgccactcacaaagagccttcctcaaatgtctggcaggaaaacaaaaaacagtcactttcttatattcaaactttttggaaattctcaaaagcaaataagagtttactcacatctcctcttctgcttcgattgagcataagagagtagtcagtttgaaaagttgttattttgtgaattgagaagcaatttgattttcttctaataatgaataaacgataaatgggtaaaaaaaaaacccagtaactcttctctgtgaagtgttgtgtaattagtcatatgaataaagaatatcctttctgtagaatattttaatggctcttgcaatattatcctaaatgacacagtgtgatatattttgttcacaagcattttttcatgaaatataatctagctctaaaaaatagctattttagagaatggatttatttaatggtattctctaaattttcagggaagttacacttttcaactgagaaacaaaattgttcctatccctaggtccagaccgaggaattttatataagtgcacctgagagttatgggtaaagtggatgggattaccaggaggcactgatgcagaagaagaaccccttgggcctgggaagacactgaactgagttattcagtgaaattattgctgggtcatggttttgagtcaccatctctattccctggaaaggggaagagttatgcctgccaggagggtgatgggaaagccctgcggagtaaccggaaaaggagattaaggccaggagatggatgactcatgtattgtaaaagagagagagagagagaggctcaaattactgttagtgatatgatcatatgggtacatgggaaagcaataaacaaatggggaaggcaattcattttgtaaccaaatgctctgagacctcctagagaagcacacagtggttcactgtgtctgggatgcaaggacagcaccagggaaagacgtcatgatgcagcgttcttaccatcacccctaacacagcctcttcctttctcctgcctcctctgctggcctctcatgctcataatactcaagacggaggtctgattgaatcagctgtggccacctgacatggagaaccctgttgcgtggactgtcacgtccaatgttgtctgtgacataactcacagatgtgtcccctttatgcgcagtctgtcttttgttggtttctgtgctgaccccaaactctggttcacttaaatgtgtccaggatggcaggctcagtcgccatgaagcctgcatgtaaaaaacggggtgtcagcaaagcatgaggagtcactcatgtgcggggggtacaggagctagtctgcacaccttgtaccaaaatgtactaatgacaatactcctgtcttgtggggctaggtgtgtgcctggtattgggaagaggcacacctaagggatttggcaaataactctccatgacagatagtttctatcctatgttctcaaattcacactctcatgttctcaaatagacacacagtggtcagagcctcactagtgtctccaacaggagtgaggcagaaggtacctgggtgactcaaatgcactcccagtaacatccatcctacataatttatttttccaaaacctaatgtatttctccagtcttactgaatcacttacaaataacactgctgaaacataagccactcccctggtaaacaggggaagcatctaaaaggagggaaaacgtcacttctaggagattcggtctgcagctgtgctgggctaacgggacctcccaacagtggccatttgcatacagtttcctgggctaacgggacctcccaacagtggccatttgcgtacagtttctttatcttggagctgagtgtttttaaagccatggacgcaggcatactggagtggcgatctcagggctgttacattttcatggaagtgaggctgcaaatggtagtggttgactcctgttcctcagcagcttctggagttaacaacaaaagaaacttactgaaaacctaattttcacagatcgcaaaacacatttcagaaatggaaaaggcaaaggcagaaaagttatttggtgctctgaaaacacagtgccttagtgaactactaacctattagtccctgcagccccatcagaaaggaaagtggacctccatgttattaaacttctgtaaagacctaactactgtccacatctaaacaatggaagggtgacttgatgaatctgatacttatctcagatactaggttacagcgcagctacacttgtccttaaaacattccctcaaaagtagctctttcataggtggtaatatatatctccacctacaaaaatacaagcgcactgtcatcaatggcaaggaacaagaaaaattcaacaatagtaatttcataaagatgtctttgacattttatctctgttttacaaatctgccctcatttgattggtcagacaacaagattttattgtgtctgcaagtcagtactgtctaggtgtgttgtataggatattcaagttgtataaaatatggctggtcatatcttcatagacttgatgagctggaagagtaaatgtaattaatatttaataaacagaaaaatgattaagccttgattatttaattgatctgtggtacagctcagaagtgtaatagaagctcagagtgaggaaatattttgcttggataagagcaggtggagtaagctatactagcagggcacatactctgggtcttaaatcatacatgatctgaatcaagtgaaagcaagtgtgagctttcttttttctttgcagcccaggctataaatcccagaaagaggatgaaggtatgtctaactttgggcttaaatttagaggtctttttcatagtgaagatagaacaaactcacattcaacttgtgtctggaggtgtttctgttacaggcaaggaactttgctgacttatccatgccaggaaccttctattacctgttccacctccaatcgccaagttatttacaaggagaaggagtggcgaggttcaagcatgccagccttcttactcaccacggctaatgacctatgtggataaaatccataatcctggctttttttggccaagactcaaatcatctgtcctaataatgcaggtagaaatacgagttattggccaggcccgatggctcacgcccattatcccagcactttgggaggccaaggcaggcggatcacgaggtcaagagatcaagaccatcctggccaacacggtgaaaccccatctctactgataatacaaaaattagctgggcatggtggcacacgcctgtagtcccagctaatcaggaggctgaggcaggagaatcgcttgaacctgggagacggaggttgcagtgagctaagattgtgccactgcactccagcctggcgacagagcaagattccatctcaaaaaaaaaaaaaaaaaaaaaagagagagagagaaagaaatatgaggtattaacaggattgcattaggctgcaagtaatggacttcaacacagtgttttaacaaaaataatgattatttttctcatttaaaagaaattcagaagcagatgatctagttagacctactgaggtgaattaaggaagtcttcagagacccaggctccttccagctccctgctacactatttagattctgactttcagtcgcctggtctgaaggttatagtctttatacctagtcaataggacaccgttccaggcagaagaaaggtgaaaggcaaaaggcatagcccagcaacgtctgcccttttttttttttccttttgagatggagtttcactcattacccaggctagagtgcaatggcacgatcttggctctccgcagcctccacctcctgggttcaagcgattctccttgccttggcctgccgagtagctggcattacaggcatgtgccaccacgtccagctaattttgtatttttagtagagatggggtttcaccatgttggtcaggctggtcttgaactcccgacctcaggtgatccacccacctcagccttccaaagtactgggattacaggcatgagccaccatggctggccatgtctgcccatttttatcctggtaacattggggtccacaaaaccccttccaaagactttcactaagacttcaccaggacatattgaatcatgcagtcaaccctagccacaaagtcctctaggaagtggagattttaactggacacactgttccctggtgtgtaggctaaaacagaactgtaaaagcaaggaaaaagagggaaatggatgttgggaactgttggaagcagtttctggcagggtgaccaggaattacttctgaataattgatggcaaagcagtatgcctccatctgtggcgacccaagtaaagaaacaagaggagaagaaagacttctgatatcaagcaatccttctatccaccctccacaaaatacgctgctttgcattatgagagatccttggagaaaaaccttctccatgtaatcatgtggcacattttacctttctctttgcaaagaaagaagttgcatggaatttagagattttagccattattctcaaattaggaaaaacaaaatcactgtttgggggctctttaaaaaagtggcctatacattcaaaagggaggagaactgtaacgtttacacatctcctgcatggcgtttttggtgaaggaaattatcattgctcgactatttcatttctatttttaaaaaaatagagagaagtttgctaactgagtttaaatggaggtaaggagactgtaattagatgtatcaacgactcactagagcaatcttcaaaaaatcaagttgtgattgcggagcacagccctccttggaagggcagcccaagcctacagctcaggccactggcctctggaccttttgggcaagtgaagaatcccacctttaagggctgtatgaatgggaaccagctttagcttagaaccagatttggtagaaaaagaatgtgctaatggagggaaatttaaacccttttgaaatgctttttctatcttgacattctacaattacaagaatttttttttttttttttttttgagacagagtcttgctttgttgcccaggctggagtgcagtggcacaatctcggctcactgcacgctctgcctcctgggttcacaccattctcctgcctcagcctcccaagtagctgggactacaggcacccgccaccacgcccagctaatttttttgtatttttagtagagacggggtttcaccgtgttagccaggatggtctcgatcccctgaactcatgatctgcctgtctcagcctcccaaagtgctgggattacaggtgtgagccactgcggccggcctagaagaatatttttaaaatgtcaaagagtaagcttgttcagagaaggtagaaatccttaattttggttggttctgaaatactgtggaataaaactgcagacacagaatcacccaacccctggacacaaaaacaatgacagcaatgacaactaacccttactgaacagttgtatgtgtaggacactgttctaagtgagctgtatgcattcaccaccacgaatgtaaatgctattatccctattatgtggttgaggatcaggtgtagagaggacccaggcatcctgtctccagagtctacacgcttaactactaccacattattaactactaacacacagttagtgttcaccagtcgcaaaattctgtcatcctgtgtgtgtaaaaatgggcatggtttaggccccagatcctaccccagaccctacctcaaacttaccagtgaggtccccagcttggttgatggggagcaggtggggggggcatcttgggggtggcaatttcctgcaactcatacaacagcagtgattctccaaggaaagctggcccaaacctcagctaattagaaaacaaagaaccagaaagaggtttagatgtaccagcattggaagctgctcatgtcttcaatggaatttgcaattttcagagcgatgcaagcagggttcaatagctacttaataaatgtgggagaatagcaggaaatgagcgcgtgggcaaagacgaaaccagacaaaaggccatctttgcggaaaattaaaactaggaagcagagggcttctaggcttttttttttcagtcaaaaaggaaaacatgctgcatttgaacagtctacttaaaatactgacctctttcatacatggagtcactgaagacttcattatttgctgagtcatctgcaattgatttcataagggtttctagactttgcaacaaggctaaaagacatctttatgggtagagacttgctatgtcacctttttctacctatctcgtaggtactttatattaacttttatactatagaaaacatgtattttatatacagtgctaggcacatagtagacgcttaaatatattttgatgtctttattgtctaatagtgaagaacacatcatgatctgttttagctattttgaaaataaatctgaataactgacattttatagctttttttcagtaattgagaattacctagtttacaattgggaagccctgagggacctttaatattttttctcttcttatgtgaaataaattgtattttaattttcttaaactgaaaccacctaaatgggccgatgggctttgggttgcctcgcaatgaaataaatgcacagtcggtaaaagcactgcgctgtcttctcccaaagtatttccctcctcttggggatccaggatctggtatgaaatggcacccttaattttggggatctgtctttgccttcagctgcgattagaccccagaaatgcatgctttctaggccctgttcctccagggctccaccctgagccagtaaccagattaagaaactggcaaatgaaaaatcttacaattgctgaatcttccgtttgtctgcatttatgtgtgttttgtgtgtgtctgtgatgtttacatgtaaaagagctctgattaattggcttagaaaaataagtgcttaaatcaagtattttgtcagaaaaatagaaactaatgcctctgttcacataactttagtaatcttttagaaataaagatagttttaaagattattggtaaaataaaatgtcttgaaaatgtagacatttggtctaaattaaggtcagatatcaaatctgctaaatgctttaaggtcaaactatttccttgacttttgaaaactgtcaatttacctactttggagcattagattatagatgaggcctggggacctgtggatagccacgcccgtagctatgctgaaaacagtcagaccttatcttcatttctatctgatgtcctaggctccaccccagtacataattaaaactgcttacttatcaggtttttcactaaaaataaaagttgctaagagttaacattgtaacatgaaattgagttactggagaaacagttttacatacaaggtgtgtagggaatgtgtttttggtaaaagataataagaaggcatgataatatggtttttgttaaagggaatgtaattttatctagttcagagggttttaaagattttcttaacttagagtaacgggacaaaactgaaggtttaaacaaagcaaaaagggtttgtaaagggttaatcttataaaaaaattctgtgggtataaacaaggtggctaagatttaaaagaaattatttaggttttttccataggttaaaacattaaaatcatactgatgtggggccggaatctgggcccatgtccgaataacacggttttcttagaaaactgatctgctgtttgatggaaaattgtaaagggttctaaaaagtttatgaaaatcttaccttacggtcaaactaattaaaaccagacagagatataaaattttattttaaaaactagctttaacatcaaagatgcactaatgaaaacatgaaatttggttttctcttttgaagacaatttttctataatgttaaaagataatgaaagggttttgttttctcctttggttaaatggcagggggaacaaaagggaagagagagaaaagacaaattcagttggcctcatgctatctttcttgggtctcgtttggaaagctaagtctcctatcaaagtaaaggtttttcttttaagattttggagttatcattttggccaaatgaatgacttacgatgaccagggattgtattttgtgatctctagtgttttaaacctttaatatttgacaaactttccaaaatcaaattataaattatgtctctttctaacctaatattttagattagcaaaatatttttttctaacctaaactcctaaaaaattatttttctaacctaaagtccaaaaataacatttattttgtacaaaaatcatacaggaagcattgtcaaatatgaaatggtgcttagctttcattgggctatatttgtgcaaatgtgttgttggtatatggtccaaaattatgtaaaactcctataattctaatacgacttagtctatgttatcagtaataattataattattatgttaacagactgtgtaccacagaggtaacaaatttccttgtccatcgtgtcttaaactggttaccctaaaatgttgttatccacagaccattgttgtctcctttcggtcctctttaaaagacagttttataatcagctataaaatttatcaggtgctctttaaatgcaggattctaataatactggagattgtgacattagaatagaggaaaaactttcaaatagaaaagcgaatggcatctggtttactttggactgtatttgtataaatatgttattagtatgtgtcctaagattatgggaaacttctataatgttgatataatttagtgtacattattagtgtaccttattacactaaattatatcaacattatagaagtttcccataatcttaggacacacactaattataattgttctgtaaaattgttgtatgccacagaaataaccaaaattcctagtcaattgtagcttaaatagtggctatagactgttgtcatccccagacattttgtcttgctttggtccttttcaaaagacagtttataatcagatgtacgaccctgactgcaggtctcagacaactttaaaaattgtgccattggaatagaggaaaaaaacaaacttctaggactctcatggagagctaacgtgttaaacactgctaaaccttttgttttcagagtcaagagaacttatttctttagagctatttgcaacttttaacaagtgagtaaaatatacccctgtgaacaaaatttgaagcatatttgttcctctctacctgatttctccagaatttggaaactatttgtgaatattctcaatttatggcagtatagttaattgcatacgtgcaataagaatctgttttcttttgtaacagggcacaattggagaaagcggttattttaccaaggctttgactggagtggtatgctccccttcaagaatcaaagttgacttatagagccaattaaagctcactggggaatctggcctcataccttgtccacacagagtccctgtacaaggttcctgacctgtgataagtaaagaatgtcactttctaacaggctcagaaaccccacattatcttacgtcctcaagaggagaagaatttgcccaactcataggtatttgagggtacaaacccatggctgggctcggcttttaaaaactcttatctgagattcttcatggaacagagttctatcaaagccaatttaaaaagcctaagtgaaaaataagtactcttgctacattttatgtaaataatcaggccaagtacagtaaagctaaagtttattttgtaaacaaatataagttttatcatgatttgcttttaataaaaatggggactggagagagaaaaattatgcttcaaaagaaagactttagtacaccgttgttagctgttcttgaggttttttcctgaagttcagactaaatcctaaattctttgtgggttagaagtccccaaactaatgctttcaaatctttgcttttaaaattgggagttgtggccaggtgcagtggctcacacctgtaatcccagcactctgagaggccgaggtgggcagatcacctgagatcaggagttcgagaccaggctggccaacatagtgaaaccccatctctactaaaaatacaaaatttagcctggcatggtggctcgtgcctgtagtcgcagctactcgggaggatgaggcaggagaatcacttgaacccaggaggcaaaagttgtggtgagccaagattatgccactgcactccagcctgggcaacggagcaagactccatctcaagaaataaaaataaataaataaataaataaataaacaaacaaacaaaactgggatctgtactcctcatcctaggactcattatttccctaattatttactcattatttactacattatttacaaccgtggtcacttaaacactggagtaaaactatagatgagggtactaatgtttttgccatgcaagtcttgaacacccagccaggcctgcaggagtcgctcagacagttgcaaagtggtttcattcttctcaccttggagttcactcccattcccactatgtcccctgtcgactggaagaagccagagcgatcggctgccttttcccatcttcacagcctacaccttaagattaaggtgttataaaacccaaagggagggattgaaaccacctttgcaaaatcatgactgaggcagtgaaagagatctaacttaaccgactccaccttgcttctaacctccaagctgtccttgttcattcctgggcttaggctgaactaactttgggagaaacttaattcatagtttaaacaaagatggtaacagtcctttcccaaagcagacctccttcttgcctgaggactcaatttcctttataggactaacattagtcacaagattagaaattatggtttgggagttatgcagctggaggctacaagattctgaccctccctaagctgcccctaagatcagggcttgagacgttttgcagaccctgcacgtgatgagtcagctggcaccacccagatgcataaactggcccatatgaacttgtggcccccacccaggaactgactcagtgcaagaagacagcctcgactccctgtgatttcatccctaagcaatcagcactcctggctcactggcttccccctacccaccaagttatccttaaaaactctactccccgaatgcttggggtgactgatctgagtaataataaaactctggtctcccacagcaggctctgtgtgaattactcttcctctatttcaatccccctgtcttgatgaatcggctctgtctaggcagtaggcaaggtggatcccttgggtggttacaaaaccaactctataaagaaataaaacatttctattttaggcacacttctgaaacaatggctctaaagtcctcctcaaagtaccaccaaaaatctaaactgagctatgagccggaggcaaccaagagctcagagaaagcagggaggatatacatatttacattcagcagaagttcgcacaatatttctttcccatttccaaaaggaaaagaaaaaatttgaatttgcaagcttttgttaaaaaatcttggaaatatttttgatgttttcttctgttttgagtgaggagtcactaaaaacttcctttggcaagacaggaaaaaagcaaagaaaagatgaatattgagatactatataaaaaataatgtttaataatattccctgcaaggaaaatggaaaagtaaaaaatttatggccagaggatagaagtaacttgtaaaacacttttcaccttcaggaacttgtattattcttgggggaagagaataacttaaaaggtctttggcatatcctacttggtgaaatacttgtgcttccatcagttgtaaaacggtagttgcaataggtttccaatattaaattgaaaatgagtttccatgaaaaatatatgccctaataaatgaaggtagatacatttaagaataagtaaatatggccagcaccctaaccagggaaggttttattagcactctcagaactcaaaacaccagctgcttaagtcaattaacaaaggttaaatattggttaggtgccacaggaaatgtaagaatatgagaaaatacaactagccaacgtggtgagggcagctatatggaaaagataagatgaggagggctgaagcgtttttgaaacttggggcagggctggggaagggtacatgatgagaggttggggtaggggagaggaaaccccagagcagaaagacacaggcagagtgggagcacggagaggaaggccagcctatggcccaagagaaggacaagctatttaaagaagtggaagctactttgtaaatttaggagatattgtccttgatcagaccttgaaagaaggagaaaggaaaacgcaaggcagcaaagggcagagtggtagaatggcttggattcttacaaattgcaagcctgaggtacacagcagcacagtgggaatcagaccacctaggactaagggtaaaataaaaagaaatgttaaggcttgggctgagcctggccgctgcagaccccaggctgctccagcaaaagaattctgcctcgtggtaatgacctgatcgtgcaaaaatgcaaataaggtggacagtggtcaagggtgaagacagattcatttcatcgaccttggaaatccaagaacatagtcctgaaggatgtgaaagagaggttggtaagcaccaagccagcttctcctctctaagcccacagccaggcctcccgttttcatggcctgtcaggtacatgtagccacgtgaccacgttccagccaagggcatttgggcaaaagcaatgcccacttccaggattgtaaaaatgtcctacataaccctgcgcactctcatttcctatctaccagctggatgtgaaggatggcagagccccaaagggagcccagctcgtcacctttcccacggaaggctccccaatgaacactggacttcctgtgcccaacaagtgtacatttatcctgttaagcatctgagatttccgggttggtgtggtacaacagttagtgttccgtaccttgacccaaacaaaggggaagaatacgatttaggtaaccaaagttccccagagcctgtacgtttgaggatgaaagagaacagctgggtgaggatgcactggtgcaaggtaggtcagtgtcaggtaataaaaaatgagattacacgatttaagagtatgtgagctttgacaattttataggctcatacaatctacatatgtgcatatatgtatatataaatattttggtatactgttccatgagtttttgtaggtggtagttgttgttttgagacagagtctctattgtccaggctggagtgcaatggcactatctcggctcactgcaacctctgcctcccgggttcaagcgattctcctgcctcagcctctccagtagctgggactacatgcgtgcaccaccacgcccagctaatttttgtatttttagtagagatggggttttaccatgttaaccgggctggtcttgaactcctgacctcaggtgatctgcccgccacagcctcccaaagtgctgggattacaggcatgaggcaccacatccggccagttctatgagttttaagttttgtttagattcctgtagccactaccacagtcaggatagaaaacagtttcattacccccaaaactctctcatgctttcccttttaggagaaccattcctcctctgctacgccctagcaaccatgaatcgcttctccattactatatattaactcttccagaaagtctcataaatggaatcatacaacatgtggtcttttatgactggcttctttcattcagaatgttgcctttaaagttgactttttaaaaagtatttggaagaggaataatgaaataaaactggcagacaatgacaatgactggatctgggtaacgtacagatccgtttttccattctactttcatacatgtatggaaatttcaatcataaaaactttttacattttgagaaaaataactgttgtacatcagccatgtaccaatctgaaatttctgcttgaaagaaatctgaaaaaaatcaaacatccgggactgagaaaaaactagcccccattctcctagtcttctcgtgtccgaataaaattcagagcagtccaggcaaaatggtgttggaattacacttacattcttgcaagagacagtgaggagacagtcaaagaaccatattgacgatttctgggtctgcacctgcaggctctgacacttccagtgtctaatggagcaatctgcaatgtcctgcttctcctggaaaaaccaatttccaacctttgctccttagcaatctgagagtcccttaagagtgtgattcaaaggctctgtagaacagaaataggccatttaattctataaaatggatgttaactaaaatgatggaaaccttctgtgaaaagtgggttttgccccttttccaaggtgacacgggtaggaaaaaagacctaattctaggcacgagtacggtcaccctgtcagctcagcacacagagaaaacccccgctgacagtttgcagatgacacatgaagactgaaatcagtgcctcccagcaattctccagctctccctgtctgaaatgcaagcctccttgagttttctttgctgtaatacagtcaagagtttgaaaagcagaattaaaatgaatcttcctcaaacccatgcaaaggggcatcaggtgctaattccggaggcatcaaagatttgaaataggccctggaagggactcattttctgagcagcacactcagcctgcatagatctgaatcgaagcagtctgcacagatgtcccttctggcaaataaaatggataaattcaccttaaaatgtggctcttcatgcacttagatttcacttaggtagagaatgtcagaaatttcattttcttctgagaatgtatatttatcctcaccaaagtaaccctactttcagacatcttttcccaacaaatcatgtccatcacagcaaaattattctcttatttgtataatttttggtttaaaaaatgtatcaagtctgaactctacatatgttttatgttttctgtttgtttgtttttgagacagagtctcaaaacagtcacctgggctgaagtgcaatggcactatctcggctgactgcaacctccgcctcccaggttcatgcaattctcccgcctcagcctcccaagtagctgggattacaggcacacaccaccacacctggctaattttttgtatttttagtacagatggggtttcactatgttggccagactggtctcgaactcctgacctcatgatccacccaccttggcctcccaaagggctgggattacaggcgtgagccaccacgcctggctcgttttatgttttaacccttagccatattagtttgggggactttctcatgtaggatttgtattgcagttcattataacagagctgagatttttctgttaaattctgattgttttcagcatgtatgttttggatcctgaataaagtttactctatttttgtttcctctcaacagcatctagaaaatggataatatgattgtctttagagccaaataagctttactaccagtaaggagtaagaaatgcagagaaaacacagtgagatgacagtggaagaatttaaatcacaagtagaagcagcagcaagaaaagggatacaaagcttattgaaaattattgtatacattactgcagccataaaaaaatgagttcatgtcctttgcaggggcatggatgaagctgaaagtcatcattgtcagcaaactaacataggaacagaaaaccatacaccacatgttctcactcataagtgggaattgaacaatgagaacacatggagacagattggggaacatcacacaccggggcctgtcggggggtggggggcaaggggagggagagcattaggacaaatatctaatgcaggcagggtttaaaacctagatgatgggttgatgggtgcagcaaaccaccaaggcacatgtatacctatgtaacaaaccggcacattctgcacatgtatcccagaacttaaaattaaaaacctaaaaataaaattatcgtgtatgttacaaaaggaatctggaattcaactatttcattccatgataagaaggaaaagtttcctcagggcaatgatttccaatgaggatggtgtggccccaggggacagttggtaatgtctggagacatttttggttgtcaggactcaagggggagaaagtagtgggtggattccagcaacgctgcctaatatcctacagtgctccaaacacacccacacacagacacaaccaggaattatccagtcccagatgtcagtggtgccgaggttgagaagccctgtgctgggatggacttgcagggaaaaacttaaccatagagtctgagatccatgaccatgagtgaaaaacagtgacattttcacatcagcaaactcgggctctcttaacacacagagaatcttccggtgccttcaaatttgtcatggcctttggctttaaattaatcaaatctttcagtcaacagacacttagtgtgtgctatgtgcccagcactacacactgtggcctcgagaatatgcaaggaagacaaggtccctgctcacacagagctcagaaggagaccacaatggccaaagcacaaaggaggcaaaccgctgaatttcaggcagtgttaagctctagcaaaaaataaaccacatcaagatgatgggggcagggaggaatgctacttgagatgtagtagtagtacttgatatctacctgtctgtcagtctgtctgtctacctatttatctatctatctatctaatctatcatctatctatgtatctattcatctaatcatatctatcatctatctaatttaatctatcatctatccatctgtctgtgttagtctgttttgcgttgctataaaggaatacctgacactgggtagtttataaagacgataggtttatttggctcacggttctgcaggctgtgcagacatggtaccagcatcggcttggcttcaaagcttttgcttacagaggagggggaagggagccagtgtttcacatggcgagagcgggaggcaccagactcttttaaacaatcagctcttgtgtgaacgaacagagtgagaactcacttattactgcggggagggcaccaagccattcataaaggatctaaccccatgactgaaacatctccctctaggccccacctccaacattgtgagtcacatcttaacaggagatttagaggggacaaacatccaaactgtatcactatctatcatctctctatgtaatctatcatcatctatctatgtttatcatctatctacctaatctatctttctatgcatccatgtttccatccatctactcactcacccacacatccatccatccacccatctacctatccattcaactatcctatcccgccttttgcacttcacttttttccacctaatgttttagaaaatttacatatcagaatagctatatagtattctgtgaatagtatcatgtgaatgtacataaccgaagtccctttatggatcactttggtgatttgctgattttgccctattatcttctggcattgaatgacagttaatacggttgggctgtgaccccacccaaatctcatcttgaattgtaactcccacaattcccacatgtcatgagaggaacctggtgggaggtgaatgaattattggggcaggtctttcctgtgctgttctcttaatagtgaatgagtctcacgagatctgatggttttaaaacgaggagtttccctccacaagctctctctttgtctcccaccatccacataagacgtgacttgctcctccttgcctttgccgtgatcatgaggcctccccaaccatgtggaactgggagtccaattaaacctctttctcttctaaattgcctagtctcaggtacaactttatcagtggcatgagaacagactgatacaacagtgaatgttgctgtgaagaggtctaaagccagcatggatttctatctctggtaagtgacaactgacttggtttttctttccaaactttaaaaattttgacatgtattatataaaaataaacacacacaaacacaagaacacacatacgtatatacgtattagaacattaacagaaattccatatcatatatgaacagtttaaaggacaacaataaacatcccatgaacttagcacccaggtgagaactagaacacgtttagtattctgatgtccctgcgtgaccctccccagtaacacccttcatcctccttactggcttcctgtcctaaattttctagtgattttgtctttttttttttttttctatagttttacctaaatgagcatattggtccattatccatgaacattatattgttagtttaatgcacatttgtatctttatataaatgtattttctgcaaattttaattaaatattataatacagagattgctcattgatgtgtctagctgtaactgaattattttcacaaacatgtaagaattctattgtaggaatatgtcaaaatttatttatccagtaccttctcaatggtcattttggccattttcagtatttgttgatataaacagtgcttctacgaatatttaagtatatcttttggtgaacaagtgtaagagtttctctcagacaccttagaagtggaaatatggggtcatatcaccaggtcattcccaattattttctggaagagttgtaccatttgtttctcctaccagcaataatattatggtttcctttttccacatcctcaacaacttatcttgctattatcagattgcttaattttggcaatatggtaattataacattgaagcattatggtttcaatttgtatttacctgattacgaatgggatgcagtacatttttatatagttgttggctatttttgttttcgtttataaaatgtctgttcatattttttgcccatttttatatttggctatttgctttgaattataggttatttatttgaacaacagccattcttcatacatactgcattctaattgttggtttatttattacaaataccatccctaaacttacggtttgtctttgatttaaaaagggcttattttaaaaatgtagtcaaatttattaattttccttcagtgctcagtgttttggtagattaagaaagtctaaatccttttctctcagaggatataaagatatcctttggtattttcttctacactgatttactttttccttttaatgcccaattgatacgacatcaatgcctataaatggcatgaagcaggaatctcatcccttttttctcatttggataattagtactctagtgtcatttttgaaaaatatattttttctcactgatctgcaatagtagcttcgtcatacaaaatctcacattttcataggtctgtttttgggctttttctgttcatttgttatttatctattgtattccagtatcatactattttaatttctattattttataaaaaattataacccatctatatatttttctctttagtgtcgtatccattaacagccctttgatcttcatataaatttaaaaattaacttgtcaagttccctaaaaaacctagtttttttttttgttgttgttggagttacattggctctatggattaattggaggtaaactgacacttttgtgtcattatgcatttctatccctgaacatggtatatccatttctttaattttttgtgaatgtttattcaacctgaattattagcaaattatttatttttaaaatgttataatcaagatatgttttgtattaatattttgtcataaattatttttctataacacaggataccccttcaatctatagatttagctcttccttaatacagcaaaatcaaagaaataaaaaacaaaaatccaaaaacttttattcgtaaatatattttttattttctttctgggattctcagctccaaggtcagaatgtattcctatattggatcatctctgttatttgtgtctgtcaccttctttctaattcttttaatccctttgcctttttgcttaaattaaccaagattatctcaaattttctttatgtcaataattctatttttcaccaatggctattcctcagtttcagtttttctttggcactgttttagtcctcaatgcatgtactggctctttgatctactttactatctccttctttgttttctatctttgaactttcagtttattaaatttatattttaaaaaaaaattccacccactctaagaagttgcttttttgtttttctttcaaaatcaattatttttgtctcttatatgctttgcagttcttccttccttcctttctctcagcaatatatttatataaatgggctgccatcttcattttctcctggttcatgctcaacttgaacaactctgctcagaatttctttttatgctggtataatgtgtataaattgcacttgtccatgctttatcttgcaaaacatgtatcaacaccgtcaattatactgttttactgtttggtataactaagtgctattctccctttctgtaatgttttcaaatgttctgtgcctgagttcactcaactctgtgtgtgcccatgtgctgagaaggggaatggaaataagggcaaaaggttagtattatatttcttccacgcgcttggataatcttgggcttcagattatcattccaatttatctctctgtctcagatccctgcttttgatagagaaatacatccttggatgatctctttttttattatcaatcctacaactacccaaaaagataaaagggaaaagaaatataaaaattgatttctcacctttgcataacaagttcacagagtagaaagaaaaatattacctgttccctctgtgttctttttccactccctctgggtctttccaaagtttgtatcatatttattatgtcttctgtttgactatactcatttctgaatgcttatgatccatctgcctttgatcgcagctgggattgacacaatgacaagcccagtgattgtctctgcctctggcataagatagagtcaatcagaaaagaaaatatctcctcaaactgttataccctcatagccaagtcagggaacaggacccatcccagataactgacaagaagaactttagtatcggtaagtagttacagaggtgctggaattgctgaaacagcaactagaggatggtgacacagcccaagtatgaataaacacaggaagcctctgttcttagggtcagaaggacaaagcaaagaggttgtgttaaaagaggccaagagtaaggtcttcatgtaggaactggaaaattggaggcatggcaagggctacctggtgggagctggacccacaggtggaggaacaatttggcatgagtagggacagtggcatgagagaggagagaattatcctgactccaccccttttccaacccacaagtttcctatcagtggcttcaattgaccaaatgtaatcaaaagccagagctgggtgatgtagagaacctgtgaaatgtagattgcagaggtgtactcagtgaaaagcacagcacagcagggtaagggtagaaaatagattgaagacagaccaccagctggtgtatctactctcatctgtcttcttgcaagtggggctgattagtgacacttttcatgactactgtttatttatcactacttatctattgctgcttcaaaagctactatgaaacccagtggtttaaaatgccacagctttattctatatcataattttgtgtagcaggtatatgggcagggctcagttgggagattcttctgctacacatggagcttgacggaggtcacttggtggtattgagttgctggatggtctggtttaaaggatcaaagacagtcttacccaagtgtctggttgcctgacaggagaggctggaagacagctcacctggttcctcttcctctccatgtagtctcagagtctcttacatggtctcccagaaaaacagctggatttctaatatgctggctcagagttccaagaccaagtgatcctggagatgctgggaaaaagtcaaagcttcctttgatctatcctcagaagctccagatcatcacttctgctacagtccactgggtaagcaattcactaaggccagtacaaattcaagagcaggggatcagaacccacatctcaacagttagagagggtcaaagaatatgcaactatctccaatccaacacactctcatcccaccttgcatgaggccttgagtgggaggggactctgcagctgtgattggatgcactgagctgatttttggaaacatctgtctcactatttagctgactccctcccccagtctttgttgatgctaatgtgtttttcacttaaaaaaatcagtttactttttataccttcagatttgaaggagggacgggaaggttacatctcactttgctctgctatcttgcactagaatgtgctgagttaggtgtttccctgagttatcaaagaaaatgcctcctaagcagctttgaccatggtcctctttttgtttcttctttatagtttaagtcagaggtaatctgctacttgtcaacatcagccctcttggaaaacgaatcaacactgcttagtttgaaatggccttaagtaatctgttcacatttcagctggtccctgatacatttcttggtagatggaattgatcatgtactgaagcaaatgtggtgccaccaagtgtgctcaaggttcaccttactctgtttatactccacaacacctggacaaggtaagaccccaggaactgaggcccagtgagcttcagtgaccctcccaagttgcataagtagtgaaagtgtcacgacaggtgcccagagctgcaactctgtgactctgggctcttcctcataaaccccatgtggtctccagcaggcaaacacagcccttttgttttgaaaatgccatttctcctgataattattagggtgtaaagtgcttggaagggtcacagcagtgtttaatggcctttggatgtcactgtaatttgcagtgacaaataagacttgcagattttgttgggaggctgaagtgggtggatcacgaggtcaggagatcaagaccatcctggctaacacagtgaaatcctgtctctactaaaaatacaaagtatcagccgggcgtggtggcgggtgcctgtagtcccagctactcgggaggctgaggcaggagaatggcgtggacccaggaggtggagcttgcagtgagccgagatcgcgccattgcactccagcctgggcaacacagcaagactccatctctaaaaaaaaaaaaaaaaaaaaaaagagacttacagattttggtcatggtagatacaacttcacttgatccgctctcagaagcgctgacttaagttggcaccttgtccctccaatgcaaacaccacatgctcatcctcacagcatcagtcactcaggaaaggccctggcagcgtgctttattcactggtaatccccagcaccaagcttaatcttcaacaaatatatgttaaataaagaaaatattttagttagctcagtcactttagtgctcttaaagaaaaaaaaaaaaggaatctcgcagtatcagtgactgccttcctatttcgcatttatgaagaagaattttccaacacatgtgctctggggctgcatgttagaaagggtaggctttcaatatcttaaattaaattctcttataaactatagggcctctggccagttgtttaaccttttttgtatttcagtttgtgcctcttctgaaaaatgtaagtaataatagcacctacatcatagaattgttttgaggattaaatgtgcttaaaaaattaagcacttagaacagtgcttggcacaaatagatatttaatgagtgctggctatcattattgcattgagcaatctcataaaatttcccaaaccaagcccatgatccctgcgttcctaagagtaacccagaagtggtacacagaaaaattaaacctggatgtgatgaggggatatgaagacattccatctacaacctgggtggacattcccatgagtgtctacatggacagatgacatgtaggacccaagcccaccccacttcctccttgccatgccactatatagtcttccaccactcccaacccctcaccaacccagaatgtagtaatgtacctgaggtgggggcgaattaaactctgatgactgagactgagttctctcaccaaacacacatctatccttgcccactcgaatctgcagaccagaattcataccagccatcatattagtattctactggatgcagtgatgacccaagaaggaaccaagggccttttcccctcagttgctttgagtcttgttgaaaagcagactatcaggtagacctatagtacagggtgaagctatgatgagctactcctgcataaatgaaaagtcaactcaaggttacaaagtgcgaacgtcaatgactggatgtggacatagccaaagaagaccatgaagaactttagttgcaaagcaacctcttctgtctataaatccccccaaataattataataataataaattccatttaaacaaaaaaaggcagatatggtttgtctgtgtccccacccaaatctcatcctgaattatagtttccataatccccatgtatcatcagaaagatccagtgggagataattgaatcgtgggggtagttactcccatgcttctcttctagtgatagtgagtgagttctcatgagatctgatggttttataaggggcgtttccccctttgcttggcacttttccttcctgccatcatgtgaaagaagacatgtttgcttccccttccaccataattataagtttcctgaggcctccccagccctgcagaactgtgagtcaattaaacgtctttcctttataaattaccctgtctcaggtagttctttatagcagtgtgagaatggactaatagaataaactggcaccacagagagtggggtgctgctataaagatatctgaaaatgtggaagctactttgcatctgggtaacagatagagattggaaatgtttggagggctcagaagaagaacaggaaaatgttgggaagtttggaacttcctaaagagttggagggctcagaagacaggaatatgtggaaaagtttggaacttcctagagctttattgaatgcctttgaccaaaatgctgacagtgatatggacaatgaagtccaagcagaggtggtctcagatggagatgaggaattttttgggaactggagtaaaagtcactcttgcaatgctttagcaaagagactggtggctgtttttccctgccttagagatctgtggattgagagattgaaatgatttagggtatctggaagaagaaatttctaagcagcaacgtgttcaagaggtgacttgagtgctgttaaaagcatttagttttatgtattcatgaagatatggtcttgaattggaacttatgtttaaagggaaacagcataaaagttcagaaaatcaatgacctgaagatacaatagaaaataaaaacccattttctgaggagaaatttaagctggctacagaaatttgcctaagtaacggggagccaaatgttaatcaccaagacaatgggaaaaaatgtctccatgtcagagaccttcacagtagcccttctgatcacatacatggaggcctaggaggaaaaaatggtttcttgggctgggcccagggcccccctactgtatgcagcctagggaattggtacactgcattccagccactctagccagggctaaaaggggccaaggcacagctcaggccatggcttcagatggtaaaagccccaaaccttggcagattccacatggtattgagcctgcaggtgcacagaagtcaagaattgaggtttgggaacctctgcctagatttcagaggatgtatggaaatccctggatgtccaggcagaagactgctacaggggcagggccctcatggagaacctctgataaggcagtgcagaaggaaatgtggtgttgaagcccccacacagagtccccactggggtactgcctaaaggagctgtgagaagagggccaactgtcccccagaccctagaagaagaccaccaacagcttctgccacatgccctgaaaagctgcagacacaatgccagcccatgaaagcagctggaaaggagggtgtaccctgcaaagccacaggaacggacctacccaaggccataggagcccacctcttgcatcagtgtgatctggatgtaagacatggagtcaaagtagattatgtgggaacttcaagattaattaccgcttcattggattttggacttacatagggcctgtagctcctttgttttgaccagtttctcccatttggaacaggtgtatttatccaatgccggtacctccattgtatctaagtagtaactaacttgctttcgattttacaggctcctaagcagaaaggacttgccttttctcagatgaaactttgaacttggacttctgggttaaagctagaatgagttaagactttgggggacaccgttgggaaggcatgactatgttttgaagtgagaggacatgagatttgggagaggccaggggtggaatgatatggtttggctgtgtccccacccaaatctgatcttgaattgtagttcccatgatccccacgtgttgtgagagggacccggtgggagtaagtgaaacatggcagtggttacccccatgccatgctgctattctcatgatagtgagtgagttctcatgagatctgatggttttataaggggcttttcccctttgctcagcacttctccttccagctttcacatgaagaaggatgtgtttgcttccccttctgccatgattgtaggtttcctgaggcctccccagtcctgcagaactgtgagtcaattaaacctctttcctttataaattacccagtcttgggcagttctttatagcagcatgagaacacactaatacaaagactaaacattctaaaaaaaattccttttataaaaacagctggactgaatcccatagtctaaggacacagtggaagataaaggtgttttactcacattttgccaaagcaaatcccacacaagcactccctgggagaacttcctaaagccacaatggagccagtaacactatttatgttcacacccattcatattgatttctgtcttcctacatttcttggatgttccttcaagaggtaaatacttgaagatgagggttgagaccctgcttcccacaggaccccatcaatggccctatctcaactcccagaggaatgaaaagactgtggatgaaatgtttctacacgcttttcgggtttttccttctagctgtttttcaatcaaatgggtataaaaatctcactgcgctagcctcctttaaggttcctcggatgttataggctatgactcaataggagcaaactgctcctttcaaatgtgtttatctcaaattccttgcaaggttgtcctgagtactgtctgtatcagcctgcagagtctccggggccttgtggatggcacagcactgagctacggcacctgtctcttctgtacttgcaacagaagtttatgtaacataagaacagtggggtcttcagggatactcatgcaacattacacaaagcatataaaggaggaatgtgaggtcgaatgtatgcaggtacaaatgtcaaatctccttttttgggggaacaaattaatgtcaatttcctaatctctaccatagagatggtagactcctcattgaggagtctgcagtgaacatctgtcatgttttagtcacccaggttctatgcctgcatcctgagagctcccggaattatctgaggaggggtagtagttgtcccacattggtgctgatcttggtgggagggtgaatgcaggagccactgccaactgggttactggaagagttaggttgtttcctcttcctctggcacaaccaggggggtgaaaatgtgacttaagcttgcccagaggacatttttttcctagcactctgaagtttgagccactgacaaaggctggacagatgttcacaggagcatctagggctgcagcagaggcttgttggtataggcactcctcgctgcaaaactcagtttaggcttccgaggtctagggagcagttttgggtcctgcttggctctgcatcttcttcccagcctttctactcatctctggaacccccaagagcctgccagttggccagagtgaatttctattgctgagtaacaatgaaccacctgttaggacattgtagggagattacatgaaaccacagaaaacagacccagtacaaattcaggaaaatggtaggcactcactgttattacattcctctctcttcccctttccctaagaggatcagagcactcacattgtttgacacataaatgtgtgtgaagccataagccttgaccaaacacatctgacagctccaaaggagccacagcaatcaactgagggagagggccttgagctggagccactggggattaacatcctgaaaagagaattcatgaaactgtgtgcaaagaggctgtgcatatggttatatggtggcatttttcacaaacaggcatttacttacatgaatcaatcatacaggagagagagagagaagtttaaatagtttatttaaatgtctactttcccaaactacctaatcagcttatctccacaataatgagttggtagagatgtaaccagtgattctcaactccagctgcacataagaatcactgcgagagctttttaaagaccctgaaaccagggcctcaccccagaccaatgttggggtcagatggtcctaatgagccattgctattgaaaacaactacctcagtgcatctcagttcctgagctcctctcatggtgcaaacaccttaatgtgcttgcatttgactctgggttattttccacacatggccttgaaacccacaccactgcttcatgtagagcctagccaaagaacctagtctctgacccaatgctaaatggaaagtaggtggggtggaattatggggacaatgacatccactcatccttccaatatttcatgagtgactgtagtgtgtgaggtattatactagataatgaagaaacaggagcaaacagatcaagtcttctgccttatggagcagaccttctagggaatggaaaactaaatgatatgtgcaatttaaataatttccaagaaaaaattgacaatacaatgtcaccttaaatccaaatgcagaaccttcctctatgcaagaggtgaatttgctctatgaatattttctcccacaaccataatctagtccaggattctctaaccagaggttattgcgtcccttggggatatctggcaatatctggacatatttttcagtcgtcaaatgggtggtagcagttaacaggcatctagtagtcagaggccagagatgcttctcaacgtcctacaatgcacagactatcctcacaacaaaatattatctgatccaaatgtcaacagtatgaggttgagaaacctattctactcaaaccaaccctattcaaacttagccttgggggttgcctgacttctccaaggtcacatggtgaccttctagcaaaacatggaacaggggcagcacttaaatatcacaattccactatttttacttaaaagctcctgcttctgaattgcaccttgattcctgatcagatatagagaaaatatattcttatagctgagaaaaatggggcaccaaaaatctagacatggtttaactctaaatattatacaagttctcagaagaaaatgtagattctctcagcctagaattggcttccctgcctctctaagtgaacacaagcatgtcatgtcccaactcatgaaacctaaatgctccccaactgcctgcagcatgactctttgtaaactgactcccaattcttccagtcacatttcacacaacactccctcttacatctgaacttcaattctacctatttcttgcacctttgatttagggcattggatgagtttcttctaagccaattagcttctgggttctaggttgggatcaatactgtcctagggcttcatgagccataccaatacccttataataaattctcatttttcttaaaactgattcaaatcatgtttctgtaacttccaaaacaatggtgttaagaaacacagtcctgggaactactggtttcagctctgatgtgtacatggcttggaagtcatcacaattattcttacaagaaaaaggaggaaaaactgaaaagcactacattttcttagactcattggagaactgaggttgtaggacaaagcgccactcccaaatgtggagagacagatacattcaaggaagaaataaatgacggtaaaataattttttctttttcttaattgatcaacatatactgtttgtttaagcaataatagtagtgatgaatcacagcaatgccgcaaaggacatgagggtaaacgggaaaactcagttgtaagttacctgtgctacatgggaagtattacagtgctacatgaaattgactcagattagttaaaaatgtatattaaaaattttagagaaacaattaatattttaagtagaatcagtacaccaagagaggatagcaaatgtaatcacataagatactggaatcaggcagaaaaaggggcagatacagaacaaagaacacatgaaattaatagaaaatagttaaaaacatgatcaatattaatctatatgaaaagcatttaaatgtgaacagactaaatataccaattaaaagagagagattgtcaaagtagattaaaaaacatgatttgcctatatgatatttaccaaaattccactttagctcaaaagactttaacaagttaaaagtaaagagagagaaagatcatgctaacgataataaataaaagcttcagtatttacataaattccagacaaagcagattttacaaaaaggaaaattatcagggataaagaggaagcattacataatgacaaatgggctaattatccaagaagttacaacaatcctaaatgcgtatgcatctaacaaatgcacaacaaaatatatgagataatcactgatagaacttgaaggagaaataaacaatccccctattatagttgggaacttagcactcctctgtgagcaactgatagatcaaacaggcagaaaatcagtaaggatgtagatgacctgaacccactatcaatcaacttgatctaattgacatttatggaatattccatccaaaagaagcagaatacactttcttctcaaaatctcatgaaacatttaccaagaaagattacattctgtgccatgtagccttatatttaaaatagaaattatgcaaagtattttctcaagccacagtagtaattaaactagaaatcaatactagaaagatagatggtaagtccaacagatttttgttaattaaaaacacacttctcaataacatatgaatcaaagaagtctcaaaaaaaatttaaagtattttaaactaaattaaaaagaaaatataacttacccccaattttgagatgcagaaaagcagtgcttagagaaatatttatagcattaaaaacatacattagaaaagaaaatctaaaatcaataacctaatctaaaattaattagtgttaagtgtagacacctaaagaacaaattatacctgaatcaagcagaaggaaattatacaaattagagaaaaaaatcaatgaaattgaaaatagaaaagcaatagagaaaatctacaaaaccaaatgttaattctttgaaaatatcaataaaattgataaaatcctactcaggctaacaaggaaaaagggaagacaaaaattaccaataacaaaaatgaaagaagagtcatcactactgatcctatataaattaaaaggtaagttttcttctttgagatatattgcacaccctggtgaatacagtagataataatgcagtatacattttaaattgctaagatattaaatttcaaatgttctcaccacaaaaatggtaaatatttgaggtgatgaatatgttaattagctaagtattccacattgtattcataaaccataatatcactttttacccatacatacaactataatctttcaatttataattaaaaataaaaatcaaaacaaaaacaagcaaaacaactccgctcaaaaaataatactaaatacagcagctaactctatacccacaaatcttataactaggatttaagatagatggattccttgaaagacacaaactaacaaaactcacacaaggagaaagaaatacgtagcatgaatagccctatctattaaagaagagtaaattattaactcccccaaaaatgaaatcaccaggctcggatggattcaccagtgaaaatttacgaacatttaagatataaataataccatttctacacactctctccgagcaagcagaagcagagggaagatgttctaaccgtattaccaaaaccatatgaagacattcaagaaaaaacaaaagtgcaaactagtatctctcagtaatatgagtattaaaatcctcaacaaagcattaacaaattgaatccaacaacatataaaaagaattacacaccacactcaagtggagtttattccaggtatacaaggctgatttcatgttcaaaaactaatcaggataattcattcactgcattcacaggctaaagaagaaagatcgtatgattatgtcaacggcataggaaagaaactgcccacttttcaatggggtcgtttgttttttcttgtgaatttgcctaagttccttgtaggtgctgcacattagatctttgtcagatggatagatggcaaaaactttctcccattctgggtatatacccaaaggaatataaatcattctattataaagatatatgcatgcatatgttcattgcagcactattcacactattcacaatagcaaagacatggaatagacccaaatgcccatcaatgatagactggataaagaaaatgtggtacatagacaccatgggatactatgcagccgtgacaagaaatgagagcatatcctttgcaggggcatggatggacttggaagccattatccttagcaaactaacaaaggaacagaaaaccaaacaccacatgttctcacttataagtgggagctgaacaatgagaaaacagggacacagagagcggaacaacattcactggggcctgtcgggggagggcagtggggggagagcattaagaaaaagaactaatgcatgctgggcttagtacctaggtgacaagtgcagcaaaccaccacggcacacgttaacctatgtaacaaacctgcacatcctgcacacgtaccctggaacttaacaatatataatttaaaaacaaacttgacaaaatgtacaataagttttgataaagaaaaaactcttagcaaactaagaaggaaagagaactttctcaacttcataaagaacatgaacaaaaagcctataggtgacgtcgtactgaatgtcgagaaactagatgcttactcactaagaagaggaatgaggcgtgacaagcccttctcaccattactattttacattgtactggagccaaatgaaagagctctcaatagccagagtgggaaaatttgagcaacaaaattcataaaataatattagattaaacccaaagtataaaataaatatccaggtgttctcactgaaataagtacattattgaataaatacataaacgagggaaaataagcaaatgtcccctgcagcattctaaataacttaagcagctatattgccctcaagggggtgaagtatcacttccctctttacaattgtgagctgggcataagcacttccttccaaagcatagccttgggagaatgggaaaaaagtaactttacggtggagaaacctgacagacccagcctcagcgcggtgctggtgaggtgggataggtggccgaggaaacgaccatgtcctcaggatatggcaaccttgggaccttacgatcaatagaataaacctccccattagcactgtagtcaagctcattgagcagagcactcttcagtagggaaatttcccctgtagagagcatgcgtattttgactttccctgtcctcaggcagactctttgcttattataatagtaaaaaaacacacccctgggtggagatttcggacgctaatgagacatgcgatgtatgcgacgtatgaacaagcttgtgcagctactgcgcatgtgcacccagaggacctcccccagacatgcttcctagtaacacctcttcccacccgctcatgaatcatcatgtaaggctcccataaagggagtctccctagtgcccatctttgctgtctcatccttaggagcagcctgccttgaatcctctctctggtgtactatctatactaaacttcactttcaaaatattttcttttgcaatacattgctctatggtgcatttcctttgctgtgtgtctcttgtttaaattcttttaaactaaaaaggcaagaactggggtctcacagcagccgtcagccctggaagtgaacatcaacagtagcaagtcctgtgggctgtacgcaccctcgatgtgataaacatggcactttgcctctgtggttttcctcccccaaacccatgatcccagtgcaatcaggagaaagagcatcagacaaatcccaattgaaggacattcctcaaaacagctgaccagtaagtctcaaaatggtcaaagccaccaaaaccaaagaaagtctaagaaatggtcacagctacaggagtgttaaagcaaaataaatatggcctgagaaggactctatttccatgtttgagtccttgtggatgaactgcaacctagcttaataggcagacaagattgaaaacctaacttcggagtatgcgcctgtaacagtggctgagtcttggccaatcccagtggccatacttcaaccagtcatagactgctgagtgttcaaactgtgttcaaataaggcaaacactgagctgtaaccaatccagctgtttcagcacctcacttccggtttctgtacatcactttacttttttggtctataaatgtgttctgggccgggcacagtggctcacgcctgtaatcccagcactttgggaggctgaggcgggcagctcacgaggtcaggagatcgagaccatcctggctaacaaggtgaaaccccgtctctactaaaaatacaaaaaattagccaggcatggcgatgtgagcctttaatcccagctactttggaggctggggcaggagaatcgcttgaacctgggaggcagaggttgcagtgagccgagaccacgccattgcactccaccctgggtgacagagtgagactccgtctcaaaaaaataaaaaataaataaataaataatgtgttctgaccacgaggcacccctgcagtctctctgaatctgctgattctgggagctgcctgattcacaaatcattcattgctcaattaaactccattgaatttaattcagctgaagttttcctttgaacaggagttccaggagacatgacccctatatgtaatgcagtctcctggatgggatccagggacagccaaggggggcagcagataaaaactaaggaaatttgaatgaagtatggactttagctaataatcatgtgtcaatattggtgaattgggacaaatgcagcacacaattgtaaggtattaataaaagaggaaactagcggggacatatgggaacactgcaataagttcacaagttttttgttaagtcatatcagttctgaaattaaaagcctgtccgcctctcactcttctatttcaagcagctctatcaatccccactagggtaacaacgggatgtacaatcccaggtacagaccacatgtcactggacattggtataatttgaatacaccaacatctgtcctctttgttaacagtgccccagtcttcacaagaggaaaatgcctcatctcatgggatgtattcttaatgaagggtaattcgaggaaccattttacttcatggaagctgcatctggtccctctcctacccctggcacagccagctagtagacaggtgattcagcaggggctgcatggaggtctctgcagcttatgtgcggataacgagaggaactattgaaggaattcactgtgagggcgggagagagttgctgagaggctgctgtgtccacacgcagccaccaacctccatcagaatctgcatggccaagctgggtcccatgatatccatccagtaaacccttttatttattattttttcttaaattagctggagtgtgatttatgacctgcaacttagaatatcactggatacaccagggcacattttacctgaaatagaataagaagaaatcctattctgggccaacacaggttcaaaggttacatcattcaagtgaattaagctcacagggtcaatttcaaaccaccatattatttcctaataagctttaagtcttcggcatatctggctaccaaaaccaccaaagaatatcgtctgagcctcatcaatgccaggctcacttctgccctttgtcaaacacttgtattttattctcttgctatctcctttctaagcctcacctttgcaagagtatctccttagtaatgtctcattccaacctggtcttaaagccaatcacagtgctaggcatatggcacttaacaaattcttgagcatttaaaactgcagagacctcagcaaagtgcacatatttgttaataatcagcaattcattcattcattcaagaaatctaaggatgtctctgcctttaagaacagccccttctctgagcttgttccactgttctaggccccccggctgactgttgtgggctgttaggtaaccaagggaatgctacacctttactgggttccagccttccattcggatctgaagaccagagctctttggaaacggactccctgtggtgaaaagcaacgaaagaataactggtgagggtgtgaaagaagagccccagttcttatcttcctccaggcccatggcaggtaagtagagactgggatgcgtctgagccttgctctcagtgggggagggacacaggagaatgtgtggctagaagaatatagaagaaaaggttccagtgctgtgggatgctttagctgttcacttgaaggaaaacattttctgggattgaatgagatcgttagatgtctcaggaatgaaagaaagcgttttgcttttcttttcctgcagatgtcaccttcagaagatagaagcagcagggtagaacagaggttgtaagatgacaaaaagccccacctgggttttcttgttcttaaagagtgaaacacacatgcatatatacacgcatacaaatacacacacagaaagaagctaactcctgtgcttcagccgtcgcatgcccctgagtgcccctgagatcacaggcacgccgccggggaggtgtacagtgggtggtcagtcgctatcaacaaagaactcaaaccgtagctgctgcgtcagtccatgatttgcaaatgtgcatgatgcatatttgcacagtcacagtttggagaaaagcgcccaaggatacttggctggatccttgagggttatttatagcagatggccagagagaacagacgcacaccaattctaaatatttggaagctatgctaaattagtgtcaaattgacttcatttaaaaagatatacagttttattattttctaattatagggattcaagctaaaggataataatcttgccaggtccaagttaacctccagctgtttacataaacacatgagactcatccataatcagagcgttttaagtatgcagcaagcacattattaatgcaacctcttaaagaaacagtgtagcatcgtaccgaggtaaacagacattcatgaaacatttccttcattgttgtctcatctgtaaaactgatttttcaaattgaattgacatttctaattgatgggctctgaacaaatatacttttgctgtacttctcaaattttccaaactttgacctgtgagtggagccaccaaatttagaagcttcaaatgcatttgcttgtgaatttgccaagacttggagcctcatattgtgcagccacacatagtgaatttctcttggttttgttacagactgccaaagataaaagccacccttggaccctaatggatatgtttagtgtgtcataaagtcatgagacacaaagctttttgtgaaattcagtgctacacacatcactgcttacacacacacacacacacacacaagctgcatgtggctctcatctcctgagagtcaaagcttcaggggattgcagtgtttaatcctgcgttcagaaaatcaagtcagtcgttggcggacctaaaaaatggcagacggtatgaaacggtgtaagatcaaagctcccctattcaaactttttgtttccaccaccaaaatatttctctacgtaagcagccatcctcacaaagaatactatgtaagactgttgaacccagaaaagtaaaacacaaagctagcagacctcattgaggacctgtggccagctggatctagatccgatttccagaaggacggaagggaacgctaatgaaggcttggccagcgcagatgtgttcctgtaccctaaatccctgcggctattccgcgaatggcacgtccagccaggccaaaggtttttaccttccaggacttagccaagttcagtcattagatgcatgtccattaggttctgtttctttagttaaaataggcatttctaatactaggtcacaatcaaataaacttaaatgtgcaaggtagaatcaaaacggtgatttattttcttaaactcatccaccctttaaacataaaggaaaaaaggggaggggagaggggaagggaggggaggggaggggagaagggaggggagaagggaggggagaggggaggggggaggggagggaggggaggggagacggcatggaggggaggggagaggggaggggagggggagggggaggggaggggagggggaggagatggggaggggagggggaggagaaaggggaggaaaggggaggggagaggggagaagggaggggagggggaagaggagaggggagggagaaagagagagggagaaagagagggagaaagaaaagaatagaaaaaagaaaagaagaaaagaaaagctagaaaaagcagccataaatcccatatgaagggggatagagagctggtcatcattggatgaagtttataagcccacatatgaaacatgtcttacatacagttacactcctcatttcaggagtcataacacacattttattacattgcacatcaggtcaaattgttgagttatgtagcagtgctaggacatttttaataacccaaaaacacttctactaaacagctgttgtaatcaaacttgcctgtgttgaaaataaaactaaaactatataatgaaaatacaaacaagcctaggcaagtagcttctctcatacgttatattccacagtgaaaaccagcctatatttattctaaagtacacagagcttattttcaatgtcttctctttggtatattcttatataagaaactcaacaaattctactgtatattcttcacacgttatgctcatttatttttttgaacactaagttctatttccagggagaaacaaaatggtaactttgaggttggtaccatattatacttagaacttacatatctggaatagattttgagttggcaaaaccgtgttccctgtcctttctgacaactgttgccatttcatttgcagtctcatttcagctgtgaggcatttaactctcccaattttgaaaagccttcttggataattttagcattcccaaaacttgctgataataccctaagctaagggaaaaggcgtaccatcagcagccccccggctgccctatcaatggcttggaaaatctattaagacgaatattctcacaacccaattgccaacccggaacgatcagactggtctctgtattccacggtgcagatggagtttgtaagaacgggaaggccggctctacttcggtgagcgataacacagcttttctggtcaaacagcttctggaaaacaccacctgatcgacgggcgggtacagacagacattgggaaacgacttacctcaacgtgaagcgatcttcagtggaatttctggagatggaaacaggaaaagtcagcacgtctcctttcctcacggtctttggtatatagtggatggccacgctgttgtccagacgcagttctctcagggagggtttcctgtgtgtctgataaaggaagatgctcccgatcctctgcaaggggggcccggactcatcgatgtcactgtggcctgtccggatcccattgcttctcctcgcgtcttccctgacgcagtcccctctctcaccccctgggtgcacggtgtagtagagctccacgggggtcccctccggctggtccacggacttcctcctcccggcaaccaccgtgggggggctgaaccagctggacaggagctccagctcggccacgcacagccccaggtccccctgcagccggcagctgccccgcacctctcgggtctctcggaaagcaaagaccctcaggcacggcagcttctccccggcgctgcggtcgtcccagtctctgcccatgatgtggaacagaacctgcactttgggccggctcaggtagactttgtcccgcaggatgtgggcttttagtttccagttaagagaaaatttgttggtgaatccaaatgggttggaaggtagcattaaatcctggggcaccacttgctcgatggagaaaggcccgtagctggcattgaggacaggcagcctcctggatttgtaaatcagaaatgactccacccgggactgcaggctggagttcctcatgatatcctggttggcctccttcaggaagaaggagacgtccgcgttgttgatgtggtaggtcacggggaggtaggtgggcagcaaggaaaacctctggatgctctcaaggatccctcgaccttccgtcactgtggggagggaatcgcagtgcaggcgttagtaatgctaaggtcctgttaccagcatttcagacatctgcgtgcccccttcataacagaggaccctgtcttcgcgccaattatgcaattccttatccaaacctcttaatccaatctactcgcttcatattatttgtttcagaagaaataaatgccaccaacctaagtagaaaaccagtatcatttaacctataaaaaagttgagcatgcaaataaatacaattcaaatacagttttaaaatttccactcgtgataatggtgtttttatggggttatggtaaagacttgctctttttttgatcaaaggagagattagcaagtgttagaaagctgtcacagacaagctaccatcgacagagaggcaccgtcccattgactcaacacagactgagattggaaacaggaatgacttcctcaacacatggattgatgccacgtccacattccacctgatacatattcctttgtgttccactcatatgcacgttctgcatatacgcacatgtccaatgggaaatgctaacagacttggggcaaaaatagacgcagatgcacaatcataaatcacatggacagtggacacccgcccccagttggagttaaggggagagatgcagagaaaataccttggaaggatatattgggaggggccctctagaaatagatgagatgaggtgaccacgacaccaatgtgtcagggccgggcgtacaaagcaatgctccaagtcatctatgaaacactggaccctgaacctaagaagcacgggaagggcagcacctcgcttccatgccagccacatcctgtggacactacgccgtcaccaacgaacaaaatccattgttcatttttccgcactgaacgtatctctccctcagggggagaaaaatccaaaatgttattttcacaagttgccttacattctgtaagaaaaatgcaggcagagcaattgcataatccaaagaaccaatttaaggagttttagaaatgtaaactattggctgggaacactgactttctaggcaaagctccacaagttatgctgaagcccttctcgtcagtcaccatgtaattatctttgattactcggacactcatggctccacctttctcaaaggcccacgcaaacacacatctggaagcctgatgccttcccgagtcaggacccttcttggcagtcatccgccagcagctgagagagccaagagctcggaggcaggggtcctgctcccggctttgtgagacgatgagcaggtcactgaccctcgttgtttcccatggacccattggtagcatgagggggctgactgcagcactgtagcctcagcccagctgtgataacacagggtgtcaggctgcatccagtttaacttctagacaagaagttcaacgcatgtattcaacccgagtttacagaaagccctggatgaaaaaatctctccaatcatcggcatgaccaaactcagagcaggctgagcttccatataaacaactaaggcttgtcttggactgaaccatttgagactgcttataagtgagcagtctgcatccacccaaatgacaatttcctagggttcaacgtcataaatatggattgttttcaaaaatcaaaatatcatagatataaaaagggactccatgccttaaaaagattacatgttttaactttatagaaataactcctgattgatattatctctaaacttgtatcttcacatgtgagttatagtaaaaacaaagaagagacaaagaatatttcagcccctctctgggcaccctctccccatttgcctagccacagttctgtgacctctctggctgcattatcaaagtcaccttgctgggatcctttccttgactgtatgattctgggttatggtctccatctgggtttttctgtagcatccccagcttcctgcatcaaaacacgttatgctttgctgtgattctctatgcactccagtgtgtgatatgccagggagcagaaatgacacgcaaggcttttttctctgctgtattcacagtctttaagagagtgcctggtaaatgtcaggtactcaataaatatttgataaacacgtgaatgaataaatcaacatgtggattatgctttttatgtcacaaagagcagattctgtttttacactaggatgttattcactgtcctcttggcttccatcactgtaatcggaatcctggatccttttatcccattaagagctccgtgtaatcctggtgatacgggactaaggaagatgggcctctccatgtaatgagactcctataagacctacatcagttgatacagtgtcccctattgttaaaaacacatcttggcaccactcagaacaagtaccttgagctgcctcagcactcttttgccattcgtgctagaaacagccaaagccagacaaccaaattacagatgcttaaatgttaatgccagacaccaaggctccgtgaacttccctgttgaacatctgaccccgactacttgaggacatgaaacctaactgtgcagctaattacaccttccaagggcaatgacatcgggtcctatgattttattcaggaaagcaataaggcaatcggggtcactgtgaacatcatttgaagggaagtaacttcttagctttattccacaaatggtctattagtcattttgcctggtatctgacctaaatgtttattgcttaaaattgctccattttgacctaaagctagtgtcacttcctttcttttttttttttaactaatactacaaaaataatgccaattatggtccacgatgcacagaatgaacgaagtaaaactcattatcctctcatccttacaggaatggttactgtcactaaaggacatgatttttatttaacataaaaattagcaaagtgttaaattacaaagaagctatacacagtaaatctcagctaataattcgctaaggacaaaaattactttttgattgggttccgtggctgtaattcttacttgaaggagagtgacatgttcgcatcttgaagcaactcagtggtctgggagagattttgtattaattttaacatttttgaaaggatcatttttccctgaataatacttttttaaaaaatatgggaggaaggcaatttgagcacaagactctcagttttcccctatgtggactcaaaagcaataactaatcgaatacggtaataggcaaaaaaaaaaaaaatctacatccatgctgaaaattaggtacaatctgcatgccatagactgcaagaattactgggactcacaagggactcaaatacctcacatagaaaacagaatgattagggcagccagataaaacacaaacacctaattatgttttgatttccaataaacagaaatattccatagggcatgcttataattaacaataaatatttttaaatggtgtttttctgaaattcaaatgtagctagacatcttgtgttttatttcccaaatctggcaatcctcagcatggtattgtcatagaaagaaaatagttgtccgctgagtagatagctgtaagatatctgatatctaggcagctgacaaatctaccctgatatctgcaagagcaaaggccatgggccatgtgggtgctcccgcacctgacaatattcccaatgctgggaggcaaccagctttgccatcagctgaatcagagacccaagcatagggggcgccgcgctgcacagaaagccctaaaacatcaaggcgtcttgctgatgctgttcttccctaacagagacagtgatgggggcaggaggtttgacatagccacactgctcctggaatgagtccaaacctaaaatcacttacaggaaaccagtgcccatgtggcccctgcacccaactcacagaaggcaccttggagcaagggatctcccctgctgggcatgtcaacaccccagagcatcctcaccgtccccccagggatgccgggtcatatggtaacatgcaacgccaatgtaaacaaggctgccctcggtgaaggatatgtaaataaacaaaaacagaaggagaacaggacctaccaataaaagctgcagagtaacgaaggaaattcagaaagacattcaagaagtagaggaataacatacctttgaagagtatttaccatagaatattgaagtaccttttatacaaaatgacttcggagctcacaatcatcaagaaaagcagagcctttgttgttttgtaaggaaataagactgagatggaagaagatcctgaagtattaaaagtaaggaatttaaaatggtttcagatgcaataacacagatttgaaaaatgcagaaaattgaatttatcatatgagaatgggagcttttgaagctttccctacagctaaatagaaaaggcgaagcaatggaaatgatcagtaagaggctgtaaccatgtgagatgcacattagatgttcaatattcagatgatggagctcctaatgaagacaccaggaaaatgcaaaagcagcagcattaaaaggcaaaaaaagaaacgaaaacattcccgggtttatatacatatacaaattcaaagtagatctttacatttccctgattccagagaaaaccgaaaacaccaccttttaggtatttctaaaaaacacagttgcatcaagggtaaagagtaattctataagcatttagttaaaagtaaaattttaaaaactaaaaactaagaaaaaaaatcagattgtcttcatttgcatccactgtacaaaattagatattaaaaaataatgataaatattcacagaaatatgatgaaggatgttctaactgaacaattatctaattgaacaattatttgccctcaggatttttctggtaattgtgagggcaacagaaagaaacaaatgtataccatatcttctgttgctgaaaagaacactgaagcttattatctgggacaccagaaggttaatcaaagtgcagtactcaagaataggaaaatcatgttaaatgagaaccagataagcactgaaaacatttacgtgtagaatacattcagatagagagtttcaaatacaggcaaaaccccacacattgaaaatagtaataaaaaattcagaatccaaacactataagtaatttaaaatttataaacttaaaaatgccaatagacttagggaacaaaagaaagttaaagtggactaaatttgtatcttcataagagatatcagtagatatggctttattttagtcaatgacaaccaaataaaaatatgtccaactatacttttctgataacttaaattttggtttctatgcttatagattagtgggaagaactgaggagagaggacagaaacagtttactgaataatctattgaatgcacagataaacaaaaatagaaaacaaaatatgacagaagaacaaatttatgagttatgatattatatataagtggcttagattattccattaaaagactaagattctcgagctggctcaaaagttaaaagaaaaaaaagttaagctataaattgtctccaggagaacttaaataagttgactgaggtattttaaaaattaatgaataaataaacaacaaaaagaataggcatagatattctatagagaaagaaaactggggtcacaactttaatacaaaaaaagtaaaattcaagataaaaataagtaactgaattaaaggtcttaattttaataaaagacacaattcacaatgcataaatagttgtagatattttatgcaagtatatacagcccccaaattaatgtaacaaaaatctcttaaaattacaagtagaaattgatagtaactaaaatttgcttaaatgttacatacctccttttccggtctctgacttatgaagtatagaaaagtaaataatgacatgaagatataaataactaatgctattataatctctatggagaatacactcacttaaagtgttcatgggaccttcccataaactaatcatatataaggctacaaggagacaataataataataaaatacagaaataatttaaatgatattccatgatcatatacacgagaatataatttcataaaaactatgaatttatattcatagttgaataagagaaacccaactacttaacagttcttgaatcaaaatcaaaataaacctttccattatactatatttacaagctgctaataatggcaatactactacacatcaaaacatatgtgaagcagccaaagatgcagtcaaaagcaaattcatagtcttcaatagtatcattattaaacgaaataaaattgatcaactaaacactcaaaatgagaaacccaaaacaaaatctaaatgaagagctctaaagaagcattaataaaaacaaaagtaggaaaataacaatgtaagacaacaaaattgagaattaaatcaaagaggtgttgcattaggaaaaatatatatatatataatatatactatatctataataacattgtaatataatatataatagtatatattatatatgtatataatacatgtatatatgtgtatataatatatatgtttatatatgtgatagattgttaaaaaatgaacaaatcatacatttatagtaatagattgttaaaaatgaacaaatcatgcatttatatagtctctcatacaaaaatttccataaaataaacaaaaaggaagggaaagaaaaagcttgtgtaattctagaaagcaagtaaaagttaaaatccaaagattggtatgaaattctaaaagacacacagtagcatagaggggctgtctggtaactgcgctctcaatttttctatagaatatcttatttttgtctgctttatcagtttctgagaaaaagaatgtgttgaagctgtccccaatacttttggaaaggtaaagttcttgtatttgaaacagttgactcatatgtgccatcaatatgttggacagtatacaagtatcttcaccattacatttggagaccatgaaggtatcttaagagcaagatacatttctgtctttatcaattcatggtatcattcccaacacagatatttgcgctggacgcagtgctgggtgcaggggaaacagaattcaacaggaagagccagatcgctatcctcatgaggctggcattggagtgagggggactgattaaatatcaagaaaaaaataaacacctgtcatataatttcataaaactgtaagtatgaaataaaacagggccaggcgcggtggttcacacccgtaatcccagcactttgggaggccaaagcaagcagatcacttgaggtccagagttcgagaccagcttggccaacatggtgaaagcctgtctctactaaaaacacaaagatcagctgggcgtggtggcatgcacctgtaatcccagctagtcaggaggctgaggtgggagaatggcttgaacccaggaggcagaggttgcagtgagctgagatcgcaccagtgcactccagcttggatgacagagcaagacctcgtctcaaaaacagaaaaaagaaaaagaaaacagggtgagaggataaaaagttatctagccaatcaaataagctgaagaccaacttgagacaggaagaggggagtgatatattcccaaacacactaatcctatttagcctttgtgagtcctgacccttcaccagctaaatacaaagcctggaaattaaagtggaaaccacacaccctctgtgagggattctcaacctcagcactgctgaagaccagccttggtcatgggggcgtcctgtgccttgctgaatgcctatcggtctccctgacccctgcctaggtgccagcagctgccacccccagcccagctgtcacaaccacaaatgtctccagaccttaccaagtgtccactccaagtagaggctcaggtaaaaaaaaaaaaaaaaaaaaacacacacacacacacacacacacacagtgcactcatttaactaggaattccagaaaaaaaaaaaaatgaatactttgtagtgttagtccccaatattccagagaacattattttttgtctaaaaatcacattttacaggacaccatgtactttatttgctacatctggcaacccaacttagggagaaaaccactccagttggagagctggtgcttcagctttacagttgaggagacagtacatacctagatggtacatcatagataatacgttgaaaaaccacatcacatgtcctaaccatgcagattagacagggaacgactgtatcagaactttccagagtgagtgtggaagacctactcagatgagaccatggacatcaggcgctattacaccagactctcaagatagaaagaaacgtcaagccaagctcagagtgatatattttttccttaaaaattgaccaagagttttttaatggtaatggactgagctgctgcaagtttcataacagcaatgctctcatatggaactcaagaagaatcatggtcggggtcaaatttctgggagatgatttgacaatgcctaaaagaggcttgaaatttcctgtctctctgccccattcattgtatatctaagaatccattgtgaggaaatacagaaatactctgaaaaatttataagaatgttgagtgcagtgccagccataaagctgaaaaatcagctacaaactatagatccaaagaaaggatatgtaactatttattagaatagacaaggaaatctatttcttggtagaaaataaactacaatttttgtcttatgagactgtaaaaaactctgttcagcatcctcttaactaccaccttctcctcagattctgaatttctttgcttcgcaccaaagaagtagaagcaaaaggttcccaaaggaaaacatctcagaatgttggattcaccggagtgtgcctccttcctcctgacgtcttggatttttaatatcctgtgtgcctccaaagctctctaatgcctttaatgcatgtttttttgttgtcgtattcttcagcttttctacttgttctcagtaggaggtttgacctagtggcctgaagcagatatcacataaattattattgactgaataaagaaagaggatgtttagcttataacacaaaaatgtatatcatatttcatagaatctcagatcctattaattttaaagtaaaccattattttatgtaccactaagaggctgagctatgacacaaaaattgtaatctcttagaatttttactttatactcattgaaaatttattttaaaagcatttacatatagaagtgcttaagacatgaacatttatgaccagccctagcaaatgaactgaatcccaagtaatttcaggacaaaagaaatgtgaaaagatcataaattttaagacatattctcatttcagagatagcacgtatgaaaagaaagtctcagaatcaatgaaatgtatacagtatacccacataaaggaaaaactgaagagaagtatagcaaccatgaataatagttgtatccacctggtgggatttggggtgttaattttcttcctaagtgttgtgttttcctttaaattttcccattatcgctaatggtcattattaatttttatttatttatttatttatttatttttgagacagagtctcactgtgtcacccaggctggagggcaatggtgcaatctcggctcactgcaacctccacctcccgtgttcaagtgattctcctgcctcagcctcccaagtagctgggattacaggtgcctgccaccacacctggctaattttttgtatttttagtagagacggggttttgccatgttggccaggctggtctcgaactcccgacctcaggtgatccacccacctcggcttcctaagctgctgggattacaggcatgagcaccgtgccccgccgattatttaattggaaaaacattatgcaaaatatctcttgcctatttattttatctattttattgcaaacacttaaggcatttcggagtgtctttcttaggatcacttttaaaacttgaatgtaagacaaactaggtccagaaagaggcgaacacttgaaagcccgcagccatgctcctctcccctcaggcttcgcaccttggtattcttcccttccgccgcctcctctcaatgtcagtgtgttcagccttagtgcgcacgctgcctctcccatacccacgcgcattccccggctgtgttcagcctcagtgcgcacgctgcctctcccctacccacgcgcattccccggctgtgtttagcctcggtgtgcacgctgcctctcccctacccacgcgcattccctgggtaaccatatccactctctaggcttcgatttgcatctccagactggaactcttcctcaacctccactaaaaaatccctcgtccttctcagcaccttccctcagagatctcacaagcatccaaaacttgaaatgtaacgcttcattggccccctaaatacacttgcattggtccccctaaaacctctcttctcaccgatgtcccagctcagaaaatgcaacttccgttgttccggtatcacatgccaaaaccttggcgccatgcatggctcctctctgcgtttcacatctgtgtacaatccacaacataagctcttggctctatgtgataaatatatctagaatctgaactcctctccgctcccagcagcgctatcaatcaggttccaggtggaaagcactcagcctgctcaaatgggcggttgtttaaacatgggattatataggccaggcacagtggctcacgcctgtaatcccagcactttgggaggccatggcgggtggatcacctgaggtcaggtgttcgagaccagcctgatcaacatggtgaaaccccatagctactaaaaatacaaaaaattagccgggcatggtggcgcaggcctgtaatcccagctacttaggaggctgaggcaggagaatcacttcaacccgggaagtggaggttggagtgagccgagatcgcgccattgcactccagccttggcaacaagagcgaaattccatctccaaaaaaaaaaaaaaaaaaggatgggattatataaaggatgtgggattattatatattcatattataaatatatattatatatttacattatatattatataaaggattataaaaaatccatgtgtataatgaatgaaaataggactataacaggtaaaagttgatagtgtcctttggatcaaagtcccagggttgtgctaaaagtgagagaagtcgagggcttcctgaatgttgagccccagagttggaaaccaccttgtggagcatctgggaaagtctccagtacatcctcaggttatttcttatttagtaaatacccttggcagggctctgtggcaggaacaaaaagctactccgcacaatatgttttcatctttattattttattatcattattgttattattatttttttgagatggagtctcactctgtcacccagagtggagtgcaatggcgtgatctcggctcactgcaacatctgcctcccaggttcaagcgattctcctgcctcagcctcccaagtagctgaaattacaggctcacacctccatgcctggctaattttttgtatttttagtagaaacggggtttcaccatgttagccaggatggtctcgatctcctgagctcgtgatctgcccgcctcagcctcccaaagtgctgggattaccggcgtgagccactgcaaccgatctttatctttcttcttaacaatagaactcaagttttaattaggggaagagctacatttccaagtctcccttgcaggtgggagtggccacctccatcactgcctggtggagcttgctgcgctcctgaaatgtctttgtgcagtgcagtggaacggggccacgcaccaccagtggttactgggcactgaaagtatggctggcgctaccaagaaactgacttttaaatttcaattaattcaagcttgaatttgaagagccacatatgaccagtggctaccatactggacgtctctagtcaatgggatgtgggcagcatggtgtctggaagatctgaaaagcgagtgggtgggatagctgtgggctgcgtcctctccttcgctttcttccttcctgctgtgtaggaagcagactggacagctgcagccagaaggaacgtctcagactttgaggagggaggcttatgttgagaaaagaagagtgataagacagaaaggggctgccaacccaagtgaccttagtgccatcatgggagcctggatgcttacgtgagagaaggaatttctactccgatttagccactgttacttagcagcctcgtcactcacagctgagcctaaccctgactttaagacagagtcctattttggggaactatgttcaagccacgagatcttcgtgtgtgaccttcacacaagtagcagcagcacctgggaacgcgctaggatgcacattctcaggcccctccccagacccactgattcagatgctctaggggcccaacctccaaaatatttgctttaacaatatcccaagagtctgatatgtgctcaagtgtgagaaacactattcaagccaatttctgtacagagtagtatgtaaacatggatacctgactgcacaaatatataaaaatccatttgcagaagaatgtttttgttgcttaaatgtaggtctctctgatctcagatttttggttttttgttgtttttttttttaataaaaattgcaagattacctcaagtagtgtatgcaaaggagctttgtgtgttttgggaaggaggagggaaaacaaatccaaggcaacttttttttcttaaaccataaccagccagacacagcagacaatctgatgagcagctttggtctcatcctcaccttgtgtgtcttgcttgagcttttacctacagatttcacagctgcactgatgaactcagctggtaactgtgggtgagaggcaggtgtgtgagtcccagccaccatctgtgagattgcaaagaaacaaacacagagacaaaaaccttctggtctccactgagttcagtgcttctccaacattggcctacatgtgactcatctacccagcaggcttgccgtggctgggccccacccccagagcttctgttcagcaggtttgggtggaactcaagaatttgcattctaacaagtgatgccgatgtggctggtccagggaccctgctttgagaatcaagtcctaatgcattcctaggtctagaaactcacctcgaaactgttgagagaacatagatggatttagtggcacctttgggaccccaggtaaggtgatagacaaagtccacgggaggaagcacctctgactgtggcatcctgcccttgcctacctccctccaaccacactgctcttcatcctcttcctcacgtgcactgaactcagtcctgcccccggggcctttgcactggctgtttcctgcacctggagtgcccatccccaggccccttgcagcttgagctctttcacctcatccagtctcaacacaaatggcccctccccagagcagcactccatgaccactgaagtaacccttcctccttctgccatatgccctggttagtttattcacatctgaaatggtattttctatttttttcttgagtaaaatctgcagacccccctttaacgggtcagtggaagcagagatttgaattgcctcattcaagactgtcattcgggctgcaggacaatgccagggcacagatggacactgggccagggtttgaacaacacaggtgggaaagtggggaggtgttggtcaaacagtacaagcttccagccatgcaggaggaaacagtcctggaccgctaatgtacagcatagagactgcagtagacagactaacatgtatcatatacttgccatctgctaaagtatcagatcataataatcagcttgattttggtaatatttcacagtgtatatgcatactaaaacatcacactgtacattgtaaatatatacaatttttattttattgaggctaattataactcaataaatccgggaaagaaattttagaaatgaatggataaaggaaaagtcattgaagaaaataactcagagttctgtctcacggtcggaagcccacaggcctgcccttgggaatgtcaccaatgcggaatctccctgaaagcccattgagacaaagtctagtgaggagggtgcagtttggacacagagcgctgactttatctcgtctccagcctaacaatgcgtaagccgctccccatcctcacccccatcaggcaatcagtatgcagggaaagaacttcattaagctgttttatattaaaactagtagagtgttacatctcataattttttaaaaatggtttatattaatgtttaatttgtttagggatttaacagcttaaagaaatccacaaaacaacttttttccttccccattttctaagggcaaagtcattttgagggatgcaatcaatatgccatagttcctgaacaaatgtaagagagacagagaaaggtaaggggaggaggaagaggagcatgagcaggaggagagagaagggacaaatcacacaacggaaatgataccaagcagctaccttccccaggccaagttcatgctgaggtccaaggccaactcaggatcaggaaaaaggtcagaggtgccttatcgtttcacgggtggttcagaggagagtttatttaccaggagagaatgaaggaaaaatctgtgcttcagtgaaaactgatgcacacctttctaagttttccagttctgattgtatgggagttaagactctgtagataaccgataccaattcaaagtgattcttgcctatagtcatgcaaatcatttctatctggtacagggataacccacctgtacagggtgggatcaacctgcacatgtgcaattcaacgttcctttactccacggaaatctgtgcctcttcgacttctcctttgaatatgttataacatctgtctgatgtcctcgattaatgagttaaataacaaagttcacatatgcttatttacatctatatgagattcatgattttacctttttgtgaatatcatcttttagcaaagaggaagaggagacgctggtggcatcttcaagtgtccaagcctaggctatgacgctaggagtctcactgagctctctcctgccaggcacggctgcacgtcactgaattacccactggggcccatcagggacctgcagttaaggccacacgcattgccacgcagagagggtcacgaggctagcgactgcaggaggctgtagacgatcaacctaaacaaaagtcctctgaaaaactggaccaataggcgtccaggtagaaagcggtagataaatctcactttttcacgtgcatcgtcctaaagtctcctaactccagagaaaggcagaatctgggggaatttcaggaactgcttttctattctgagtagcttcagacttgcagtctgaagtgtggtttgagtgcaattttaaagagatgaaacttggacagaaggaaaacaatgccgcctgggaaatggcccaatctcctgtatgcaagggagtccccgatgatggatcagatctgctcaggcacatgctctggctcagttccttggaaaggtcaatgaggttcccatcagcaaacagcctgtgaaaagggcttcagaagtcaagagaacacgtgggaacgcctgtgagggtcagggcaactctctctgaacaagtagttaaattagaacatgcgtctctttggaaaccacagctgacctacaaggtgcactgaatttagcccagaaattagaaacgccaaaatgaatcctaatataattgaccagatttcctaagagtggtgtggtaggtagaataagggtccctcaaagacatccacgtcctaatcccaggaacctgtgggtaagttatcctgtatggcaaaggggactttgcagatgggactaagtcaggaaaataaaacaagaggattatcctggattatctaggtgggctcattgtaatctgcaagggtgcttaagagtggaagagggaggtaggagtggagccgggacctacaaagctatgagataaaaaatgtgggttgggttaaaccactaagtttgtggtgatttgctacagaaccaatagaaaacgaatctagaagacaactataaacgaacagtggcacccatcttcatggtcataggaatttgtggggaaacacatttagcgtctgtaggtagaaatggtgcaggccaacgctgaggtggagttgtgccaggcctgtggctaacatgcaacccaccttcatgttgattagaaataagtgtccttgtatccaggccagtgcagtctcatggcgaccagcacagctccctgaccagaatgtagactggccctcagctccaccagcacaaagcgcacttgaggcatgcacaacctgaacaaccgtacacgacagccctgcaagggaagcacacccgtcttaatccaggaaggccatttctctgtgtacagatgaagaaatttaatctacattctaaaaagaagggtgtgttctgcttcttaagtgatgtgacatcgtcattctgtgctctctttcatatttgacacatggattcttcatgtgtctctttaaaagtctgcactgaagttacacagaaatgacattccaagtatttcataaatgttgctacttcatttgcctttttttgggtaaaaactggcagaaaatctaagcaatttaaaaattagaaatttatttaataaaattttaataaaattaataaaaatatttaacattaataatatatttaataaaatcatattttgataaaatatttaataaatatttccgtatgggaaacacagaatatgggaaacacagaatatgggaaacacagaatatgaggcccacagaaatgtgtccagtgtgattcaatgtctccctggaaaaataattttttaaattttaatattttattaaattaaaataataaaatagttaacatatttaataaaataaaatatttaataaaattgttggttttatcaaaatctaaaagacccagaggtgtcaaaacttaggatccaagaactctagcaatgccatctcttgtggccctcgcagggctgtcatgtacggttgttcaagttgtgaatgtctcaagtgcgctcgtgctggtggagctgaagtccagtctacattccggtcagtgagccgtgctggtcgccatgagactgcactggcctggatacaaggacaattatttctaatcaacacgaaggtgcgttgtgtgttagctgcagagatttccttcaaaatcaatggatttcttatgagggtagctcactcctgctagggcccctgagcagctccaggttgatcccctgcccctgccaaggacaagtccagtgaaaacgaagtcttctttcccttaaagagattcagatctgggggctgatgatcattagcccaaactgggtcctgtgtgcaatattaagccaattgcagtggtcagggagatggaacaggcaaagtggccaggctgggtcaccaaggctgggtcacatgcccacctgaccctggggatggactcagtctcacccatgtccctggaccactgcagggtccagggaggggaggggaagggggctccccagaggacatggaggaacgagctgacgcctaacaaaacattcacgtctggtgcccatgttaccatgaaagctttcttcccagttaaagtcaataaaacctttactggccagttgtccttattttattctttctgatgtagcttcacacgtttatattttggtctttttggaaattggtttacttatgaaggccttttatggagaaagtggggagaaaaaggaagaaagtgatatttactgggtttttgcaaatgtcagacactttgatttattatgttattcaatgctcaccatgatactgtggtgttttattatcctcattttataggttaaaaaaatgataacccagcagagccatttgccggctttccctcttactagctgtgtagcttgggcaaatcatttaaccatttttatcctcaatttcttcatttataatatggggataacaacagtagctgcctcacacagttgttggaagaattacacaagttattccatgtgatgctcaatacgttttagttagtatattattaatactaatattttcagaaatgatcatctatcttaataagaaagccacccatgggcggggtatggtggctcatgcctgtaatcccagcacattgggaagccaaggcagacagattgcttgatcccaggagtttgagaccagcctgggaaacatggcgagacctcctctctacaaaaaaaatgaaaaaaaaaaaaaaaagaaaaaaagctgggtgtagtggcgcattcctgtacctgtagtcccagctacttggggggctgagtgggagaatcacttgagcccaggaggtggaggctgcagtgagccgagatcgcacgactacactacagcctgggtgacagagtgagaccctgtctcaaaaaaacaaaacaaaacaaacctatccaaagctgcctgcatactccagaggtaacctaaaaaataaagaggtgaaaattgttacatccaattcagctcagtaatataaaaatacatttccttgaatggaaaaaaatattctggaatctaaatacaacagaactagaggcatactgtgcttgtacagcacaataagaaaatgatttatctgtcagtagctcctgtctataaagttctgaattcatatgagtgacagatgcagggaaaccctgtttatttttctagggagacactgaatcacacgggacacatttctggccttgagaaatggccaattgtttcccatatggaaaactcttctgtaagtgctgaattccataaacatcaggtagctgagacactttgaaaatgagtcagtaaattagttattcgaccagaaagtgcctatttcagggccttcagctccgcagtgaagcatttgctttagacagtaaccatcatcaccttaaacttttgattaaatgttatgcctctctgtgacaagtttatttcaccctgacagagaaaatatctggttctaagcttaggagagtctcttaaaaatagggcttttgtggctcacttgtttgtttactgacttcttcaaagctatttaacggctggaatttgccattcaaattttatgagtgatctgggtgccttattccgctttaaaataaaaatctcaagcgggccattaaagactcaagatcaagaatacagtaaacgttctgatagaaccaagtctcggagttgccctaagcgtggaagggattcatgtcagacacacaacacaccattatttagaaatgtggtttctaaataatcaataaaaccttgcacgcaggaatggtgtctttccctggtgtcaggctaattacaacaaagttctaaactcaaataaaatactggagtgacacagcaacattcctagtaactcacacggatggaccagaaaatgtgttattcttatacactctacctttcagtcattactcaagaaattcacggagaggcagaacattcccattctgactgattcctaaatattcaacatttgcactcactcacttaaggattctagaacctgcccagtattgcttggttggagcattttcttcagtaaatactggaaaaaatgaatataagtaatgccaacaatttgccaaagtcttaaaaagctgaaaaattcttctgattgaattactttcaaaggcagcctgttcatcattttgtgaatgttaagatacggaggttacctatgcttgctctgaaatgatgacagtgccgtggctgggccgtctagggagacgttggcacaatctggtttacagaaaggggctgcagatgtacctcctacattagacctccactccagacacacctccccagtcatcgtctccgaatttctgccagcaatgaacagagagaatctgcttaacaaagcactgtgatgctttctcacttctagatctgggattccacagagatgataatcaacgtatcaataatcaataatcattaatcacctataaatcaataatcaactcatctaacagagatgaactgagtggcctcccagcctgagggaaggcagtctgcccagctgaaggaggtagaaaggtattctacaccatgggcactgccctccaggagctgacagccaggtcatggcttcagaggtgaggaatcactgcaggggaagatggggccgcatctgcgtgtggagggaccacaggtgcagagaagtcccctgaggacatggcatttgagccggacattggcattcagttaggataggtattggggaggggtttttgagggtgataagtgagtaaaggggtagagttcagggacatggggccatgagggaaggtgggcacgtgtgttttcatcctacttgtaccgttacaaaggatagccactcgtgacttcaggaggctggcccggtgttccctctcatcaccaagtcatcagatccacgtccaggactgcctgtccaccaaggaatccaaccacaagagggtcctatctggatgtgctttgtgctgaattttatgggatgcaaaaaagggtgggatgccttaacggggtctttctcttggtgcccagaaatacccacattgtggtgatacaaacaagaacctaattatgctcctgcccagaacggggaagcttcaccaatgctagaaggtccttgaaactagctcccggggtcacctgggaggggccagtgggcagaggatgtgctgctggcgctctaggtgagcagcccgtcctcaccaagcccgtcctctccctgagccttcccgttgatctcctctgagaacctggggtccaggactgcctgctgggggcttcaatgacagatgaccataggggcatgggaggcagacaagcagaagctctgccccatgtggatcctgcatgtacggaccctctgaacagagtcctgggggtatcacccatgggcctaatcccagagaaccgaccccagcaaatccatcccattagagagcacatccggccagccagcttccaagcgggctctcccacccatcaccagccagttggccatacctcctatgcagaaggtataaagcctacttctcagatgtgggtcccgggaaacccaatcttcttaatttgtctataaccacaacttaattgcccatgtaaattttaatcctgcagcatggagtaaacttaatttcagtcactttgcagttccctgcctcactgctgtggccagctaaatggtgggtgtgttggaggtggagtgcccaagagcccatatgacagaaaacctacttaggtcccacgctgcttttcctgtcactaatcttatcaattttcccttctcccatatcaataagccattagtttcctaactcctcctttccaatgagaaactgtgggctcctgaagcgcaggctgctgcagacacacaatctgttgtcagaacctatccgggttgggccaagggagccactggctcgtggctgtgcctctggtacaagtcgaaatgccgactgcctgtcactcttcccctagctggtgccaccccaacctgggcctgctgcaagcccccgtcacatcggtgtgaaattcccacggctttcccaaatcgaaccccagcactggaattctaagatgggagaaggcgaagaacactgaacatcttcttggagattacagaaaggcctagtcctctgtctctggattgggattctggacaccaggacacagacctaagctgcttctcccagttgtgttaggtgtaactggcttctatccaggctccgtcggcctttctcaatgtcaaacctgctgggtccccaaggtgagcactgtggctctgtgaatcatggtcctgctggagaaccagagtgatgaccatattcctggttgttttcatcaatcctggctcctttttctttttttctttttttttttttttgagatggggtcttgctctgtcactcagcctggagtgcagtggtgtgatctcagttcactgcaacctctgcttctcagattcaagagattctcctgcctcagcctcccgagtatctgagactacaggcatatgacaccacatccagctaatttttttgtatttttagtagagatggggtttcaccatgttggctaggctggtcttgaactcctgacctcaagtgatccgcccacctcagcctcccaaagtgctgagattacaggtgtaagccactgtgcccggccgatcctggctatttccaatgaccctctgtgccaggtaagtgagatgaatttaagtggtctctggaaacggcttaacatggactgataggaaataaaaatcccttttcaattacttttccgtcactctgtttaagtctaggagaacgttacagtttcgtgctaatatgtttttaatgcttccccgacatttgctaatctttcatataacagaagatggagaagctcggcattttgtctagacaatagcagccagctctttagtacctctgcgttctgggactggttttcagtgaccatgttggtagctctgtctgtccatgcagtcgctctctctgcccctcctccgccctgctctgcacccaggaagccgtcctctattgatgcatcacccaggccctttgctctctggcttccagttgggtgtggccaatgagaggaaccagcaggctgtcacaggactagcggacaaagaggtcggatatttctctcccctcctgaggttttggccaccattgcagaccccagaaatctcagctgctgccaacagtccttcctccatggctctgtcctcactggggtctgtgatgcagctccctgaccttgtcccgacccttgctcacagggctaacagcccctcttgttgctggtctctggatacctcacagtccttcttatcttctttaatcctgtcaacatctcgtctctcaaagtagcccttttattgaagctgtggtcagttctgtccatgccaggagccagcacaatggagttaccatcccttgatgacaaaggtggacagagacacaaaatacaatgtggttttccttttccaagtgtgccaagctgcataacgcctgccctccactaccaagatgtccatattctaatgaattccagaaccggtgactatgtcacttaccccttaaatggaactttgcagatgtgattatgtcaagacgggggagattactctgtattatctgggtgggtccaataacatcaccagggactttataagaaggagacaggaaagtcagagtcagaggaggagatgccacgtttgagtagaaggcacatttgagatgactatgcccaagacagcgggggcttcatcagcctgggtccctgaatgtttctgtagagccgactatcattagatatgcaccttgagcaagcaacactgctcttcatttgctgtggtacaactatccttgatgacgaaggttggaagcccatcccatgagagagatttgaagacgaatgctacaggtactgaagatggaagaaagaaacaggagacatagaacatgggtggctttaaaggctggaagaaaagaaggaaacagattctcccctaaagatgctagaaagacacaatccatttgacacctgtactttatcccagggagagtggctttggacttttggcttgcagaactgtaaggtaatacatttgtgctatttttttgttttttgtttctgtttttgtttttgttttgagatggagtctcgctcttgtcgcccaggttggagtacagtggcgtgatctcggctcaccgcaacccccgcctccctggttcgagcgattctcctgcctcagcctcctgagtagctgggattgcaagcacccatcaccgtgcctggctaatttttgtacttttagtagagacggggttttgccatgttggccaggctgctctcgaactcctgacctcagatgatctgcctgccttggcctcctaaagtgctgggattacaggcatgagccaccgtgcctggccttgtgctgttttaagctactaagtttgtggcaatttcttacagcggcaataggaaattatacagctaggcacacgggaagatagcattgtgaagtctcccctccagctaggttggggatcatgtgcctcacttctaatcaatgagctattgatgaaactgatagaaactacttccaggcctggccccagagcccctgggctaccctctggttgtctcttccctactccagtaagcacagaatccacatttgagataagtgtgcccaagacagtggaggcttcatcagcctgggtccctgaatgtttctgtggaatcgaccatgattagatatgcatcattggcaagagacgtggcttttcatttactgtggtgtaaaggcacaagtatcgtttaataagctcattgcagttaaaaagtcaatttaaggaaacaaagtaaataatggtacaacgagtccatcattcactatgtatttctatatgcctacagatagtgtgctaataagcctgctatctggaaacaaaaaataaaaaataaaagctcgctaatttgtagcattttccaagttctgtagtataaataccatcactgtgacttgtttcagtcaatgctggtgatgccaccgaacttggatttggcaagaaaggcacaccattggctctcatgccatgataagctctccccagcctatctattaagtgctaggtgttgggaatacagcagtgagcaaactcaaccctcaccttcatgggacttacactgcagagaaggtgttacaaggcaaatagtttcacagtgtacgtatgtgtgccaatatatgtataaacacatgcacacataacaggcaatagtaagagtggtaaggacaagatttggggagataaagagaaatggagaaccactattttatttccaatggataaggcaggcatctgcacagaaaagttaacacagcagaccagagactgctttccttggaaaggctccttgcaaggttggcccttggctgacgtctgggaacctggctggtaagtggttttctatgttaataaaaaatttccctaaatgataagagtggttctcaatgtgcacaggctttttgcacaatattttctatgcagacgcaggtccagacatacacttgccttctcagagtctgggattttgatacttaccaggtagaggatatgcatgtcaccagtccctagtaaaaacttgggtgctgagcctctgatgagcttccctgatagacaacacttcataggtgctgtctcaactcattgctggaagaattaaaggcctcctgtgtggctccatgggaagagactcttgggagcttgggcctggtttcccatggatcccccatgcaccttttccccttgctgactgtgcttaaatcctttcactgtaataaatcacagccatgagtacggccccaggagtccttccaatgaatccccaaagctgagggtggacttgggaccctggacacagtgtccctgaggaggtaacatttgaaaagggacccagataaagctaggaggtggccatgtaaatactgcaggaggtgcatttggattgggggaacagcaagagcaaaggtcctgaggcaggaacagcctcagctcatgaaaggcatggtaaaaagagaatgtgtgtggagggaaaagaagaggggagatggggtcagagacatggtcatgggccagatcacaaagggtctgtggaccatggtgaagacgctgggctttaatctacatgtgattatagagccagagagtgaagggattgaatttatgacttgaaagattgtcttgctgctgtgtgcaggacggtagacagaggggtgagggtaaagtggggagcacagttaggaggcaactgcagtaatgaatccaagtgagtgctaccagtagcaagagttagcatggagtcctgggggtgataagtcaccaactgtagcaagttcacagaagcaggtctgagaagctctcttagctgatacacctgctaagaacaggagttctgttcccaactctggccctgaatagcagcttccctgtctatcaagtgagaggagtgagctatagcagggatactcaactgtggctgtgtgctggacagttataaagaaatactagtgcctccccacctcagtgtggatttatttgctatgggtgctatgggcatggtccaaacaccagaatttttaaaaattcccagatgattctaaagcatagttaggacagacacccatgaattagatgatctctaaagttccattgtagattttttattttgatgtatgattgtccctattttggtgacttgacaaatgtcttagtccattttctgctgctataatagaataccatacactgggaatctgtaagaatagaagtttatatggcttatggttccggaggttgggaagttcaagagcatggcactggcatcctgccaggatctctgtgctgtgtcataacatggtggaagggcaagagagcaccaaggtggagagaaaaatgagggctggatttcatccttctgtaaggagcccgttcccaagataactaacccactttcacgacaatggtaccaatccattcatgaaggcagagccctcatgatctaatcacctcttaaaggtcccacctcttaatgctgtcacaaaattcgacatgaattttgtagaaaatattcaaaccatagaaatgaccaaaattaacactaaaaagaaaggaagaaagggcatatatcccaggtcagagagagggcaagagggagagctggaaagaagagtgggtctctcctccctctctcatgagcttcctgatgactttcattgctaagatccagttacccagcatgagaaattttcttccgaggtgatttacagtcaaattaatgattcaaatgtggaatgtgaagtgtgggtggattaataggtatcactggaagaaaatgtgaaatagcaaccttaaaagccttacatatattttgaatgatgaaaaaaaaatgctaagcttactgagcaaaagcaaggaaaaaagagacccctattaacattgcagacagctaaccctgcatacgtttatacaatctccctaccctcccactaccatccttttcaatcaggaaattacgttcttttctgatcaccggctgtatccagcttttctctaccaggtccattatgctgtctctatttttgcatctctttgtattgcatgttaaaaaatatttttaaaaagagtgagaagctagaaggatggagaccccattgacggtactgggttgggggagcaggagggtccctcaagaatgtcccacatcaatccatcatgaaacagaatatagacactgaatataaagaatgcaataggataataaatcaggggtgaaatccatcagcacagaaagttccttaaaaccaggacagaaataaaataaactgtattttatttaatgccttatcaatgacagaaattcacatctatttttcttgtttccaaattcatttgccaacacattttgcttctgagtgagaacagcatattttcactccttaatctgagtaattataattaatggggtgtccactcagttttgcctggaaattctttcttctagaacaatcagccactttctcttttgagaactcaaccacacagcacaactcagtaaggaactggggaatatgaacaaaaaagcagcctgcagggcgtgagtctcatttagaatttccaagggctgagcagtaatggctcttttaattttgggagtaaattccgtttccccaggttcaggctctggccatgtggaaggaaaaatatttcatttcaaatccttctttgtcttaccttctaatgattaaaccccagggtttccttcacctggtaaaggggcttctgtagttgcgaagagggagaaacgcagccctggttcttggccatcccaagaggaaacagacattgcccaaactcagtgcttcggaagaaaccaaggtagattgtggcagcccctcatgtcttcatgtactcctttttcacaatgtcctcattgcccacagcagatattaccagctgaaggcccctgagctcaatctggctccaaagcttgttttatctgactttgcggggtgttatttaaatttataattcgtttttaatgccagtatttataaaacaaaagattttatgtaaaaatcttgacttaagctttcatttaaaacatttcaagatttgttaaatctgtcaatccatttccatattgcaaaaatcaacagaatagcaccctttagggcatgaactcactaatttgccacagtctctacccagcccttatgcctcatttgtattacctgttttccaccacagacattttatttttaaaacatctctggaccatagagtcactggcaaaaacacttagctcaatataatacagttctattcccttgtatatgcttaataactcagtccagggtttctcaaccttgacgctactgacatttttgaccagataattatttgttgtgacagtactgttctatgcattgcagaaaacttagcatcatctttggcctctagtcaatacatgttagtagcaccccagtcatgacaatcaaaatgtctccagacgttgcccccagaaagcaaaatcactcccagatgaaaaaaccctggtctagtcatactggaatacctttttttctttcttgccaaagattgcattttttttccagctctgagtctgcgacatctgcctgaaaaactcctagtcatacttcaaaacccacctccagaattccttcctctgtaatgcttatctttctactggcataaagtgtttgtttctttgatcatgagtagagctatgactttgagttgtgttacagtttacaaggaagttggttagggtgtacactgaatgttgtatatgatcaaaattgccattcaaattattttaagtagttttaatcgccagaacctgatgctttggaagccaaaacattaatgtaaggtcctctgagctggccgcaccatggtcaagctatcatgacattcccctgcccttgtgataatgtactttgtgatattccctgcccttgtgaatgtactttgtaacgtccatcccctgcccgcaaaaaattgctcctaactccacggcctatcccaaacccttaagaaccaatgataagcccaccacactttgctgactcctttctcagactcagcccacttgcacccaagtgaataaacagccttgttgctcacactaagcctgttcagctggtctcttatacggacgtgagtaacaattaagaaatgtcatatttttccctcctagtctctcagttatgtccttcatttctctgaggagccgaaagtctaatctggacaaagagggtggcaatgaattgttcacagtttgtcttttttgtatactttattttaatgctgttattaatttgtatgctgtacctccaggagatcttcaatttatattataaatatactctgccattgtaattatgcatttacaaatccccactccaggggtatgctccctgagggtggatgctgtttcaattggttaagagctttatataaaccttctatcactcagaccatggtagaaggtttatataatgctttgtaaggtctgaatcacaacttggcttcctgctcattcactcattcatttattcactctgcacacactgattgcatatcttggttaataatgagcgtcaacttgattgaactgaaggatgcaaagtatcgttcctgggtgtgtccgtgagggtgttgccaaaagagattaacatttgagtcagtggactgggaaaagcagacccaccctcattctcggtgggcaccatctaatcagctgccagcacggctgggataaaaacaggcagaggaacctggaaagactagactggctgagtctcctggcctccatctttctcccgtgctggatgcttcctgccctcaaacatcagactccaagttcttcagcttttgggctctcggaccttcaaccacagactgaaggctgtgctgttggtttccctacttttgaggttttgggactcggactggcttccttgctcctcatctagcagatagcctacgtgggacctcactttgtgattgtgggagtcaatactccttaataaaatccgctttatatatacatctatcctattggttctgtccctctagagaaccctgattaatacaccaggggtgtgctctctgagggcagatgctatttcaattggtttagagctttaccattcagtccacggtagaaggtttatataatgctttgtacggtctgaatcacactgtggcttcctgcccattcactcattcattcgttcactcagcacacactgactgaatatcttatgtgccagactcagcaatgacccaaacacacgattactgccctctcgaaacatactgtcttatagaggcagacttaaaaaaaaatgcatagtatctcaggtatctcaaagtgctgtaaaaagagaaaaagcaggtaatgtagataagagggtatgggggacagggggaagaggatgctattttctccaatgtcgctagcagtggccattcagaggacatggcatttgaggagagaccaaaataagggaggaagtaaccaagggcatatccagggaggacactgaagacctgccaggtgtgtatgaataacagcaaggagatccgggtggcaagaagagtagaggggaatgcaacacgttactgaaggtgcagtgggccgatataaggaaattgaatgttttcagacttgaagccactggaaatttttttttttttgagacggagtctcgctctgtcgcccgggctacagtgcagtggcactatcttggctcactgcaagctccgcctcccgggttcacactattctcctgcctcagcctactaagtagctgggactacaggcgcccgccaccacgcccggctaattttttgtatttttagtagagacagggtttcaccgtgtgagccaggatggtctcgatctcctgaccttgtgaaccacctgcttcggcctcccaaagtgctgggattacaggcgtgagccaccgtgcccggccagaaattttttttagtataggaattcatgatggttttaaaacagccccatgggttttcagatgctaccatcgagtgtaggccggccttagtggcttgcttctaattcgtagactcctgtagaaatgatgctgaccaactcccaaggctgtcaaaatggcacctgctgtctgggaacccagccaccaccaacccagccacttgcccttcctcagatcgcatggggaagccacatgtgacaatgctggtggtattataaagaatatatctgttctttttccctgttcctggaacaaagctactaaaaacctttgggattttctgggtgataggagtgtctttgttatgctaatgaggtggctcagggtggccccaggagagctttaggatggggctggtcaccagaatgactgaaatagtttaaacatttgtccccacccaaacctcacgttgaattggcatccccagtgctggaggtatgacctggtgagaggtgtttgaatcagaggggccgatgcctcagagcttggtgctgtcttcacaagagtaaagttaaatggccagatctggtcatgtaaaattgtgtggcacctccctccaccttgctgtcttactcctgctttctccacgtgagatgcctgctccctcccacttccccttccacaaggtgtaaatgctccctgaggcctccccagaagcaaatgctggtgttatgctttctgtacagcctgcagaaccatgagccaattaaacctctttcttataaattatctagcttcaggtatttctttatagcaatgtgagaaaggcctaacacaaagatcaagaccttgattacagcatgggaatctggggccaggcccacacccagggaggggatgggggctgggctggagactgagtttaatcacatggccaatgacataatcaatcaggcctctgtaatgaaacctcaataaaatctctggacaccaaggctccaggaagtgtcccatctgggaaacacatggctgtgctgggtatcatggatcccatggggacagagacagaggctctgtgtcacccacccctctgacctcacactcttggtttgatgggtcctgatctgtgtcctttaccataacattttgatcatagggacagcatttcctgagttgtgtgcctagtgaatttctcgtctagtttcatcctactgaattatcaaacctgaaggggtgtgggaaggcccagattgtagccagctgagtgggagtatgggggccttgggcacacctgaatctgtggctgccatctgagactggggaggtcttgtgaaaagatttgcccttagcctgtagggtcagtgctaactcttggtagttagtgtcagaagtaaattgcattgtaggtcacccagctggtgacagagaatagttttcagagcctgatcgccccagataagatcctgatctatggccaaaatcaaccaccagtcacgcgggtgaatgagacttcagataattccagcctctactctcccagcaatgccaccccatactgaagagagcagagaaaagctgcccccatcacactctgccaagattacagattcatgagtctaatagattttgttactgttttcagccaccatgttggggaatggttgtttatgtagcattagataactagaccagagtgatgggatctgacatgttgaaaacaatcgctctggttactaaatggagatgaggtgggggtgggggaagaaaagtgaagaaggaagacaggtcgggaggctgtcatgataattccagtgagacaggacgctgccctggaccggcacagtcgctgggcaggtgatgaggaagggccgtaacctgggtctgtttcaaaggcagagccaacaggatctgctgatggatcagatgtgccgcatgaggcatgctccccacggatgcagacaagctggtctttgtgagatttagcttgaattccatcttctggatgtatcttccttccgttgcaaggtacaacggaagaactagaagatgaagaaatggagcactgactccttcgttcccacagctgcaatccagtatcagagaagatgtcctttaaacaggctgctactgagaacctcgtttgctcaagactgaaaaaggacaatcttggccagcaaggggagagctgtacccattcctctggaggaataaacaacctgatacttaattgcctgaattagctgtcttgcccatgccaatcattctgtcctggtatttgacctaaggaaagtataagatgtcatgaacaaagagaacgtacttacagaggccaccatgatgtccaaaagaaccttttccctattgtttttggtgttccagctcctcaaagtgactttctgctcctttaaccaaaatcctactctacttttaagaatcaggtcaaatgccatctcctcagtgaagtactttttttctgaccatccctgtttttctctaaacttctatagcaattattctttgttcagtacattgtggaattagccagagttccatgtgtattccttctattactatagaactatgtttagattactcattgcttcgagtaacgcaatactttatcaaatccataagcccataaattcaaccaaaagcaagtttgcccaactgaggtcttatattagttggacacattgattataatcaaaatacttatgtatattaacaaaaatggaaagtttgtttaattaatttaaaaaattaataaattaattccagtttatatgattgcttcaggaaacaaaagcaaagggttaaactctaaagtattggagaaggtggtttctttaatcacagagaagtagcctcctactgaaagcatccctaaattaaatttctgaatttaaacaaatatcctatttctcagtggtaacagcatgaaaagatcagaagacaagtaacaaaggaactggaactataaaaggcaagtaacctgataatcatagaaacaaaaaggatcaagattcaatgttacttcccatagtccattagatgcagaaataaataggaattgcccattttacagtacgacgacaaaaagaattaaaagttaaaggccagaaagatttgaaagttaaatatttaaactattacaattaaaaaaatacacaaaattcagagcaactgtttggacacctcttaattacagagcaatgagaaactggttaatgaaattgtgttacattccgtatcgcagtcttgatcacattttgcatgattgcttacttaatgatctgggaacagaacactgaaagggcaataacttcacctgtcctgctcaacatttattccctatcacaccacctggcatttaaaaggtggtatcctacacaccacctggcatttaaaaggctcccatccaatatataattgttgaataaagtacagtacttatgtatattagggagctgttcaaattatacattagcataaaacatgtaatggtgtgggaatattttcaatacacatatatgtacaaatgatactatattttagaaacaaaaatacaggaccctatatacttacgaaaataaacatgtatgaaagaacaaattattaacaaaatagaaaacagtaatttaggccaaagatctaaatagacataacagcctaaataaaactctttaaaaataacgtagagtgcaaaaaggtaaaaagccatagaaaaaaagagcaaatgctgtaagccatcacttgtataaacttcaaaaactggcaaaactaatggatggtcagaataacagtaatctttgaaaacaaggggtggttactagaattgggtgaggggagggtatcaaggatattctatctcttgaccatgaatatgtgactttgcaaccatttatccatgccattgtccttatagacctataaagatcatcttcctgaggcacaaagcaaggtggagatggctgaagcacgaatgaggggcagcaacaggatgctgaccacccccagtccagcacacctgcccacctccactgtctcctgtcctaggccacggaacctgggccatggatgtcacacactttgcttccccctccctctccctgcactgagaatgtacatcctcatctcgcccatctccagatatccactctacaatggtgttttcctttcatttccattgtttcctttttttaggtaatagacaatctcaaaaacaaattgtatttattgctgtttctctaaagaggaacatgccctacaaaagtctccttctttatagatttctcatttataacagtgtgatacttcttttttatggtacatagaactattttctcttgatgttggtttcacataaacagaagtaaatatgactttactggctatagaaatacagctcgtggagagaaatgtattttgtatctgaaatattgctcttaccaagtatttttataagcaccttacacataaaataaaatgtcaaataattcagaaacaaatatactatgttccagggattgcaaggaaattaacatgaaaagggacctggtaattcaggagtcactcactgttcagggagacagaaggtcggcagctgaacgtggagctacaaggcttcttgaggaattactactttaaagaaaaacaatgatgttttatagtattgaaaaaaaaactttctaatttgccacatataaattttaagagaaaaatgttctaggagagacaaaaatgctcttgttcattgcctcccataaaaatgaatttgtacttcttaagagagaaagacaatcttaggcctaaatattcagaggaacattattatatctgtgatgcgtgcattaagtcaacctatgatggtgcctttttttttttttttttttctgagacagagttttcctctgtcacccagagctggagtgcaatggtgcagtcttggctcactgcaacctctgccacccgggctcaagcgattctcctgcctcagcctcccaagtagctgggattacaggcatgtgccaccaacgccagcctatttttgtattttttgtagagacaaggtttcaccatgttgaccaggctgttcctcaacttctgacctcatgatccgcctgcctcagcatcccaaagtgctgggattacaggcatgagccaccgcacccagccatgatgtggtttcttaacctagcactactggcatcttagactggagaattctttgttgtggagagctgtcctgatgttgtaggatgtttagcagcattcctgacctctactcacaaatgccaccagcccaccttcaggtgtgataaccaaaaatgtctccaggcattgccaagtaacaatctcagttgacaaccattgacctacaagaagtattgtttggccctcccaatgcttaatcaggtggtgttttaatgtttcctaattagttgacaagatcgaacacttgaaatatttcacactgaaaccttaatttcttctctctcttgggttatcaaaagataaggaatctccaggcttgcattccactgctgtataaattggctagacacaaatcctagccccacctagaaagggcatgcatcctctcatttcctaccgtccacaccattccctattgtctcaccacaactgtgtccactgccactcaccactcagctgatgttgtccttttcattttgcacctgcctgattcactcatgtacagaccatctctggcccctataaaatttgaatttgcagcatcactctaaaagcaaaggacctagaaatgtctgctataaacaaaatatagacgttttagcaaataaaatacaaagagcagtaatgggaattatctaaagttaacattcaaaatactcattatggtctcacagaggcccaggatagctgcccaggatctgatttcttgggtgaaaatgagcaccatgctttcactgatggttcaactctttggtttgtatccattgtggcaatgccacaaagactcacctgcaaccaatacaattataattaaaaatctgttgccatctgataatttataaggatcattcatcatgcaacaaagtccacagcagttctgtagccactaatgcaccatattgattggccattactgaacaagctaaggagattaaatgactcctccattcgtttttcaaaatcttattttaaatgtctcagctataatattctaccaaataccagggtgaaaaaaatcaatgagattagaaatcttcctgctacacttaaggggccatgttattccttgctgcataatgaatggaatgaaaataatcactagctgcctccacagtgcacaccttcctccaaatacatagagtggactctgttgcaggagggaaaaaaaggagacagagaagaaggacgaaagaaacggagaagaaaaagggaggagagagaaaagggaggaagaaaaaagaaaaggaaaaaaggaagaaaggaagaggggggaaggaaaacaaaagaggctggttgtgtgaatgcaacaacatacagcaagtctttgatgtgtagcctgagtaaagactgcagagatgcagaaaaggagaaaaccccaacacgctgtagcaagacatgaaaacattcatgtggcaagacacactgtaaaacttcactctcttttgggggaggaaattggaaatctatagatctcttcttggagatagagccagctgtcctgaatgattcagtcagacccattttctttcaaaccaagtctcagcgatttagggccttttataacaaaaggcggcccaggacagaagcaaatactccttgagcacggtagcaccagagatgttaattaccaaaggagaagggtcaatgccatcttaatagtagaacctgctttcattctgcgagataactttatctgtagaagacaaacaatacgtgtcttctacacgtacattatacccagaagtataatgatccagaaggagtataatgatccagaaggagtgaggtggtgccataactggtagggagatttacttggaacagaaactctcacagtcttaccccaaatcatggggccagagactgttccattcctcttaagaagacgacaaaagctccatcagcatctgctccagcccaagggcagtgtttttgagctggaaaaaggaacaggactggcctctgccctagcccagctcactcttaggcggtatagtgaggaggtgggtgggttatggatatcggctcccgggtcccagtcctgcatcctgccctgctctgctttcaattcttgtgcagcctttcagaacaagaatcgcttcaacacacatccaacttcacgctcagggaaacaggtgtgggtggagtccaggtggggaaaattcccaccgcctgatgaactgatgagcctctagccaaggcaaggcgaggggatggagggagctgtggccaaaaagacagaggagacgtcaactcttgcctgtggatcaccaggcaagacaagaacagatggatgcacgctggcctacctcagcttctcttctgtctctctctaacaaaacagaagaagaataaccctcttctggggacacaaatgggatttcctggactgctgggtcacacctataatggtatctaatcaaaattcctttatggcaaggtatagtgagttgctgctttagaaagctgcacttggtaaatgcatcccaatgaatgagatggatattctgtgcattcacgttcattcctcagaggcctggtccccatggactgcaccaactgggcttcctcatcctctggcttctggctgagttcaggcagtgggaggcgctggcaggaaatatgaggtcttctacagatgaagtcatctagcaaaatgcaagcaggttctactattaagatggcattgacccttctccattggtaattaacatctctggcactactgtgctcgaggagtacctacttttctcctgggccttctttcattctaaagaaccctaaaaataatgagcctttgtcttaatgatcatatctccttgttagttgctgttgtggccgaaaccatgttcttcagtgtatggctgcagctcccatggactggcccctctcctaatgtggcctctctcttctggcctcagtatcccattctctttcccacctttttcagtcaaatggtagtgactattgaccactcctgctaccctggggtcaggttccttaacactgaccatatcgttgtaatcagccccatcatcaaaatctcttcaatcaccccttggaagatgttgtccatttctttctaggattttgactcaaacaaaagtgcagaataattttgtgactttcatggttcaagacttgaagatagtcaggtctctatatcttaagaaacctgtctaaaattcattcaacaaacattcatgcttttagtagttattatggcccaggtactgttgctgggccctataatgcacctgttgcattatccatttaaatggataatgcaaggtatttgcctgaaggtggtcattgtctatgctgcaaatattattcttctctcatgatacacatccatgtctatctgactagctgtggaaattttaatcattcaggtgtaagtatctttaatattcttgcacaaactagttctactgattgaaacctaatcattgatgactgaagaaaatattccaaggctttcaaggatgccacatacccaacattacaaagcacagattaaaacatgaatagaacagtacattattttctggtttgtgctatacattcttttggtacctattgaaaaaaaaatcacttcaaaaccaatccagttccttaaaaattagtagggtaattctatgataagatgatatagagctcacactgataaagtaagttgatggtgcaagaatgtatttatactttccggccactttctgttatctcaaggatttcctgtacacactattcaggtgacctcaggcctttgaatttaattatgacattaaagatgtaattttagcattttagggccctgaattatgtccaacagaaggctttatggagagctttggggaaattatgatttgtgtcatttcagccaaaatgccatctcctgaggaatttctacattgactttgatgtcaagtgttccccatgtggcatggcacaaattcttgaaattctgacagatgttacttcatagcccatgaacaaatacatacagggcaaatgtagcaggataccatttttgaaacatcaagagatctcttctcttaatggccataagcctttggcaccttcagcctcaattttccagtgggaaataactttccttgacttctctcttagttttctcatctgtcaactatgggtattaacagagactgcttcctaggattgtttcattggacgtgttaatctatgaaaattagtgcctgacacattgtttattagtcttcaatatgtagaagctattattatagaacaataaagaaaaatgcattccttaaccacctgctactcatgagaaaaagaggagtagcaggaaaataacagggtcttgagagactctgaaagaatcaatagtatactgaagaatatgaataagtcagtgctcaaccacagcaactgtgaagaatgttctctccctggatggcaagaagataaaagggaagaagtgacctcactgcaaactcatacgttctgcaagatggcatccctacaatcagaccactgtggcaattaggactgggatttttgaaaaggtcactgaattggaaattgggaaataagactttaagtcctatctgtgcgactttaaatgagtgatgctagtcttgggggcttaagtagcttatttacaaaatgaggacagtcttcaaggtgccattttagctttgaatgtctgcgatgttgatacaccaactagggagtcttgaagtttcatccttaagagaaaatggcaaataatcactgctgacctgagagactttttagggaaagctgaatctaggtccatgattggggtcataacttattcccaaactaacaacatctacatctttagcataccacaaggtatgcaaaataatggccccaagtaagagaatgttaagtgatttgttggtgtgctctcctcacaaaggtttagtgtactgtgtcagagacttcagaatggcttccaatgaaacgagttttaaggttcaaatactaaacagttctaacattagccatctgtgttagtccattttgcactgccataaaggaatagctgagactgagtaatttataaagaaaagaggtttatttggcacacagttctgccagctgtgcaagtatggtaccagcatctgctcagcttctggtgaggcctcaggaagctcttcctcatggtggaaggtgaagagggagccaacatgtcacatggtgagagagggagcaagagagagaagaagaggtcccagactctttttgacagtcagatctcatggtaactcattaacaagccaagccattcatgagggatccacctccatgatctaaacgtctcccatcagatcccacctcccacattggaggtcacatttcaacatgagattaaagtacacacattcaaaccatatcaccatctgaaaaaagtaggtaacacagaaaacattttccttctgggtccttaaacaattaagttttgctccaggagtagctgcagaaaatttgatactcacaacacaaacactgtgtaccatgagtctacgtccctggtgtgcctgtgagctttacccctcagaactccttaaaacaaattgctgtctgcatgcacctgagatagacccagtgtcttccagctctgtggctctgttgattggctccatccctgtgattaaaactgatgaaagtccaggtctttgaagcactggaatgcaagaatttcatcaatttcaattgccttctggcttctagaataagaacccactgggaagccagaccaagtaatctgacctggtaaaattgagaaaatgaacacattgcttttgtctaaattgactgaagatccactgggggaatcacactgtgtaagggtctcagggaaagtttttagaaagcacatcccaatccacagggaagaatctgccctcatggcctgggccttccatcccaacctcctctgccctcctgggttcagaaatctgctctctacatcttccaaagtcgtcccatgtccacacagcctctgtagtactggaaaattcccaacttgttcctaatgattgtggcaaatggaataatacttccctgatatatttggccgtgtctccatccacttttcatcttgaattgcagttcccatactccccacgtgctgtgggagggacccaatgggagataatttaatcatagtggcagttacccccatgctgctgttcgcacgatagtaagtgagttcacaggagatctgatggttttataaggggcttttcccccttttactcagcacttctccttcccgccaccatgtgaagaagaacgtgtttgcttccccttctgccatggttgtaagtttcctgaggcctccccagccatgctgaactgagtcaattaaacctctttcctttataaatttgccagtttcaggtaggtctttattagcagcatgagaatggactaatgcatccccctacaaccaaaaaaatatgctcgtgccctaatccttgaaacctgtgaacatgttagcttacatggtgagagggactctgcaggtatgattaagttagggatcttgagatgagagattatcctgaattatcagggtaggctcaaatcaccgaggcccctacaggagggagacaacatgatgaaagaggggacatcataatgatgaaggcagagcttggaacaggagcagcctctagaagctgaaaacagcagggaaacagattttccccttgagcttccagaagacacacagctctgcctatacttccactttagctcagtgagatgtcagagacaaaaaagcgtgtgctgtttcaagtcactcaatttgtggcattttgttacagcagcagtagggaacctatacagctatctacagtgttgcctccctgctcaggatggggactgggtgtggattctgtctgagatgcccactaactgtgtggataagtgacctcaatttccacacctgtaaaatagggtgacagcagctcctgtctcatgcattattttaatggctattatccttaaaacagtatgcagctcatttcaagaattacataaatgttagctattactgtgatatttaatatcaatgttcaactgcttactattgcaaatgttacaatgttgagatcgctccaaggatgtactttcctcaactctgtaccaaaggtattattgttatagtttccactccagaatctcatgtgccccaaagattcctgtttagttattaaaagtgggtgtgggaaggagatttcatattgccccagctggagcagacagtctgaaatggagcctttgacaaacatatgcctgtaggtaattataaaaagtagtgctgcatacagatagtatatattttgcagccctgccaatatcacagtgtcatcaagctctccaggcttctagcagatacagggctgggactagggtgagactgagctgcttaggcctctaaatttaaggagcgcactctcaggcacacaccctggactgagtaaacttgagagtgagcacttccctaaattttgtgtccaggtacctcactagattaatacaccctaatctaggtcctgagcaaacgcaaatgagtagaaaaggcctcaactggagattcataaagtctgctaggggaaagcatgcaatgacacaaaggcaaggaaattattaatatataatcctactgatatggttgggctctgtgtccccacccaaatctcatcttgaattacaatccccataatccccacatgtcaagggagagaccaggtgggaggtgattggatcatggggcggtttcccccatgctgttctcgtgatagtgagtgaattctcatgagatctgatggttttattgagtgtttgactgttcctcctacacacatgctctctcgctgtcctgctaccatgtaagacatgcctgctttcacttctgccatgatggtaagtttcctgaggcctgcccagctgtgtggaactgtgagtcaattaaatctctttcctttaaaaattacccagtcttggatacttctttatatctatttgaaaaagaactaatacccctatataacatcccttcaaaaccaattcttagagactggctggaagtgctgggcaggcaatgttctacttcatagtatttgctcatttttagaatatttgcttgtggcagtgactcttccaaagtcaacacccgcaaatgcggatgtggtcattgttataaaaccccaagtccatagatcagagatctggggggttgatgcctaccaggtcatctggttatatccaccttctcatgaccaggcctccagactgccctttcacaacagccatcccccaaatgtcctctaacctgtgagtgcacggattcaacccccctctatctcttactaatctctccctccttcacttctttcatttcaagatggaactcataacggtataacccatttcacagggccattaacactaaacagttaccatctgggtctgatgcttaggactgtctagagtcagttacttgtatcaccataaagaatatcacctgttgtgttcctgcctggaggtaactctggaacagagcaccaggtacatttaacatgatatttgctaaatacacaaaacaaaaagcaaataaataaatggaggaaccaacttgcaaagagtaaaaatgatgtaaactattcgcctgcgtagagtgaaggtctctgattctgtgtggatcccataaaccagtcttccccacatgcaaacagagccaccccagcccttcggaaggagaatcctggagaaactctttggtgactcaggcacaggtctggggaggtctcttagaaggctgacattcatccagggacctggaccatgagagagatccagaaggaggaatgagctttcccaaacaacattgacgaatgaatgatcaaaagccaatgaatccactttgcaggtagagaagcaacacttacaaaagccttggtgaaacaaaaggtttgaacgatgcaatgagagagagccagtgcaaagggagcacagtaagagaattggcagagggtcaaggtgggcagttccagggtgtacaagacctgacaggtaaagagtctgtgtctcatctttactgcaatgaaaagttatccagggatgttaaactaaagagtgatgtggtttcatttgcatttgagatgactcttcctgctgtgagaggaacggcttgtaaggtagaattgggaggaccaattaggaggctgatgagaaagaagacagcatcctggaccagggtcatgaaattaggagacgggaggatatcatcagatttaaaatacattaaaggtgagctcaggacttgaaaagcattgtcaggcgtgggggtggccagtgggttggaatgctttgtagcactgaacaaagcttgttctatttttctctctctcagcaaagaaatgctattttttatacacataagccatatttggtgagagcaaagggatttcatcatttatgtaaacctttatcgaggacctcccaagactcaggtttttggtgataagggtaaaaccttttataccctacagaagcgacagtgtcacggaagagacactcctaaggaaggttttctctgcactcctgccgtctcccctcctgcatctacctttcccagcctccccgactcagcagacagcaactctatccgtgcaacttgctcagcgacggtcattctctcttctctttgtctcaggctcctcgtccaatttatcacccaatcctatcggctccacattcaccacgtctgcccacctgccctgctacaacttctctggccccgtctctcatctgggtgccttgctcctgcccattcatccgacagtcccttctctgcacagcagccagagtgaatcgttaagaggtcaatcagttcgtggagcccagggcgctccagttccttgagagtaaaagccaaggtcctcataaccgcccacaaggccctgagcccatccggttcccgtcgcttgtccaatagctctccttctccctcctccctctccttcttactcctccttccagccaccctgtcctcttcacagtgacccgggcggggcagctgccagcccagcttggacctttccatccgcctcaagttgacttttctttgatgtccacatagctcattctaaagtctccttcaggacattgcccaattggtagtttctcacttttacacatttgaaagctccacacacacactcagacacacacacattctcacacacacagacacacacactctcagtcaccctctcacacacattcagacacacacactctcagataccctctcacacacactcagacacacacacactctcacacattcagacacacacactctcagacaccctctcacacactttcagacacacacacacacgcgctcacatgcacacttgacatacagacacacacaacacagacacacacagtcagatacatacaccagacacagacacacacattcagacacacacagacatgcactcagacacactcaacacacactcagacatacacacagacacacacacacttgacacacacacatccagacacacacacactcaacacattcacacactcgacacagacacatttgatacacacacttgacacacactcgacacacattcagacacacacagacacacacacacacgacacacacacacattcagacacacacacagctgaactcatctccctgctttgttcttctttctagcactcatcaccgcggacaggcgacgcgtatttgcttatttatttgggcactgtctgttccccctcattaggatgccgtgtccatgcaggcaagaccctgttttctgtgcatttgcaacagggcttggtgcatggtacctgcttgataagtatgagcattgctcagatgcatggatgactctttagacagtggtaagcactgcaatggaggtttgcagaacaaccttggcatagaagcaacaatggccatctctgcctgctggaattagagaatgatacaaaaaggcatttgagtctgaagaatgaattaggattttccaggtgcattgcagaaagaaagattctgggggaggaaaagagggagtcaaaagcatgaagataccgactggctttgatcgactgtcctagcaatttggacggagaatgagactgaggagggaggtttttcattgtggtggtaaaccaaatgggctttgaggacacaccagacagggaggatgtgagagagggagcacttcatgtttttgagcttgtctgggcacatgtgatgttcttaaatattaacagggagaaagggtccaaggaagagaagcagggctcatagaaaaatacaagttcatcttgagtttaaagtatctgggcactatttcaacgaggaggttcaatatatagctggaaagaaagttctggaacgaagaggaatgggtggatcccgatggaggaaaaacaaagtaagaagagaagaaaaactagggctcccagagcaacaaaaacccacacgtgctaagccagtgggctgcagatatgtgtgatttgacaagcatcttctccttcagggttgctcaaaattttggatgtgaataggtgtttatccaagaaagtaagaaataaaagtgagtccttcaccacagagggtttgagaaacaaggctcatgttcactgtactcctcaccaaaccccttactttttgtacctgcacctccaaacactgaggacatctgcctggaccattcgttcatttgtgttcaggacctctgagctaaagaaacaactgatgagaagaggctaattaaggagacagatgaggagtgatcacacaggagagatcagcagagaagaagggtggcaaagggatgctgctgcgctccatccacagttcttaagttgctatgattggtttgtaactggtatcatggttattgattgtatttctaagaatgttcacacttagatcgatgctaattgactctgcatacatgcacactgacacactgcatcagagtcaaagtccagctataaatgtagcctcagatagaacgtggcagagccagagctcatagcacagctctagagcctcctcgctgaactacgattgcctctctgtagctgtggaggccacacacacacgtgcacagaggcaaccttcagagaagtaaaactttcatgaactgtcattaatcagaggtgtctcttcaggtgaggcaacagcttaatttttagcatgttttgtttacaaatgaagtgaaaagaatctttttttttttttttttgagtctcactctgtcacccaggctcaagtgcagtggcacgatctcagctcactgcaacctccacctcccacgttcaagcaattctcctgcctcagcctcccaagtagctgggaatagaggtatgagccaccatgccccactaatttttttttgtgtgtacttttagtagagatggtatttcaccacgttggtcaggctgatctcaaactcctgacctcaaatgatctgcccgcctcggcctcccaaagtgctgggattacaggcatgagccaccgcgcctagcctagaatctctctcttaatgggtgaaacttccttcaagaaagacacagagtatgtagacctggctcacggtacttgtacattcttgagaattgtccatgtaccattctgtcatctgccaagaaagtcagttagtgcatcttttccagtctacatgccttttaatccttttcccttcctgtggcagtggttagcaaagccagtgaatgttgaagggagtgggagaagatgcatcccatccccattccctctcctggatagaaagcattcagtccgtctctactgacgatgatgcctgtggcttgtcagaggatgccctttatttttttatttatttattttgagatggagtctcgctttgtcacccagcctggagtgcagtggtgcgatctcggctccctgcatgctccacctcccaggttcacgtcattctcctgcctcagcctcccagatagctgggattacaggcacccgccaccacgcctggctaatttttgtatttttagtagagactgggtttcactgtgttagccaggatggtctcgatctcctgacctcatgatctggcctgcctcggcctcccaaagtgctgggattacaggcgtgagctaccgcgcccagccagatgccctttattatatggagaaagttattttctaatcctagtgttctgagaattttcatcataaatggtgttggttctgcatctacttatggtttgacctctctattccattaatatggtgaaagactatgatggaccaacattgcagaattacagtatttccaaataacaggcctattcgtaagtggtaaagaatggaactcagaggccacaaggtcctgtgtcatggttatggaattgtcttactggttgacttttaaaagccaagagtttcactccctaccagagggtgggaggggaggagcagggaaagctgggaaggggttggtcagcgggtacaaaggtatagtactagaggaggcatcagttctgctgtgctgcgccatagtagggtgactagcactcacaataatgtatattttgaagtagctagaagagaggtttttggatgtttgcctcaccaaaaaaaaaataaatgtttaagccaatgaaaatgatcatcacacaatgtatacatgtatcaaaacatcatgttgtaccccataaatatgtacaattactatgtgtcaatcatactttaacaaaaaagccaaaagtatcacatttaaaatctttgatttctggtttctgaaaattcagaaggtttggcagtgttgggcccacatttcctcattgtggacataattcctgctgccctctggagatgagagtgttcctgtattaatccattttcacaatgctataaagacataactgagacctggtaatttacagagaaaagaggtttaattggctcacagttcctcaggctctacaggaatcatgactgggggagcctcaggaaacttacaatcatggtgggaggcaaaggaggagtaagctagtcttaaccatggcagagcaggagagagcgagcgagtgggcacatgacgcactttgaaaccatcagttgtctgtgagaactcactcgctattaagagaacagcaaggggtaaatccaccctgtgatctaatcacctcccaccatgtccctcccctgacatggggggattacaatttgtgatgagatttgggtggggacacacagccaaaccatcagtccccacagcatttcctgtgtcgcccccaccagccagcctccagctccctgcatccaccagagtcccagaaagcactgactcaggaccctgcccttaagttgtttgttaaaacataaagataactttggaaggcatttgctttggggctccccagccaaggtgacagatgttttcattatcactctgtgataaactgcaaagaagtgcatttttttggtgcattaaacatggattgtccaacaaagccatgtctgcataacaaactaggatttgcaacttcgctacaaacaccaggatgactttgtctcctgttaaagtggaatcctaggagagtttaaaggcatttctaaatagcgcttttggaaataaagctgatattagtacaatctcactccttgtccctgcactatcctcccttaatactttctcttccttgagatcttaattaaaactaatctcatcagggactctaattcatacaacattaatcttgtataatgtgtcatcaaacttcaactgttatttgcttaacaaaatcccaattctttaaaatgataatgagagaaatatcaatttgccaacacaccatcccctcatactactgggaagattttttatggatcataaccccagccattcagacagggagataaatctatataacttcaatatttaataaagaaataccaaaaaggtgtgaaaatgttgctatattttaagtgcaatgtttacaatttcacacacacatgcgcacacacacacacccccctcaatgcatgtatagcattatcggaatataactgaaaacatacaaatgtaaaaaactccaagagtgtgagacttaagtcaaatgtctctttgtgaatactattcctctctttaactcagattaaaggccctgattttgtcaacatctctatgcaggaatttctaaagaaagccagcaaattaaatgttcatgcctcaaaacagtgtagaataagtcataagacctttatgtccacatgagctctgtcaaagcatccttccatgagatttggaaatttgaaacctgtcttatatttcatccagagggttttacctgataatctatgcttcgattaggactgtctagccgcatgcaagagcagcagtgctggccaaagctatgccatttagggaggaagtttcacctatgctatggacaatgggccctgaaacaaaactaaacttgcgggaaaggacagggccctgtgcagctttggggatccaggtgtaagaaccaggaaggatcatctccaagatgtcacagttgtgatacataagcttttgtcatggctggtggttacatgtcattccactggggactggctcagatgggaccacttactacttggcgaggaggaaggaggtatcctaattgacatttccaccaaaacttcatccaaaggaggaagggtggtccccccaaagcaactttggtgagaagctattagaagaaaagggagtggatgttggacaggcaaaagacacagatgtcctctgccctgtgcatacggattttagtacagtttcatgcccttgttatatgtgactttcaagaccaaaagtcatggctaacaggacaagtaaagtgaaacattatctctcacaaagctgcagatggatgtttaaacttaggcttctctgtaaacccgggtttactagaaccacgtctgttggtgcagctatcctgggatttagggatgtgctcagcatttatatcagaacctcctggagtgaaggcctcatgggcgatattcttcatcattgtccaaaaagtgtacaaagggttgcaatattgaaaaattcacaaatgcaatgcaatgtggagaggctttaaagccaacggctcttgcattattcagatctaaaagaaatcagaaagtatctttttcttgaaacttaatctaattgattaaagcaagaattgttttgtacgagtcttcctaacgttctccaaatcacaaaaagattccaggaaaaacgctgcagccccaatcctggactttcacaaatcagtgagcacacttattcaaacaatttaaaataatttaaaatgcttttcttatcccctaaaaataagggtagactgacaacttaattgaaaaaagacatacacactcatacacaatcacacgatattcagcaagtactggaaatgaaacacttaaaatccgtcaatctcaacaaaaggaaattaaaatggtacattttttgcgtgtttcctattatgcaagacacatttgccacctgatgactctacaggacaggaatctctatgcatgcagggcaccctgctaaccgtgctgggaaaatattttcaagtattacttcatttttccccctataattctttctcatctttgtcataacctttcgcttcattccttttcctgatgtcttcccctattattcctccactagagcctgataacctccagccgtcaaattcccctttatgttctagcataggtgtgaagaataaacagcaactttggcttttgagttttaaacaccaaggtccatccagccctatgcaatagatttcagagaatacaggcattatcccaagtcttagagattaattctctggtttgaagaagaagaagagatatgaagaaaagagcgggaaaagtaggtgctggcaacagcttctgagaaggattcttcaccccgcctgaccttaaagctccctccaaggcaagttggacagagaagaaacagaatccctatcagatatccaggtccaaagcagaaagaatatatgccataaattcatatgcagaatcttaggcatcaaaagtgatcagagttcccccagtccagcatagcaagacaatcagagagttgacatgtctggatgctaagtctggaactttgagaagctaaggcaacaacactcagaatctcatgaccccaaggaagaacaggagagctgttaccaaaagagttcatgctctgaaagaatccaggttgtgactgatagaatgaggtctggaccacacagccagggaccagacaagaagatggggttcttggatgatgtcaacatggaaaggttagtcatggctgagatcaggcgggacacagtagagggcagaggagaagacaccttcccttgacctgaaatttagactcatttacagagaaaaagggatggccataaaattctaaagattaagtttaaaaccaaagtgctttttacttaaggagcctgaaaaatcacattcattacattaaggcagttaaaagaaagaccaaagagacagcgattttgcctttgataccacacagtctagacaaagactcagagactaaaatagaaaaacatttcaacttacacttacatagggactggaggcatcttgtgttatctttagaaagtcaagcagaaatgggtttggaaaaggccaccacgtttgtcaccactaccacacggtgacatctaggcattttcctatagcaataatataaaaaaattttccaaaacttggaatcaaagcagttggtaactcctgtcctttcaatgttattgtttcttaggctcccccaaggattatttcattatctaggagaaaggcacctgtgtttgactttgctatttgccactggattggagttcacacacagtgaagccacatgctaacttgtaactatggctttttgcccaaatggacattaactagtgttgcagctaatttagcaagatcagtatcatattccttttccaaattgcttataagtatctacctctccaaaggttttttgagccagtcttaccatctctctggttctctcattaatgaataaggtgcataaaatctttaacacatactgatattctatttttacgaaaagtgtgctattacactttcgagtagtatgctttgacactacaagggggataggttgctggattagtgcattatatggacagcagctggaatggctgcccttagactatcagaggtgatctgggtcctgggagtgggagccccctgtgacccgatcgctcatcagggtctggtggtttcagaggcaaacaaagcaaattggtgccaccaaaactcatagctggtctctaggcactagttatctttttatgccccttttgtctattattaggtgaagaaagaaagtagactgtttctctagcaccctgtcattagtttattaatttgaatctggaaagatagggaagagaatgggctagactttagagagcatactctgtttcagagaaggtaaagcagatgaggaaatctctctccacctccacccattcctgtcccaagcaccggtaaaacctacctttcaccaatgccccatctatcgtcttagagtcaaactttctcacattctggtcatgcccaccctatctccaacacacgtggggaaaattccccagtgtagttgagctcacatagaacccaaaaatgtccataatacacaaatctgaataaaatcaagaacaagtgccctgtttgtcctgtgacaggcctatttcaccaggataatgaggtggacaaatgctgtatgattcttttcataggaggtctctaagctggtcagactcagggaggcgaagagtagaatagtgggagccaggggatagaggtagtggaaatgagacactgctgttcaacaagtttaacgtttcagctatgcaaaatgtgtaggttccgggggtcttctgctggaagacattgtgcctagagttcataataccatactgtacacttaagaatttattaagtgggttaaatgtccttaccataataaagaagagaaaaacaaactctgaatcaggcatatccacaccatggaatattatttaactttaaaaaggaaggaaattttgacacacactataacatgaatgacccttggggacactacgctaagtgaaacaagccagtcacgaaggacaaatattgtatgattccacttataagagatctttaatcaaatttatgcagacagaaagtagcatggcagctgtcaagggctggggaagtcgtaaacagggagtttatgtttaaggggtgcagagctgcagcttcggaggatgcaagagttctggagatggataagggtgatggctgcacaacgtatgtgaacatgccaaatgccactgaactgtacacttagaattagttaaggtggtaaattatgtgggatgtatattttaccagaattaaaattacaattttaaaaagaaaagcgaaccaattctctaaagaagaattctattgagtttcagaataattgaaacctagcttgttcaccacctgcctggctatgcagcacaactgtccatgccgctccagcattccgctttctgcaacccttgcttgcttgccttcaggctgtggaaggttgcgccctgatgttcccttttctggtggatgtcagagtctctctccctccccaggtttgtctccctccctcttcctgttagccttcccatgccacctttccaaccaatgctattccttaatagatgctaggtcctgtcatggcagatacttgggggttacaaacaaacagaaagggaacatcatcttttgcaataattatgaaaaggaatacaggctgaagttggggtcacaggaaaaataagaagaatgctctccaatttggttattcatcttttataactataaagcatgtcttaaagttttcatatcaaaaaacagctttaaatgctgccccagtttaccagctcgcagaccctgtcattattttagaaattactaatgcttgtgggatgatggaattctgctattaaagaataacccattatgagatgtctttttttcccctccttaatctcatgtatttgcagaggggtcattgcttaaaggttgccaattttgtttttctgactgcgtatctgtggtttcaaataccatctatatgccaattactcaaaaattcctatcctcagccaaacttctgccatcgagctccagacccttgcatctcactgcctacacaccagctccatttgggcgtcttgataacttcccaaacttcacgtgcccaaagccagccccatgatctttccactcccacctacttcttctccagtattttcttagaaaagggtggaaatctggacaaatcctcatgacttcctccagagctgccaccctacagcagccacctccaaaagggtttcctgaggtccttccttaaaactactcgatacagccagagcaatgttttgtgtgtttaatgcaaatataatcatgtctccacttggctggaaagccttcaacaggatcccacagcttaggaaaaaatccaaaatgtgtccacccagaaccttgctgacctgcccctcagctctaccctctctatgtctgccatactggctttatttttgttttattttattttatttttttgagacaaagtttcactctgttgcccaggctggagtgcaatggcatggtctcggctcactgcaacctccgcctcctgggttcaagtgattcttctgcctcagcctcccaagtagatgggattacaggtgcctgccaccatgcttggctaattattttgtatttttagtagagacagggtttcaccatgttggccaggctggtctcgaactcccgacctcaggtgatcctcctgcctcggcttcccaaagtgctgggattacaggtgtgagccaccacgcctggcccacttttattttattttttttaagtgacaccactcttcctcctgcctcaaaacttttgcctatgttattccctctgcctggcatgaagatatttcttcctcttcaactcgaataattcctacttattctttatgattccacttaagtgtaagttactcagggaaatgctctcttatccggattatagcagatttcatgctgtaagctctcacaattcctccttaataaaattaaaattaattattaatgtgaacccttctagcatgttgtctgttgttttcaacacaagaataaacaatccatgagaagtcacacctgttttattctcctattcccaagagtattccaaagtgcctggtaatatatgctcctagtatacacttcttgtataagaaagtgaatgaatgtatctaacacatatcataggtagtgccaattcctttaataacagatatgaaatttggcagcttctgtacttgtttaaaatacttccaacctaaatattttctaaagggctccagaattaggagtattaaaatttcagtaccttggaaaattctgctcatagttattgtttttggaaaacatattttggaagctcagagaaatactgtataatgtcctagcctcaaatctattgaggtgatctagtaattttatagaggtacaaactgaatcaattgaaaggcaataaatcctttgtggtgtgtgtttaatttctttctttctttctttttttttttttttagatggagtttcactcttgtctcccaggctggagtgcagtggcgcaatctcagctcactgcaacctctgcctcccaggttcaagtgattctcctacttcagtctccccagtagctgggattacaggtgtgcatcatcatgcctggctaatttttgtatttttagtagagacagggtttcaccatgttggccaggctggtctcaaactcctgacctcaggtgatccacctacctcagcctcccaaagtgctgggattataggcgtgagccaccacgccgggtcacgtgtttaaaatttcttagccaccaagctctgttactacattgtgactaccaatttggacaaaattaagaaaaacaatgtgttagggtttggccttcagtcatttttacatgctgttgataagagcgtaaattaggacaacttttatgagagaaatcggctctaagatccaaaggccctttgaactagcagttgagaacggaaggaagccttactcccgtggcactacaatgctaacgctagatcaggcacttagtcaccatgggaagataggcaggttcgttcactgctcaagcttcagtttgcttctctgtaaaagagagtttattccaacgccttgctcattacatgagagagtaggtaaaagtcccagtgccagtgccagacatattccatcattcaatatattttagcaattatttgtatccattctacatctaggaatctatcctaaatagatcctaaaggaaaaatcagagatagacaaatgttgatgtatacagctgtgttaccaacatattattaacaataaacactagaagcaaagtcattttcctaaaccatgaaactataggttttctagagcagtgggagaatacaagataagccatgaaaatcagattctcaagacatttaaatatttggtggtgctgtgggccgtggatgccttcttatttgccttttttttttgagacagggtcttgctctgttgcccagactggagtacagtggtgcaatcatagctcactgcagcctctaattcctggattcaagcaatcctctgcctcagcctcctaagaagttggggcgacaggtgtttgccatcacacctggctaattttttaaattttattgtagagatggagtctcgctatgctttccaggctggcctcgaactcctgggctcaagcaatccttctgccttggcctcccaaagtgctgagattacaggcatgagccactgtgcccagcccatctcctctttttgaacacacgggaagtctgcctttcccagtatcccctgaaacctgaatgatgttatatgacttaagtcttagtgcaacagacagaaatgatgtaagccactttcttttttttttttttttttttttttttgagatggagtctcgctcttttgcccaggctagagtgcagtggcgcgatctcggctcactgcaagctccgcctcccgggttcacgccactctccttcctcagcctcctgagtagctgggactacaggcccccgcctccactacaggcgcccgcctccacgcccggctgatttttgtatttttagcagagatggggtatcctgttagccaggatagtctcgatctcctgagttccggatccgcctgcctcaagcctcctgaagtactgggattacaggcatgagtcactgcgcccggactttttttttttttctttttttaagttctgggatacatgtgcagaatgtgcaggtttgctacataggtatacatgtgccatggtggtgtgctgcacccatcaacccctcctctaggttttaagccctgcatgcattaggaatttgtcctaatgctctccatcccctttctctgcaacccccaacaggccccgtgtgtgatgttcccctccgtgtgtccgtgtgttctcattgttcaactcccacttatgggtcagaacatgtggtgtttggttttctgttcctgtgttagtttgctgagaatgatggtttccagcttcatccatgtccctgcaaaggacacaactgtttctttataagttctacacatactgatttagtgttagtggggaaaagaaaaaaaaaacaggcggggttttcattcagcagcagacaatggatgcgggaggaactggagagatcagaaatgtggtaaacgctggtttggttgcctcccataaaggacctcgttccagtgtcatcctcctcatccccagagtcacttggatctgtaagccttgactgttggttcaatgtctcggtcaccatcaccagcccccatcttagaccccaggatggactctagggctggaccaccatgatgaaagacggtgggcacggttcctgcacacttctggaggcgggtgcagcaccacgatggatctgacctcccacctggctgcccccaaagggccactaagcgcctggaactgcagagaagtcactgcccacagagctatgaactagtgatactcgggagtcaggaaggagttggcagaacgagccattcccatcctcccaggcctctgagggcctctcaagacacaagcacgtgaacaaggcactgctgtgttttctggcgaaggtcaggcaacttcgcagacaacgcttcccactcacttccctgttccctgtcactcttctgctctctctcggttctccgcggttggccacagctcccctcccttccacaataaagtataacatgtaagtattcccacgcggtctgctttcacaggggatttgggctacgataactcccaacaagccctccaataagcctctatccccttttaacttccaacttctgttggaagctacaacaggttcctaggaagctgcctccacaaatccctaccccagaaatgagcctgcaagatctcagccaagtcaccagattgtttaattctcctgaccagcagcaactggcacgcaagtaagcacatggccaaaatgggtcctaggagagtgaatgtcaggatgttatattcaaatactggattaaagtgctcacaacacctcgggcctggaatcagcactgcaatttttctgtcatgagaaactccagcctgcagataaagatgagacatgaagaagaagactaggacaattagaaaagggaacctggggctccaactgcacacttaagcccctggatcaatctgttcctgatgccaaaagagctctaaatgttgcaattatgtgtgtccatttttttctactgtctaaaccgatttgagctgcctattctgttatttgcaaacacaacatcctagctgagggaagggatggatatgtgattgactaaagtatttcaaaactaatttcctagtcccaatgggaacatgagctgccactctctgcttggttaagatgggcagattgaattttttaaaaaaaatcaactgatacttttccaaaaagatttgtttttttaaatcccagaacaagacactattaccgcagcgagcccatccgtgtgcagaccatcattcccatgatgtttcaaatccctgttctgtgtaggtgttttgctctgtcttcttttcacccttctgaagtctcaggcaggtagactcattttaagggcagcattagtgttctgccttcataagcacggaggggaaacagacagtgctaatggctggagatgtgtcatcaaagctgcaaacccttgggctttctgtcacgcataacttctcctgacatggaacctggcccggttcactggagccaggcagtctgtttctagagcctttaaacatatattgtacaaatcaaagggtttatccttgtttggggagatgaactgaaagcaactgttatcactataacagttctatgcacggaggagctgaaaaagctgtctaatatgttttgtaccacccgtgcaaactcgctagggtgggtggaaagcagctattgaactctgcagttgttgttcttcctacaccctgcttgaaatgtacaaaaagaaacatgctatgcagatggaatcaacagcccactagctcagcgctccacggcaccttttctaatatttgcatgtaaaaggagaaatacgcctcctagttcttaaatcagagagtgtaaactggccatctttagctttttgttgttgttgtttttccctgagacagggtctcactctgtggtccaggctggagtgcagtgatgcaatctcagctcattgcagccttgacctcctgggctcagctgatcctcccatctcggtctcccgaatagctgggactacagatgcgtgtcattatgcctggctaatatttgtatttcttgtagagatggggtttcctcatgtttcccaggctggtctcaaactcctgggctcaagctatcttcctgcctcggtcttccaaagtgctggggttacgggcatgtgccaccatgcccgaccaagaactcaacttttaaaacttgagaaatttccagtgaggatctagatttctggctttttttttttttctgaaatagtaaaatatcagcagctttaggtttggcacttggaacgccaataattgactgatactgagctataaggcctacctgtccgcataccagcttgcttcactccatgggtaactggtcccagaggttatgtgagttgatggcactttctttgaaagcatgttctgttagtatttttttgctactgtttctgggttttgagacgtttgactgcccagaaaagttttcccaatgactttataactacagactcagtccaatggggttcaatgatgagttgctttacagtcaccatggacccccaaggctgcaggtcctgtaaactgagtgtgcccagatgaagcaagtgtgcccaattcatgacctcagagctggcatgaatgaaaaagtcagccgcaggtggaacgtaagtgctcaggtaaaggaacaggaaccaaattaagaatcgagaggtgccctgtttcattgcagtaggaactttagaaccaaggatacgcagagcctcttggcatgatttaatcagatcacacctcgttgcattttcctacctttctcatggttaccctctgcctagagaacctgcccccatgccccagctttgagtattgcctcatatctccttgccagttaacctttcagtaaagcctttgcttttctcaaaagcttgcaccataatggcgtcatcaggtagcaagcccatcacttggtaacaacattgctgcttttagaaacacaaagctgtggtaatgtcatcatattaatttttctttctcttgcctcataagaagtgtgtgacatatataattacaatttgtgttgataccccttcagcataggaaaggaagaaggaaaaagtgaaaatataggacgtcttcctagacttccacccaaaactcaaatgacaatattatagtagggttaagaaaggtggaaagcaaaattacttcagcacaacaggaaaataattgtaaaagagcttcaaaaattacaggcttttctttctggtaaccttttcattggacacaaaaaggttatagagattttagtaacaaccagtttctgagaaatcaatatcacattccttgttaaaaaaaaatgctattacgtgtgtgtgcacgtgcatgtgtatttgtatgtgtgtttgtatgtgtgtgtgtgtgtgtttatgtgattagaaaactctgttcattgcctcctaataaccaaccctgcctgggcacagtaggttatacctgtattcccagcactttaggaggtcgaggtaggaggatttcttgagcccaggagttcaagaccagcctgggaaacaaagtgagctcctatctctacaaacaaattaaaaaattagctggtgtggtgatacaagcatatagtcccagctactcaggaggttgaggtaggaggatcgcttgagcctgggaggttgaggctgcagtgagctgtgatcacaccatcacactccagcctgggggccacagcaagaccctgtctcaaaaagaaaaagaaaacaccccacttatgtcctgaagaaaaatgccctatttgttcaggcagtgaggaaatacagtctttgtcaggcagcagctagccctccaggagccctagaatcaaatcattgctctaatccaatcatgaggattgcatccctcttggcctgtgattatctaaaggtgggctgtaggaaaatatttgtgcttcagtggaaaagtgtggattgtctagactctagagggcatccttcagttatctgattctgtggaggcaattctacaactctgaaagttgtaggtaatttatagcaatgcaaataatttgtctacagaaattcaaattctgggtcaggtgcggtggctcatgcctgtaatcccagaactttgagaggccaagggaggcagatcacctgaggttgagagtttgagaccagcctgaccaacatggagaaaccccatctctactaaaaacacaaaatttgccaggcatggtggtgcatgcctgtaatcccagctactcaggaggctgaggcaggagaatcgcttgaatccaggaggtggaggttgcagtgagctgatattgcgccatcgcattccagcctgggcaacaagagtgaaattgcatctcccaaaaaaaaaaaaaagacccagaaaaaaaaaagaaattcaaattctgttctgtccacaagagattaaaccaaattccctcttcccatctccttttgtggatacccttgtgtgcttcctttttacatgtgtttcaatatcacccatctatacttgtacctgttctttggattctcttttgtcctggttataacatctgtttggtatcctcatgagttaaataaactttaaaccatgttcattttgatatccacaggagagtcatgattttgcccttctttgaagatcttcttttaacatggccgatgagctgtgaagcggcacgtgctaggaagggctctgcagtaggctgttctgctcaccagtgtctgctttctgttccttctgggaacatggtagaactgcacttcctgatttccttgtggatgggtggcgcccttggacttgttctggacaatgaggcggaggcagaagtgccctgtgtgattctgggtggaaagttaaacatttctgcacaatgctgccttcttctattccttcctacacattgtccaggaaagttgaaatggggtggctgcttcctggacccctactgactgccaggaccagaagctccctgctgacccatgatggacatgaagcatgagccaaaattaagccttacttgtttttagctactactacttagagattagccctgacttatactcactagaatccattccctccccacaataaaatggtaaagccttttcaggagaattctatgtgcgtgtaacttttcactcctgtgttctttgaaattttgaaatgtgttaaaatacacataccataacatttactatcttcctcatttcttgcatagtctaatagtgttaagtactgaaggaaatcagaatctatcaccccaaaatatgcctctctgacacaaatatttttgagctgaaagcacttaaagaagcagaagttataaaaagggctatttgagctgccctttcttacctatagcaagccacaaaaattcctgagggagagctatcttccctgtatcaacacagggagataatgcttgtctccagtggctgggaattgggtctgcaatgggtctgtataaatatactgagtaacccttatcctttatgagctcttataccccctctatgcacctcctagtgactctcctgaaggtcactatccctagcccaggcccctctgtgttgcctttgtgaggtaggaggcaggcaggactccagactgaataaaacctgaaagaggtgcaggaagcccagctccataagagacgcccaccagtaccatgacagtttagtattgccatggcaacacccggaagttaccacccattttccagctaatacagattagcttgccctctaactagcatatcattgaaagtgggtataaatatgactgcacagccgcccctgggctgttgctctctgtacactgcccgtggagtagccctgctctgcagaagcagtcacagagctgttacccagctgccgcctcaatgaggctgtttaatcctaccaccttgaattactttccaggagaagccaagaagctgccctgtatcaattgctccagaaaatgtattgttctttttctgaaaagcataaaagctttctgctttggctgtttctttgggccttcactctcttgtgagggttcccatgtacctgtacatctataattaataaaacatgcatgcttttctccagttaatctgtctcgtgttaatttggctcctagacccagctgaagatcccagttaagaactaagatgggtagaggtgatccacagctttccctacagtatattcatattgctgtgtaaccatcaccatcacccacccccagaactcttttcatcttcggaaactgaaactgtcctcagtaaaaaacaaatcctattccccatgtcccctcagcccctgacaaccatcactctacttccatctccatgcatttgatctctccaggagtctcaaatggctgagatcatacagcatttgtcttgtcatgaatggcttttctcacttagcataatgccctccatgatcatccatgttgtagcatgtgtcagagtttttgtttttaaggctaaattatattccactatgtggacatgccacactttatccattcatccatcaatggatacttgagttgctcccacctcttggctattgtgagtgtagtagtctgttttcacgctgctgataaagacataaagatttaccaagacttggtaattcacaaggaaaaagaggtttaatgaactcacacttccacgtggctggggaggcctcacagtcatggcagaaggcaaggaggagcaaaggcacatctcacatggcagcagacaagtgaacagaacttgtgcagaaaaacttccctttataaaagcatcagatcttgtaagacttattcactatcatgagaacagcatgggaaagacccatcaccatgattcagttacctcctacctggtccctcccatgacatgtcagaattgtgggagctatagttcatgaagagatttctttgggaacacagccaaaccatatcagtgagtaatactgctataaaataaaggtgcacaaatttctctttgagattctgttttaaattcttttgtatatatagctagaagtagaattgctagatcatatattgattctacttttaattttttaaggaaatgccatattgtttccatagcagctgtaaattttacattcccatcaacattatgcaaggtttctgctgtcatcacatgttctcttttcttgacagtggccatcgtaatgggtgtaaggtgacagttatctcattgtggtgaggagaatgtggtttttaattttttaaggacggttccttaaaaatttaaggaaccatccttaaaaaattaaaagtagaattaatatatgatttaggagttctacttctaggtatatgtacaaaagaattgaaaacagaatcacctcttcctctttcttctgcctggaacggggctgagttatacatcatcagttcaagacctcccaatgacaggatgagaaggaaattaacatgaaagatggtagaggcgaaacagggacagtgctggggagcctgatggccctgtcagcagctctgccgatgctggcaacagcctccctccagacttcttgttaagttagaaaaatgcactgctgtttactcaagccacaaataaattgggctttctgctatttttagccaaaagcattcttacatacatcaggtgatacagatatatcgtggattttcaacgaacttttaggatactgtgggattgcacctgatgttggcagttcagttctaaaggtaccagctaaggagaaaatcacatttgtttccaattatccttgaaaagctcctcgagcccacatcaagtacagtaggattggtgcatgtaggccagcctgttcagttgtggccatggtggagaaaatgcttacagactcacagtttgaagagaagatttcatcattttataagagcttcactgtagggagggaagggatgtactcattagcctgaagttggtgccccctcccctaggtcccggtattagtctgttctcaaactgctaataaagacatacctgagactggctaatttataaagaaaaagaggttgaacgactcacagttccacatggctggggaggcctcacaatcatggcagaaggcaaaagtcatgtcttacatggcagcaggcaagagagaatgagagccaagtgtaaggcgaaaccccttataaaatcgtcagatctcatgagacttattcaccaccacaagaacagtatgggaaaaacctgcccccatgattcaattatctccacctggtccctctcatgacacggaggaattacgggagctacaattcaagataagacttgggtgggtacacagccaaaccgtatcagtccctgacatgtcagaaggtcaggctttcttgcatacctacatgcctaatactgccctccaaagcagccttgttgaagagacggataaaagccccctgactctcaggaaaagagagtcttggggaagaattaccttgtaagttagccaatccttggaaggctattaaaaacaagtgctggcaacaggcatttgaaagaggtcttaactggtaaggatttttgaatctattaaggggtgtttatccagggggtaaaacattcaaacttgtgaaggactcacatagttgtccagggaagcagaaaactaaggatctgcttatgagttaggattgtacatactcagactgggattttttttcccctgggacaaggtcttgctgtgtcgctgaggctaggatgcagtggtatgaccaaagctcgtgccaccacacccgacgaacgttcttttatttttaatttttgtggagatgggggtcttgatttgttgctgaagctggtctcgaactcctgggctcaagcaatcctcccacttcccaaaatgctagaaataaaggtgtgagccactgcatagggcccatgagattctttgtgggtttttttggttgttttttttttttttttttgagatcagatctttctctgtcactcaggctggagtgcagtggcacaatctcggctcactgcaacctctgactcctgggttcaagcgattgtcctgcctcagcctcccgagtagctgggattacaggcacatgccaccacacctggctaatttttgtatttttagtacagactgggtttcaccgtgttggccaggctgatctcaaactcctggcctcgtgatctgcctgcctcggcctcccaaaatgctgggattacaggcgtgggccactgtgcctccccaggattcttttgagaaagtggggaaggtgctttttttcagccatatttatgcaccacattggagatagaaattctttcagctcatctaacatggcactggaacatattactgagaatcagggaaatacagatgccactcgacttacaatagggctacctcctgttacacccatgataggggaaaatatcagaagtcagaaatgcacttgatacacctaacctacggaacatcacagctcagcctagcttgccttacgcaagctcagaacacttacattttcctacaggtgggcaaaatcatccaccataaaacctattttataataaagtcttgaatagctcatgaaatgtatgggatactgtacttaaagtgaaaaacaaaatggttgtatggctgctcaaagtatggtctctaccgaatgtgtactgcttttgcaccattgtacagtaaaagaaactttaagtcaaaccatcgtaagccgaggactgtctgtagttgtcctgtgtttagttaaatactcgtatctcactgagttcggagaggcacaggtgaagggaggtccctgaggacatgaccccttcttgccttccatcttgctccccttccagggtttcatgagcagaacagagggtgcagcccgcactcgggctccagctgtgttcctctctccccaaacagctcatgtctgcagaatgtgtgtacatgaagcacgctcaccactctaagacgagggtactccccaggcggatgatgtacttcttgcctttgcacgtgtcattcctaacaggcagcacagggcagtggttccattcctggctctaccgcataccaactgtgcaggtttgaggggattaaccactctgtgcctcaatttcctcatctgtaaaatgtggataataacagtccctgcctcaatgggcttctgtgatgattccaggagataacatacataagctgcttcacctgtgctgggggctcagtaattgccaggtaagcatccgctactatcattagcatgacaaaacacagcaatgggtcttaattgctacttgaatggatgcagctattcatcttgccactgccggttgcctatttgcaaactggggccatgtacgtgctttggagtaattttgagagttcatgtttgctaaaggcaccttgttccttaacaccaagaatctagactctcaagagcaagaagagtatcaaaatggtcctgtgatcccagcgatccaatgcacttggcatctgacagccatttttattgggtaatcccggttaacaatgggacatttactacccttgcctttgaatacagtgtggggttctctgatgacgagaattcaggtaaacctgtcaatcatattcacacacatatacatgcatgaaagtttaacagaacctctaggactttacaaatattagctcatcaatttgcacaaaagctctatgaagtcagtactattatgcttattacacagacaaagaaactgagtcacaataaagcttaaataacctaagttatataaacaaaggacggcagtgatatctcccccaagaaagcagagtgctgcatttcccccagtggcaaccctaggggagaacttgcccagaggtatgccttttatcattcacaagtgggatcacacagtggaagaagcctttttaaaaaaaaaaattaatgtattgtaaaactccctttgtgtgataaactattgacctgtctcatttttttaacaggtgcacgccattccaaagcatagctgcaacagaattttcctttgagtactttcatacacctataatttaaattgattaagatatgcatcaaaaattcaatagtataatttgagggctttacagtaagaaagtacaactcttgtaagaagacaaactgtatctttttaatttaatgatgcggacttcatatatagtaagaaatttaagtcatttaaatgggaaaaagagtccagtatcatataggggggaaaagttgcatattttaaagaaagtaaatgtgtatttccattttaactactgaaatccagcccacgactcctggaaagggcttcctatcaacataacatttgcattccatttcccatgagtcataaatcccgtggcatggtctgcaaaggtcccctgaaaacaaggctctcctgcagcatacatgtcagcaaacccatgagctattgtctgttcctactctttcatttcccctgataacagcatctagatgtttctaaaagcagaacacaaagtcaaaggacaaatcagagcctcaaaagagagcctctaagccagcagaggcccagggctgtgtaactaactgctttgcctccattttcaaagctcattgagcccaggtcctggggacctgtgagggcggaagctgcattgcatttaggcaactcctggctcggacttcctcccacatcatttatcttttttagcatctttgaggaatggagaagacatagatgctgacagagtgcgcaagattcattgctgtaccactgagaaaaggaagcaagagcaaacaggactcttttcatccctgcagagcagaaaatcatgagggaagagtcagcggtttgttagaacaaacaagggggaaatacaggctgcttttctgggcagcagccactcctgggtatgcaaggatctaggatacaaatgccctgtaggcattccattcgtagggattcatgctgacgaaataatttgctaaattaaaaaagatacagtcattcacttaattacgcattcgacatcgtgcgcctcctgtatgctatgcaaacttcaggtgcgagggcggcggcagtgagcaaggcagacacattgcaatggagtgaaatggaacacaaacaggtagacagccaacagcttaattgtggaggctgccacgtgtcatgaagacaatagcatgagatgacagatgagcggcaggtaagggtggtggtggtgatttcagtggaatcagcagagccttcactcattggagacactggaggtgagggctgggaatgagaaaggttggtcggttgagtgaagatatggaagcagcaggatgttccaggcaaaggaacaattagtgcaaaaacccagagggagagacaagcttcacttctcccgagaacagagagaggcttgcgtgtctggagggtatatattgagagtatctttttccaccgctaaagatgctcagagcaggattaactagaccaaggcagcataggagcaccctaaatgtctatgaatggttaaacaataagagcacgtcactggatggaatacttcatattcaccaggacattcttggttggaagtaacataaatcaacttgggctggcatacagaacacggggcctcaccaagtggtatttatttgaatcccagctctgccacttacttgccatgaagacttgggcaaatttcttaatgcctccattttctcatccattaaatgagaatgctaagatatacagctctggttactaaatgagacaatgcatataaacctggtccttggtaccaggagcataggatacactgaatacatgtttgctactatattctaagatggtggttgtggaaaccatggtgaaccaaaaagcaggaggctattacaatagtcacacacagaaatgtaaaattctatctgttttcagttctgtggatgagaattgcaggacaggaagaggagtgttgcctgaccaggggtgtgtcccaggcccccccaaagaaggggcagtttattaatggccacatgggaacacattgtacatggccattaggatacattttctgtctttcatctctgcctctctgaggacttggattcattattctttctctttacgtcctcatctccctctacttcctgggcccacccttcagatctcaaggtgacctgccctgggtccaacctcatgaacagtgactgaacctctgtcttggtttcaactctgtgtttgccaggaagggattttcatggctgctgcctagatcgggtgtaacctgaaggtaaggcccatctccatcaagcaggtggggggcccgttgcaatcacgtcggttgtgggatggggcagtaaataccagagatcattggtaacagtgagggagccaactgtaaccggggtagagactccaaatataagactgccacagttacacagtaattgtaataagagcagaaactaagaccaagtctctgatggaatgtgatgtgaacaaaagcagaaagctcctgtacacaatggtcacagctatgaggcagaatgcacagatgtggaccaagactgcaaaggattaggcaaaaatgaagacaccatatggcaccaaaactgtccctggcttagtctctacagtgagtctgttgggattctaaccagtctaccgctttcggcagcatgaccttggacacgctgagtaatggatctgtgactcggtttccccagctgcaaaatggagatgatgacagcaccaacctcacagaagtgtgaggattcagtaagtgtggacaaatcaggggcacagaaccatgtcaggccttcataaagcactggggaaatgttaaccattattgttacagacatttatttgaagtatagtttcctttcttcaggtttttcttagaacacaaaacaatctcaataaatgcctagccttaatccacacaaaagtgtaataatctaaagaggaaaagatgtattcttcagctgttcaatcattaaaagtgttgctattgattctgatttttatcgtgtatttattcaaggtattccttctctttcctatccatgccactcctgattttctgcaagtaaggctttggatgtcaatgaggacaccgtgaaatatcaaacatttgggcggaatgccaccccagctgcagatgacaagcagcgaccttgcccagtctcctaccagagtgagtttcctgctgtaccagaaccaggcatgggagagccaccagcactgtgcagaggcccctctcaagctgccagagaaaagtacaaatcgcccctgttcactggttgagtgtcgctgcagttttcgaggctgtcacgtttctgcatccgttagcatgtctgtgacagaaactgaggccaactaacaaagggatggaagcaacaaagggatggaagcatccctgcagaagggatgcgagaagataaataaaaacagaaaaatgcaggagaaaatcaaagagaaaaggataaaactgccataaatggcatccagttgcgatctgttaaaagggttctgactttattcctgcctcccaggcccctcctcctacactctgtccccacagatcagcacctacaggcattaaatttgttgcacaaaaatatgcacctgccataattccagagtcccaaatatggtgaaaatataattatctattcattgatctatttaactgtaaaggactctatcaatcgtctatcaataaggaattttatataccaatctatctatccatttgataatcagtaccccaggctatcctgcttcaatagtaagaaaaaaacattctcctctgtctcggtgaaaaaacaagattcagcaactcatgagccttcaaattgagctgtaatgaatattgtgtcgtgctggtgatttcaaccgaataattccaggaaggctggaaaaggggtcggtctatcttcatcccttttgtcgcctaaaagcaaaatcatgagaaagaagtccagaataaagatggtaatcctgggctgtaaatgctggaacctcatccatgatgccaattgctccataaccacacggacgtgaaccccaaaaagcatgagatacaaggtgagagtaaacactgcccctgtatgtacaggtaatccctctgctagctgtgggttctaaggccgactgctgaaaagatttgacggaagttgccacttgggaagctttttttggaagttaaaacagaaaaactcagcgccttccaatgatgctttattttatttgtcaaatattcattgtcacccacccttaccccaatttcccaaggcaactcttttctggttctttctcagggaccagtggttgactactagtaaaaaggaaaaagccgaatattcacccctcatgcttcatacgaaatcacatctctactttgctgcttgtattttggaaaaattgcttaatccatttttttcaagcagtaatacacttggtgataaacatatttaaattgaatacttcagcaacgaaagactgtgttccttaaccatttatgcaagttctagcttcttaactaggaaagaaatagtggcaacgacatgtcaggtctgtagctacatttttaaataatgggcttcaaaaaaaaaaaaaaaaaaagaaaaggaaaaatcccttcctcttaaggaggaaaaaaaagacatcttttatcacaaaatctgttccttctttagctgtttttaatcgatatctacacctttgggtaggaaaataaatctgtatctttgaatagcgtcatttccaacaacagagcaaggctctgagatgtgttcttttttattaacaaaggtgttgttaaatatctgcaccatatatgtttgatttagtcactttagaaaaccctagagaatggctgagggttgttagcagctgggtctataaattgtaaaccttccccagggcaaagtgccacttgtgatgtttgttactgttatttcatacgacatttatttaaccaggaataggaagagtggtgattcagcggtggtctgataccacaaaggtgaaaagcgagtcaggcaggaggtgccgagaattagggcacacaccctgtctcagaggaaagttggggctcagccctactcgttgtcaagaagccagacacccatttttttctatgtgatatcacctagaatttttaaattagcgattaatccaaactttaaaacagactctgcgtgggaagaacagaatccacttgcgagctagattcaggctgcaagctcctaccttcccaacctctggttaacagcttccttgttgtaccagaacggccacccagcctacttcatcctggctcctagcgtccaagcagcaacttcagcaagctactgcaactactgcagaaataataacagacacatacaagaagaacccagctctggaaatatgatcaggggtttactgtaaacagaaagaggacaaccacttaccatgtatatatggtaatctgtgtggactttatagtacaactcagaggaatttcctcttttcttatcatataccaactttttaccacccctttacaaaacacaagcattatcaattactgccaagagcacctcacatataaaacaaaaaaaatcaaacacaaataaatttcatttaattcaaaaaataaattttaaatcagaaatcactctaggctgggtatggtggctcacccctgtaatcccagcacttcgggaagccgaggtgggaggatcacttgagcccaggagttcaagacctgcttgggcaacatagcacatctctacaaaaaataaaaacaaaaaaaaatagctaggtgtgtaatcccagctacttctaaggcaggaggatcacttgaacccaggaggtcaaggctgcagtgagccataatcacaccactgcactccagcctgggcaacagagtgagaccctgtctcaaaaaaaaaaaaaaaaaaaaaatcactctttacccttatataatttttaacaatctaagaaaagaaggaatcagaaaaaaaaaacacaaatattttttatttctcccattctttaaaaaaaattaccagaaattgccccctttaaatttcaaaattttcctaattttactgtgccagcccgactctcatacctcactgattatatcattcccacacctgatgctccaacaacccagggtatacttttagctcagtcctataaaaggcttcataacctgcactgatctggattcaacgcagctgccgatggacaagaaaaacacatctggagactctgcagccgttctttccagctgtttgtgactcccgaaagacacgtgagcacttggcaccatcaggcacacatcagttcggctctcttccacccccaggcacagtcatcctgagcattgaagacactttagaaaatggttggcaagttgctcttgcactgggataattttagacaatctgatactttgacgctaaaaacatgtttggaattggtgactgtaaacaataatcgtagcttgaactctgaccccggcatggttgtattttgacttacctgggtaggatgcactatggagggagctgctataatcctaatactgtggtgcttaaacttttcgacattattttgctttctgtcttgggagggaggtattcttctatgtctctattagccacttctggacttttccatcatcattatatagctgcttacctcgcctgtggcaacagacactgggtttgtgaataacaggacaatgataaaggctatgtgagcaaaacggaacagcagcttaaaaaagataaaagtttctttctctctcacgtaaatactatctagtgctaagcactcctgggctagaattgtgcctccatggctgagagggagcctgaccccttgcctctttttccgtcaatgtccttaccattctcatacaacgaggcgactgcaacagctccaggcatcacattccaaatccacccagcaggaaggatacaaggccttaggaaggatccatctggaaagccccatttgatgctttaacatgcagagtagaacggctacacccagctacaagcagtaccaggaaatgaagcttttattccagctggccatgtgctcagtgatttttgtttgtttgagacagggtctcactttgtcgcccaggctggagagcagtggtgttatctctgctcactacaacctccacttcctgggttcaggtgatcctcccacctcagcctcccaagtagcaggaactgcaggtgtccacccaccatgcccagctaatattttgtagagatgaggtctcatcatattgtcccaggctggtctcaaactcatggactcaaaccacctgcctgcctcagcctcccaaagtgttgggattacaggtgtgagccaccacacccggcccaggtttttgttattgttttgggtttttttgtttgtttcttttgtttcttgaaaggaagaagagcaggtattggaagagaccatcagaaggcccctccacagtcaggccccacccatttttagacacagctcttgttctggcgagtctcattacttatggtttattctgggaacaggatttaaggggtcgcctccccactcaaactcatgacggccttaaggtctctatgccacttggggaagacagagagaaatgaactgagctgcgaggacaataattaaaagaatctgcaggtgaagcacattactatttttaccaacgtgcttttacgcattgactccagaaatccttacaaccatcctccgagaaagcactgtcagccccatttcatccatgaggaatcaggagcccagaagactaactgccccaggtttcacagttaggagtgtgaagagccgactccacaccctgaagctaagagcagacttcttagcttcaactaagacgcttctcccacacccacccgcaaaggggcattcagatgtgtctcgcccaaaccatccaagcccgagcaccggtcgcttttctgcctttgaggtttctcacttgaaagacatagtttgatctccccgtcccgctgtgtgctgggcactgtggacagcgttgaccctccccctccgagcatgaacaggtgagtaatgtctgaaagaggacactcagggctttggcttagcttgtagaatttgttggtggggagggggggggccgggggggcacaaaatgtttttaaatcttttgtggaaattatttaccttttaaaatgggagatttttgcatagaaatctcgacatctacctgtcctcaggagagaggaagatccaggaacccagagccctcattcctggatagcgacctttgtggtagctgaggggcagctgtcacttccagccaggaggcatctctgtggagaccctgctgccatctggctgcttccccaaactttgctttacttgcctggctttgagggcacttgagtttatgacccatgggaaggcggggcaaagacacagatagttatgctacaggaaatgtccgtaattggtgaatttcaggctaccacaagccccctgtacctgctgcatagataaatacctgaaaaggacctcagggccattcatccggtacctttttaccatcattaaattgaagagaaaattgaaacagtggctgggatctctctttgatctacagcaaagggatgttaataaccatgtttctggggagacagctgattaacacggaacttagcagtattccagtaacagccatagtcaggaacattcgtagtgaattaatttctaaccagctcctgaatccataaatgagaggatgatttgagttgtctggccactccctgctggggggtgacagcagcttgagctctgtgggctcaaaggcatcttttgggggcacaaagtgaatgacaaggagttatgccatcaaaagctttgttgcaaaatatatattttaaatctataaactcctaagagcagagtttggttttaagtctcttaatgattgtacagatgctaacagtacagaaaccgccacatgtcttcttcttggctctttatgcataaatgtttaggtggttcatctgtcttaatctatggttgcgtcacaagatttctgacttgtgtttcatagaaatagttctaaacacccaatcagacaggcactgcaaagcaggctgagaaaactctgatgatggtcaggtatgagacatgtttctcagtacgttaatcggggtaccataaacaagtgattgtaacatatttcaaagacgttgtatattataaatgtatacaatgattatttgtcaatttaaaatgataataaggtcatccaaaaatacaatagcttacataagacacaggtttactgttcttttttccccctcatgtagagagtcctggcctagtagggtagttctgaaactctcaacatatggcttctacctctggaaccaaagtggctgctttggttaccactatcacatctgcatcccagcctgtaggaagcaaagaaccagagaacacacattttgtctttttaaaggaaaggcctaagtagtacatgagttgcttctcacatcacattggcaacagcttcattgcagcgtggcttcactgagatccaacagaggctgggaaatgtcatctttagctgggcatccatgggcccagctaaaatccgggagttaacttattcaagaaaatatgagaaaagatcctgtttggcaattagcagtcacatttacactggagacaggagaccttgaatttttttaagaagttcaagatgctaccctttctgcacacaacctcgtatgtaatgcaatattaactcttggaaaagaggatggaggagcattcatgacgaggttaatgtctcatatgatccccaatgtaagaatagacatgtgaaaacatatagcatagtacaggctgagtatcccttacccgaaatgcctggaaccagaagtgttttcgattttgttcagattatggaatatttgcatcacacttactggttcagcatccctaatccgaaaaatccaaaatctgaaagcctccagtgaaaatttcctttgagcaccacgtcggcactcaagaagtttccagttttggagcatgacggatttcagtttttcggatcgggagatgttcaactgtgtttcagaccatgggctctggaattggaaaccttggtttggaatactgcttctactagtaccttgtggcagtttgatcttagacaagttgatttacctttctgtgcctttgttgtttgtacaaatgtggtggggtgcccgtgggggtggcggctgattgtacctggcttatgggatatcatgagaattaagtagcacaatgcttacaaaggccctaaaattgcgcctggcctcagccccattcctgcctgtgccccagccactgggaaaaggggaagggaaaaggaagctcaggtgtattcctgataaatccatgtaagtcacacaggtgtattcctgataaagccaggtaagtcacacaggtgtatttctgataaatccaggtaagtctgataaatccatgtaagtcacacaggtgtattcctgataaatccaggtgagtcacacaggtgtatttctgataaatccaggtaagtcacacaggtgtattcctgataaagccaggtaagtcagtcccacggcctcccctcgaggcgtaggaggcagagaagtggcaccttaacactttttttccttctcaatattctgaggaggagacaggctctctgtgatatggctcaattcatgttcatgataaacccctaatcatattttcagagctggattcttcttgtttgtgtctgttatttctgtagtagtcgcagtaggttggtgaagtctttgctagtaaacgtcgccctaaacttaaaaatcataacatcattctgcttctctgaaacaatagctgcaatttctcaggctcttgaagcactaggatttcaacattaatgcaagtgctttagaggaagaattgccaccacatttacatgcacagatctctttccaaagctcttcaaatgtacaaccctgagagccccagaatcagtttaaatcaattcggaatgtgcaggtaagttaacagtgttgagcatccatctaccttcagagggtcagagggttggaaacacactagaaaaagtctcatgttcagagacacgaatggtcaataatatggttataaatatcatcttaattctgcaaataattttactattaataaattcctttgccacatacacatcctcctacagtattcttagaacactcccatctgatggtgttggacttgcctctttcctcacaggatctatgtgtgaacaaacgagaattatattccaggcgtacttgttttcattgtagggccctgatgtgcagagggagtgctgaagagacaaatgccgctgggaaaagtggcctcatttattcaagatctgataggtgtttccattggaaccaaatgttcagaacgtctgcacattagaatattttggtttgagcccaaatatttctatttgagatttatggaaaatgaagacagtggatggcactagaccagcgtgtaagcaggagtaacatctgtgatatttagcgactggctaaatgcttgctcgctgtaagttgtgtccccacatacgagcaaagatcacttctgcctgtgtggcagaaagggtcacaaattctatctgaaagtctctgagcaagccacaccattctaaacgatcatcacatctttgagtaatttgaacagaatttgatcttttatggttgttttttccccatcccgttccctcttccagcattgaagcccttgaaatcctagatgattcaagagccctggaaattggagctattatttcagagaagcagaatgatgttatgattttcaagtttagggtgacattaactagcaaaggcttcacccacctactgcaacaactgaaaaataacagacacaagctttggaagacctggtaactgaggccatccccccgtgagaccacgagctggcatttagggctcactctgtgggaaaaactcatcttgaaatcctgaaactactctctgagtggaggaagctcattccaggaatgttaagtgcaaacttaataatcaacacagaaaaaagcaaaacatgtgtcccacctcacgttcagtctgggccacaaatagacgctagtggaggtcaccgacttatttttaaaatatttttttttcaatttttaaagtaacttttaaaaatccattttatttttaatgtttttcagacttatttattctcataaatccagagataaaaggcggagcacaagattctttgcatgccttagggctaaggtaagcccattttcggcatctgtgctggccatatgtataaagcctatataatttccatctctttttctctttctctcatctttgttttgtctctccccttccttggaaagcacattatttgaagtctgttcggttgaaaagtgtatcattccattccctcctattagcaggaagcatcccctgggtgaattgaagatccatccttttctgaccttcccagtcttctgggaggctcgccctgaagtggggagtgttgaggtgtagagcagaggaatgtaattttcatgccactgtccatacatggtgaggaagccattctatataaaatgtcacgctgaatgcacacaggcaattttctgagggatggaccacagctttctgtctaacctcaacatcatctatggcaccagcaatggcaaacaaaggctaaaaaccagcagtgtgaatttcatgaggcctgagggtgtttctttaggcccactcagtggcacgtttattttcgttgccatcgacatatcatgaacttccacaatcatgagctttcatattaaaattcaactttcttaattcccttgcaccagctgggatcagtgggctcctagggtgaagaccactgagtgctgctgtgtgtaggcgccgtcctaggggccaggattgcagcaatgagccaagcagacagcgccctggccttcagggagctcccagccaggttggtcatcctcagcctgatgtactcctcgctctacttagtatcagactctaagaaccactgctgctaccgagttcccatctcaactctgccactaactgggtttgatgtttgcatttgtatagctttaggacttgagctttctcataggtagaatggaaataacaaaatctacctctgtgggatttgtaaggattaagataccctgaggatcacgtagcgcacagtacatgctaaatcaacgttatttcttgactccaatcaccatcattccctcacttcacaaatttgtcaatgaacattgtatgcactaaaccaagtaacttttagaaaccacagagtctgtttagatttacagctttcttcatgtggtgtttgtgtgagggcctttgaaacgcaggccagaaagacagccccagccaggaaccaacccttctggtgcctagatctccaacttccagtctctagaactgtgaggaaatgaatttctgttgtttaagccactcagtctatcgtatttttgtttcagcagcctgagctatcttatacaacaccttatatggaatgtgtgttagcaaaagggaccacctgactctttcttgtggtcagtatttaagccaactctttaaaccaagtgccaccatgaacatcagataaaacataattttatcactcgaaatagcagtttatgattggcgcagttttttgttttctaaattttaaccagccctcttccctgtctttataaatcagaattcctaagaaatagttgatcaaggtgatagcaaaatatggctactcaaatgactgtgtgtcaaatgcatggtgccaggcccagtttgtgcccctctcagctcagcatccttccaccccccaggcctgggctatgtccaccactccctcttcctctgaggctcatgctgccctgcctcctccaggtggagggctggatgcccaccagcttcccttgctcccgttatgggagctgcagcgcccctggggcccacatccgacctgcctagacctgcagaagctctggttcctctgtctaaatctaggctccaacgagaccctgtactgtgggtgtggagttgagcttccgcagcagtgaccccataaggcccagtagcaatacaaatgcacaagggaggtaacacctcgtggcgaaaatggggcctgcttttgtcacaagggaaaaaaaaccatacagaaaagggaactgtaattaatcagcttcctgaaaggagcgaagacgaaccttcatgggtattacgtgtaatgttgtgtttcttcccacactccaggggcatgaaatgctcttcatccaactggatggtttcatgttgccataagaaataaagagagagtggccaggcatgatagctcacgcctgtaaccccagcactctgggaggccaaggcgggcagatcacctgaggtcgggagttcgagatcagcctggccaacatggtgaaacccggtctctactaaaaatacaaatattggctgagcttggtggtacatgcctataatcccagctacttgggaggctgaggcaggagaatcgcttgaacccgggaggtggaggttgcagtgagccaagatagtgccactgtgctccagcctgatcaacagagtgagaccctgtctcaaaatgggaagggaaggggaaggggaaggtgatacaaagaaagcatgaagagaaacagtgacagcatgagctccaggggcatcggaatgtgacgggcaagttgcagaatgatgaggggctgtgaggccaccaggatccccgctggtgcagtgagagggtctgtgcagggcactgggagctgtgaaaagctttgccccaaatcaggtgaaattcaaccaagaaaatgccactcaccctcctcattataatttctatccccctgccaaaatgtgaaccatgctactctgaaattccttcatttattctgttttgacccttaatttatagatattaacattttggcttcttatagttgatcaaagtcaggaggaaagagagactaaagggaagtaagtagaagataggaaggagagaaggaaaaagaatgtttttctttgaaaggaacttgccatgtcaccgagggcattagagcatctctgaattctagcaccagctcagcagacaagctttgtgaccctgaggatattttatctcctttctgagcctctgtttccccttagttaatggaaacattgcacttagatcatcctaaacttctgtctcttaatctacagaaagagcgaagttttatttgcccgaattaaatggaaagtagaaataatagttaattctctttcccaaaacctcagtcctatccatttcaagaagggccactttcctccagagaaatgagttacaaaccatcccagaggtgtctggcaaaccgggagagaatccctgagttcatatcagctccctcccaaaatttcatcaacaggacaaagcataacagagctgaacgaagtagaggccaccagggcaaagagtgggcatgaggaccacaccagatgcctcatcacacttgggggaagagaaatgctaatgaggcaggggcaactgggtttgcggagcaatacacagcagctggatcctgcagggaaggaggctgctgcaggacagaggaggggcccgttgaaggcccagccaaaaaaccttcagatgagagggcaggctggacaaggcaggactctgaaaacagaagagacggttaaacctccacactcaaccaaccagacccctcggacaaggcccccacccaggcatcctggcccaaccactcggggcacagggatgtacacaagcttgaatatgcgggaaaccaaggcactgaaatggtgtaatctctgaattcatcaacatctggagatacaaagctgtggcaaagagtaggaatgtgggtgaaaaggagtattgttgttttctcttttacttgcacggactcctggaattggactttcctgaaaggtagcctatgagagctctagcattctccatttaacctactattgcctgtgatctcacaaactcccctgggatcaattccaaatatcagattagaagctttgtgagggtagggattttgtcttttatatatttacatcttcaaatgcatattgtttagttgcttgcgcagaattgtaagaaacataaagaataaacccatgaccctctgatctccacttaactatttttcaaaggaaataatcatgatttttcagcagaagagatatagagatatagctataaatacagatcatcaaactgaaagtagaagaaaaatcaacgtggatgtctcaagtattcaaaaagactttggcacacaaaatatttaagcaaagtatgactaagcttatttcagggagggagaaatgtgaactacaggatgaattgattgactcatgcagtgaacaagcattttgagcataaattcgtgccagacactataccagggtatgatgacttaccaaggaacaagacactggtctctgctctcggggagtcaagactctttctgaggagttggcaattgacataaatgacaggtagccaagatagggagggacctaggagaagagcctcccagttagacggaagagccctgggcagaagggagtctggcatgtgtggggaacaggggagggcaatgaggcagggatgccgtgagtgatggggaaccacaggagatgtcagagagaggaacagcagcgcatgtgctgagcaacacggaggatttggggttttgctctaaaccccgtggttgcaaatcacggatggttttaatcaggaatcaacaattttatttttatttcaatagttttcagggtgaacaggtggttttggttacatggataagttctttagcggtgatttctgagatttgggtgcacccatcacccgagcagtgttcactctacccaacgtgtagtcttttatccctcaccctcgtcccacccatccccccgagtcctcaaaatccatgacatcattcttatgcccctttaagtcctcacagcttagctcctacttataagggagaacaaacaatatttgatttcccattcatgagttacttcacttagaataatggtcttcaaccccacccaggttgctacccataggaaaagaagccattatgtgaaaaagatacttacacacgcacgtttatagcagcacaatttgcaattgcaaaaatatggaaccaacccaaatgaccatcaaccaaagagtggataagtcaaatgcagtatatgcaatatacaccgtggaatactactcagctataaatgaaggaaccaacaatttcgatttgtatgctttgaaagattttcattgctgatcagagaagactgtagagggcataggttgaagaaaggagaccacttagaagtctctgacatgtgtcaagcaagaatatgatggattaggtcagagtccagatgggaccaagggcagcaggcagcagacagggattgggacacattgagaagaaacatgatgttgcctacattttcaccctttagcgacaccatagggagccacacaatcttttatccatgaaaattgctctgtaacctttctaaatctaacaaacaatttaatctttctaacatagggtcatctattaggacatcacttgtgtctgaaatccataaattagcacagagattattttttgcactatttatggtattatgatcatgaagcaggaaacttctccgacccctttgcggaagggaactggagtgcgcaggtgctagaactagcgggctgcttcgacgccagcagggatggactccactcgctcagtcccactgtgttccaccctttgcaggagggggagcgcaggtgagcagatgcaggagctggggcgagtgctttttggtaccagcaggagcaaaactctgtgtggccccgcggcagcatctagggggatgcccacgacccctgaagccccagtaggagtgttacagctcttttagctttgccgtcggtggatggcttaagtgttaacagctcagtgaagggtcaagtgtggcagtcttttgcactcgcacctgaatttttgtctggcctctaggaggaatgaggtgacatgaacaaattggagatggtaaatgtgggggattttattgccaatgaaagcggctctcagcaggaaggggagctgaaaagggcttggagtgggaatctaatctttccccggagtagggctgtccccggctggactcctctccaaagcaacaccatcaagccgtccctctgaagtcaagctgcttatctccgatgtccagctgcttctcctcttctcctctgctctccataagtggagcctggggtttttacggcacaggatgggggggcagggcaggccatgggtagttttggaaaaggcaacatttgagcaggaaaacaggaatgcatgttcccactttgggccatggtataaggctttttggcttgagggtcgggccctcaccagggatccaccctcctctgcccagaatttccctgcctcctgtccttatcagtcataattctgttttccctgcaaataaacatcttgtatcctccatagcatgcacagtgtctaaaccagaaatatgtttaatagatgttctttaaaatgccttttaacaactctacaaatattcaggctatctgcatctataaattgctgcatttgttttcaatggaaagaaattgaaagctggcaattgtcagagagtcaaaagtactaagacctttaatatttcatttctgatatctatattctagtgacatatctttatttcattctccactggaagtgttgtaagtttaatgtcaattgcatacatttatttaatttcaatagcttgcataatgctgcccagcaaggcacaatcaaattaggagtgtctggtcagaggcagggcagacaagaggaggaaatcagcaggtcctatctcattagaatcacaaaagcctacatttttatgtgagttgtgtcaggaagcatggcctgaaaatatattggtcaaaaattaaaaagtgggaataaaactatggaaatatacctgcagcctgacaacaaaagagaaatggacctctaacaattttgtagactattaatagatgcctattaaatatagcacatcaaattacatgtttcatctttttaagataaatattggttttagagcaaaacagtagagaataatacagctattcattctgactcactgtcaagcaacagaggtggtgaaaaaattttaaatgccttaaaaagctgtcatcgccttgaattctgaccactttaaaatatgcaagagacatattttaatttagattcgcttcgccctccaatcacaaacatcctactgcttggaaggaagacactgaattaacccccccagtcaccaatccgcgcttctccacacatttccaagaaccaaggttatgatttttcaaaatccaattactaaatgaatgtctccatttcagcccagctttgagtttgttagctactgattctttgaatgttggctgcaaaaaatcaatttgaaaagcaaatagtcaaacagccgtcagcagacttagacaatccacagacctattttccaggaggctgtttaacacacacacactcctgtatttcctaaacattagggcaaagaccaaaagaagttatggagcctcctcagctgatgctgcccccgacagaggaaaagtaacccatcttttatttctcaagggtgacgttgtgagggggcaaagctttgggggatacgtggattgacatctcagggggccattcacgttccaaagcaaatgtttgaattgctctgagtgaaaagcaagagagatacatgactgattccgggagggactgaacatcccactgtcaacgatgctcttgccggggccagccctgcttagcatgcataggttgctctgttgctttcctttttattgcactggagacagtaggggatagtggttaaaagcccccactctggagttcatgtcaaacaccaactacacctctcaccattgatatcatcctgaataggctatttcatctctacgggccttagctctctcccctgtaaaacgggatcaatgtgtatgtacccggttattgctggaatgagacagaaagtattaaataagcatgggagagtaactcaatcaatgttagctatttttataatcactgagtatttattccatggattgtctcattcatcgtccggtacatatttaccgaaaacctgtgaggcaccaggcgctgtgctgagcatgggaaacaaatgagacacagtgcctcctacaacggggcgttgacggtcaggcaatacatacatcaatccaccagtaaatacacaaataatatctccgatacatgctgagacaataaaaaagtggttctttccttgagagctttgtaagaggactctaacttggatgcggggttccaaaaaaagttctttaagaagtaagtttaaggtgaagactaaaaattgaacagacattatcgaagggaagagctggggagagcttacatttggcatttttttctgactacacctataactattgaatttccatttaggtggtacggaaaacacagaataaaaagaagaaaattaatgccacccataatcctactaccaggagggaaactggtgttcattctacccaatatttctttctgggatgatacagattagacgatattatgtgcacacacatacatgctgatgactatacatgagtatgtgtgtattaaatacatcatttttacattaatgctttttattctttttttttttttttaaagaaatagagacagggtctcactgtgttgtccaagctggtttcaaactccaaggctaaagtgatttcccacctcagcctcccagactgccaggattacaggcatgacccaactcacccagcctgatcttcgtattatatcttgaacaattccccatgcccttaaggattctctagtaatatagagaatatatttgcaattggatcttagcatatcttcttgagttttttttccccatgagataaattctccagctggagttgggaaatgaaaggctaggaatttttactattattttttgagacagggtctcgctctgtcacccaggctggagtgcagtggcatgatcatggctccttgcagcctcaacctccccagctcaagcgatcctcccaccacctcaacctcacaagtagctgggactacagacatgtgccaccatacccacttaatttttgtatttttgtagagatgaggttttgcccaggctggtctcgaactcctgagctcaagtgatccacccgccttggcctcccaaagtgttgggatgacaggcgtgggccatcacacctagccaggataggaatatttttaaatctctgataaacacagccaaactgccttttaaaatttttgtaccattttccagtttccgcttatctgaaatttaggagtacccttctcacccttctccaaaacatgccttaaacttgtcacaaaaacggcacctagttggcccacattatgtattgtcggtgttctaaaaatgccacaggcctgaaacttacttttcattttgcctatggtgttgtagacacataggaacttaatttttgtttgtaagtattaagaactaccaagatgtttaaaaggtgttattttatacacacacaaatacatacacacacatattggattttttaacttattccatggagatccttattcttgagtttatactgcagtatttttttttaagtgtatgggtttttttttttcttttttttaattttttttgagatggaatcttgctctgtcacccaggctggagtgcggtggtgcaacctcggctcacagcaacctccacctcccaggttaaagcaattctcctgcctcagtctctggagtagctgagatcacaggcgtgcaccaccatgcccagcattttttttttttttttttttgtatttttggtagagaaagggttttgccatgttggccaggttggtctcaaactcctgatctcaggtgatcaacccacctcggcctcccagaatgctggaatgacaggagtgagccaccacacccagcctttagtgtgttttaatatcttacagtgcaggtatacaacgctcttcttcttttaaatatttgcctggttatacttattcatttatatttctagataaactttagaatcattttgttaagttaaccttaaagaaaacacttctattttgattaaaaaggtaacattatagattaattccagaaaatgatactgtatgatattgagccttccataatttgtgttatttttgcccattacgttttacagattttagcattattggtcagttccttcagttttgggcattttattacattatttgtggatcatttatatttttactatctgtgagtgcgatcttttttccacattatttgcaaaataatttttgctgttaatgggaaaatgattattgtggctctgctgatgtttgatttttttaaattctctataaagagaatcatatcactgctaagtaacgatttcctcctgcgtaaataggaaagcagacatgcacatatatgcatttccggggaaatttaaatcatactaaaagtgtgccacacgagtaggcaggcggagggaacgtggctatcagcttctcctttggcaccagcctacccaggtttgtttgaatattctaaattgtgtgtgtattgctttaatactttttaatattgaggaggttgattgactatttcatagtgttcttctttacactaaaaacctccttacattaaacacattattaaccacttaacatgatactccatttgaattacagtttctttcatcccttccaggagctggtcatcattcttttcttacatcactgcattggctataatgaagtgccttggttgtttttaacctcggcaccaatgctatgggatgccggctcacggaagccctcccagcgtgcactgggcctggctatggctaaaagcagcgtttcccaagcaaaagctgcatcttctcacctgggtgggaatgacaaggtcagacagattccgctggatcccctaaagtcagtcatctacagacattgataaatatttaaaaaatttaatgttgaccaaacttacaatggactctgacaaaacagtatttcgtggtgccaaggctgctggccccacctacaaacatcctgctaaatcctggggccaacgataggcctcatgcattctgttgtcacttatattttgctgtaacatataatgccagctgctggacggagacagacaccgtgtgtaatgtggggaaagtgtcagtctactcctatcttacagtttttctctctttacatcaaaaatgtatgttgggttttatcgaaattgtagttgacatacatctagaggtctcctttactaacacgtttcttaatatgacatcattcttacatgtttgtcaaaaccatttggtgtcattaatgtgttatattatcccacctgacttattattttattggaggctttatggatgagtttaattatttttatgaatgagacttttctttatgatttttcttactatcatttttagatttcagtgcctggattacgttggcttcctaaaattcattaaaatattttttccttttttcccatgttccatttctattactttctaattacatcaaatggaaataaatatccctttaaaaattaaagagggccaggtgcggtggctcacacctttaatcccagcactttgggaggctgaggagggtgggttgcttgagcccaggagtttgagaccagcctgggcaacatactgagaccctgtctctaaataaataaataaataaaaattaatgaatactaaaattaaaggaaaacatcatataaaactctttgggctaaatcttttttggggggatgatgaatgtaacaatatttttattcagtttgaatctttcccacctactcatttgttccaatttttgtttttattttttaaaaaagttaacctacggataccatttactgcttctgttgttttcatttctagaaatacttttctaatctaatcctgctcttttttcttaatttatgtgtgtttaaacatttaggttcaggggtacatgtgaaggtttgttacataggcaaactcctgtcacacaggtttgttgcacggattaattaatccatggaatactaggcagccacaaaaaaaagaaagagttcatgtcctttgcagggacatggatgaagttggaaaccatcattctcagcaaactaacacaggaacagaaaaccaaacatcgtgcgttctcactcataagggggagttcaacaatgagaacacatggacacagggaggggaacatcacacaccagggcctgttggagggtggggagtaaggggaggggtagcattaggagaaatacctgatgtagatgacgagttgatgggtgcagcaaaccaccatggcacgtgtatacctatgtaaccaacctgcacgttccgcacatgtaccccagaacttaaagtctaagataataaataaataagtagatccagctcttttaatcttgccttcatcttattccactacctcgtctcaatgaccatctcttgctttagaaggcctctctcaaatattagctaggcatcttttaacaccggcttgttttctacagggacactttctttccaaactgtacctcttctcaacgctatgctcttcatctttcatgtgaccaactcacttcatatttcaaagttctgtttgtttctctttcttcaaaggtgagtagaatttccccacagcccaggcatcgcgggagggtggcaatggcttctgaggacactgtcttgctgtcccctctttactttcagggtctttcacttgcctgtctcccgggagggctacccacagctgaatgttttcagttacctgtttcctgtgaattcactgccctttggaataatttccctcgttccactgtatagcagtttttccttgaagcatggagttttagttgcaaacgatacaacatatgccatgtaacgttcatattccctgcacaggaacacccagagcatgcagtttgcagggacctgccgggctcagccttcccacagaggtcactgtgcgcatccacctgcaggatgcttcactgcacagctgatcagacccagagtggtgctcgtggaggggctctgggttgggaggcaggtaaggttctgaaagtcccggctgtgacttacatgagagaccctgtgtgtgtcgttacacatggttctgagttatggaaatccacagtcttcctgtgtgttgttccccaacccaggtggaagccattgtgcctgggggcttcatcacagctttgccaacagacatgtccctggataacctggaagagggcaggcattctgaattctgggctgcacacctagatggctaagaatatccagtgaacacttagtgtgtaaatgaagctggagacaggagatttcggagatactagttgatcaatgcatccttggtatagttgttccctctaaatctcatgttgaattgtaatcccagtgttggaggtgggaactggcggaaggggactggatcatggggatggatttcttatgaatggttagtaccatcctcttggtgccatcctcaaaatagtgaatgatttcttgagagatctggttgtttaagactgtgtggcaccctcctcctctctctctcgattgcactcttgccatgtgatgtactggcttcccattcccctcctgccatgactgtagctccctagactccaccggaagctgagcagatgccagcaccatgcttcctgtacagcctacagaaccgtgagccaattaaacctcttttctttataaattatcgtctaggtacttctctatagcaatgcaaaaatggcctaacacaatcctttaaagaaaaacggagtcagatttttttaaaggtctttctcaatagtttagcaaaagatgtggaaagggttaaatggatgtgtgtttataaacattctggaagagccaagtaggttaactgcttttcaattctgtaaaataattagaagcgctaagctaatgtagtagaaacatattatacatttctttaatttttataaacttaactatatgaaatcagctaaattaaagcaaaaaaaattaagttaaatggtgcaggattgttgtcctctaccatacactaatctaatgggtacatgcactgtgcccattaggagatgaaagataaggacccacagtgagctccgtgggtcttcctgcccatgttcccctacctgggcgagcatccttgggagggaatgaatgtgcagaagagagaaggggtggagggagataagactgagaaggaagtcagggttctggcttagagaaggggtggagggagataagactgagaaggaagtcagggttctggctttccaaagagggctcgccccagaattcctagtttctggcttgagcagaagttgcaagctgacatctgaaggccaaatccaatctaccaactgtttttgcttggtatgcacaagatttcaaacatttttgcaattactcacaaactcttaacgactggaagagttcacataaaaatatggatgtcggccggacgcagtggctcacgcctgtaatcccagcactctgggaggccaaggcgggcggatcacaaggtccggagatggagaccaatcctgtccaacacagtgaaaccccgtctctactaaatatacaaaaattagctgggtgtggtggcaggcgcctgtaatcccaactactcaggaggctgaggcaggagaatcacttgaacctggagggtggaggttgcagtgagctgagatcgcgccactgcactccagcctgggcacactccaccctgggcaacaagagcgagactccgtctcaaaaacaaacaaacaaacaaaaaatatatatatacacacacatattatatatgtatatatatgtgtatatatgtgtgtgtgtgtatatatgtgtatatatatgtgtatatatacatattatatatgtatatatatgtgtatatatgtgtatatatgtatatatatacatatatatatagatggatggatgtcaaacttcttttggatggagaaagttctgggctcagattccgaggtcagccatcacctggagctgcaggttttcctcgtctccaccgagcatgtgacccatagtgaggcacagatggtgttttgtgtcagctgccctgggtcacccagttggcccgtcggtctctcacacttgcgcacttcacttattctcatgatctgcctggtcctcgttagtacctgtgttttccatccctgctgtaaaggaatctacaggctttggtactggggagtagcaggaaaactgccaggaccccatggaagggcggagggagactcctcccccacagacagaggttgagcacagaagggactggggcttgtcctctgaagatctcgcgtgttagacagctctgcagcctgggggcacaggctgccctcttctcaggaggctctccctaggagtctgtcatctttctgccaaaactcatcccatcctgagatggtggcacagaaatacttgggtcacaggacatgctgcctcaggcacgtgcgtacagtcattttatgagctttagagctgaaaatgtccttgatcatcgaatcctaaaaaaagtcttctagatgacctagggtccaaccccagcacatctcccctgccatgactgaatttctcctaacaagagagtctcttatcatctaatttaatctgtagctgtattggaattgccccagaaaggacgtggatttaagtagggcacaaatcttgctataatctttctgagtttttaaaggggaagaggaaatgcatagagaacagggtatattcagaaccaaaactttaagtcccaagctcctagcttaaggaggtgcgggcagagagtgtcaaaaggatgaagaaaatcaagggttaaagcagcaaaggaaaaaaaaaaaagggcgggggagccatatattgagcctatgatacgccaggccctgggctagattcaggtgctctggagatgagagtcctagcccctctccatggagctatgcagttataaatccagatattgaatatgtaattgtgtctctattagtgttacaaaaggggagcagtggaggccatagaatcctataataggtgggtaccccttgtagaggctggaggactcagtaaacaaaacatccctccctccgagcacctttgctcccaaacgtcactgcaggatcactagaacgtgatttgcctgtttaaagtaattaccagggaggaggagccaagatggccgaataggaacagctccggtctacagctcccagcgagagcgacgcagaagacgggtgatttctccatttccatctgaggtaccgggctcatctcactagggagtgccagacagtgggcacagctcagtgggtgcgcgcaccgtgcaccagccgaagcagggcgaggcattgcctcactcgggaagcacaaggggtcagggagttccctttcctagttaaagaaaggggtgacagacggcacctggaaaatcaggtcactcccacccgaatactgcgcttttctgacgggcttaaaaaatggcgcaccaggagattatatcccgcacctggctcggagggtcctggcccacagagtctccctgatggctagcacagcagtctgagatcaaactgcaaggcagcagcgaggttgggggaggggcgcccgccattgcccaggcttgctcaggtaaacaaagcagccgggaagctccaactgggtggagcccaccacagctcaaggaggcctgcctgcctgcctctgtaggctccacctctgggggcagggcacagacaaataaaaagacaacagtctgacagctttgaagagagcagtggttctcccagcacgcagctggagatctgagatgggcagactgcctcaagtgggtccctgacccctgacccccgagcagcctaactgggaggcaccccccagcaggggcacactgacacctcacacggcagggtattccaacagacctgcagctgagggtcctctcagttagaaggaaaactaacaaacagaaaggacatccacaccaaaaacccatctgtacatcaccatcatcaaagaccaaaagtagataaaaccacaaagatggggaaaaaacagaacagaaaaactggaaactctaaaaagcagagcacctctcctcctccaaaggaacgcagttcctcaccagcaacggaacaaagctggttggagaatgactttgacgagctgagagaagaaggcttcagacgatcaaattactctgagctacgggaggacattcaaaccaaaggcaaagaagttgaaaactttgaaaaaaatttagaagaatgtataactagaataaccaatacagagaagtgcttaaaggagctgatggagctgaaaaccaaggctcgagaactacgtgaagaatgaagaagcctcaggagccgatgcgatcaactggaagaaagggtatcagcgatggaagatgaaatgaatgaaatgaagcgagaagggaagtttagagaaaaaagaataacaagaaatgagcaaagcctccaagaaatatgggactatgtgaaaagaccaaatctacgtctgattggtgtacctgaaagtgatggggagaatggaaccaagttggaaaacactctgcaggatattatccaggagaacttccccaatttagcaaggcaggccaacattcagactcaggaaatacagagaacgccacaaagatactcctcgagaagagcaactccaagacacataattgtcagattcaccaaagttgaaatgaaggaaaaaatgttaagggcagccagagacaaaggttgggttaccctcaaagggaagcccatcagactaacagcggatctctcggcagaaaccctacaagccagaagacagtgggggccaatattcaacattcttaaagaaaagaattttcaacccagaatttcatatccagccaaactaagcttcataagtgaaggagaaataaaatactttacagacaagcaaatgctgagaaattttgtcaccaccaggcctgccctaaaagagctcctgaaggaagcgctaaacatggaaaggaacaaccggtaccagccgctgcaaaatcatgccaaaatgcaaagaccatcgagactaggaagaaactgcatcaactaacgagcaaaataaccagctaacatcataatgacaggatcaaactcacacataacaatattaactttaaatgtaaatggactaaatgctccaattaaaagacatagactggcaaattggataaagagtcaagacccatcagtgtgctgtattcaggaaacccatctcacgtgcagagacacacataggctcaaaataaaaggatggaggaagatcgaccaagcaaatggaaaacaaaaaaaggcaagggttgcaatcctagtctctgataaaacagactttaaaccaacaaagatcaaaagagacaaagaaggccattacataatggtaaagggatcaattcaacaagaagagctaactatcctaaatatatatgcacccaatacaggagcacccagattcatagagcaagtcctgagtgacctacaaagagacttagactcccacacattaataatgggagactttaacaccccactgtcaacattagacagatcaacgagacagaaagtcaacaaggatacccaggaattcaactcagctctgcaccaagcgggcctaatagacatctacagaactctccaccccaaatcaacagaatatacatttttttcagcaccacaccacacctattccgaaattgaccacatacttggaagtaaagctctcctcagcaaatgtaaaagaacagaaattataacaaactatctctcagaccacagtgcaatcaaactagatctcaggattaagaaactcactcaaaactgcacaactacatggaaactgaacaacctgctcctgaatgactactgggtacataacgaaataaaggcagaaataaagatgttctttgaaaccaacgagaagaaagacacaacataccagaatctctgggacacattcaaagcagtgtgtagagggaaatttatagcactaaatgcccacaagagaaagcaggaaagatccaaaattgacaccctaacatcacaattaaaagaactagaaaagcaagagcaaacacattcaaaagctagcagaaggcaagaaataactaaaatcagagcagaactgaaggaaagagagacacaaaaaacccttcaaaaaattaatgaatcaaggagctggttttttgaaaggatcaacaaaatagatagaccgctagcaagactaataaagaaaaaaagagagaagaatcaaatagatgcaataaaaaatgataaaggggatatcaccactgatcccacagaaatacaaactaccatcagagaatactacaaacacctctacgcaaataaactagaaaatctagaagaaatggataaattccttgacacatacactctcccaagactaaaccaggaagaagttgaatctctgaatagaccaataacaggatctgaaattgtggcaataatcaatagcttaccaaccaaaaagagtccaggaccagatggattcacagccgaattctaccagaggtacaaggaggaactggtaccattccttctgaaactattccaatcaatagaaaaagaaggaatcctccctaactcattttatgaggccagcatcattctgataccaaagccaggcagagacacaacaaaaaaagagaattttagaccaatatccttgatgaacattgatgcaaaaatcctccataaaatactggcaaaacgaatccagcagcacatcaaaaagcttatccaccatgatcaagtgggcttcatccctgggatgcaaggctggttcaatatacgcaaatcaataaatgtaatccagcatataaacagagccaaagacaaaaaccacatgattatctcaatagatgcagaaaaggcgtttgacaaaattcaacaacccttcatgctaaaaactctcaataaattaggtattgatgggatgtatttcaacataataagagctatctatgacaaacccacagccaatatcatactgaatgggcaaaaactggaagcattccctttgaaaactggcacaagacagggatgccctctctcaccactcctattcaacatagtgttggaagttctggccagggcaattaggcaggagaaggaaataaagggtattcaattaggaaaagaggaagtcaagttgtccctgtttgcagacaacatgattgtatatctagaaaaccccattgtctcagcccaaaatctccttaagctgataagcaacttcagcaaagtctcaggatacaaaatcaatgtacaaaaatcacaagcattcttatacaccaacaacagacaaacagagagccaaatcatgagtgaactcccattcacaattgcttcaaagagaataaaatacctaggaatccaacttacaagggatgtgaagaacctattcaagaagaactacaaaccactgctcaaggaaataaaagaggatacaaacaaatggaagaacattccatgctcatgggtaggaagaatcaatatcgtgaaaatggccatactgcccgaggtcatttacagattcaatgtcatccccatcaagctaccaatgcctttcttcacagaattggaaaaaactactttaaagttcatatggaaccaaaaaagagcccgcatcaccaagtcaatcctaagccaaaagaacaaagctggagccatcatgctacctgacttcaaactatactacaaggctacagtaaccaaaacagcatggtactggtaccaaaacagagatatagaccaatggaacagaacagagccctcagaaataacgccgcatatctacaaccatctgatctttgacaaacctgagaaaaacaagcaatggggaaaggattccctatttaataaatggtgctgggaaaacctgctagccatatgtagaaagctgaaactggatcccttccttacatcttatacaaaactcaattcaagatggattaaagacttacatgttagacctaaaaccataaaaaccctagaagaaaacctaggcaataccattcaggacataggcatgggcaaggacttcatgtctaaaacaccaaaagcaatggcaacaaaagacagaattgacaaatgggatctaattaaactaaagagcttctgcacagcaaaagaaactaccatcagagtgaacaggcaacctacagaatgggagaaaattttcgcaacctactcatctgacaaagggctaatatccagaatctacaatgaactcaaacaaatttacaagaaaaaaacaaacaaccccatcaaaaagtgggcgaaggatatgaacagacacttctcaaaagaagacatttatgcagccaaaaaacacatgaaaaaatgctcatcatcattggccatcagagaaatgcaaatcaaaaccacaatgagataccatctcacaccagttagaatggcaatcattaaaaagtcaggaaacaacaggtgctagagaggatgtggagaaataggaacacttttacactgttggtgggactgtaaactagttcaaccattgtggaagtcagtgtggcgattcctcagggatctagaactagaaataccatttgacccagccatcccattactgggtatatacccaaaggactataaatcatgctgctataaagacacatgcacatgtatatttattgtggcactattcacaatagcaaagacttggaaccaagccaaatgtccaacaatgatagactggattaagaaaatgtggcacatatacaccatggaatactatgcagccataaaaaatgatgagttcatgtcctttgtagggacatggatgaaattggaaatcatcattctcagtaaactatcgcaagaacaaaaaaccaaacaccgcatattctcactcataggtgggaattgaacaatgagatcacatggacacaggaagaggaacatcacactctggggactgttgtggggtggggggaggggggagggatagcattgggagatacacctaatgctagatgatgagttagtgggtgcagcacaccagcatggcacatgtatacatatgtaactaacctgcacaatgtgcacatgtaccctaaaacttaaagcataataataaaagaaaaaaataaaaataaaaaataaaaaaataaagtaattaccaggccaggcacggtggttcaggcctgagatcccagcactttgggaggccaaggtgggtgcattgcttgagcccaggcgtttgagaccagcctgggcaatatagtgagaccccaactctacaaaaataaacaaataaataaaactagccaggcctggtggcacacacctgtagtcccagctacttgggaggctgaagcaggaggatcattcaagcctgggaggtgggggttgcagtgagccaagactgcaccactgcacttcagcctgggcaacagagcaagaccctatctaaataaatgaatgaatgaataaataaatgaataaagtaattgccaaatgaaaaagaaaatgagaggattttacatgaacatgaagattttctgaattcccttgagcacacaggatgggacaacgtgaccacagtggatgtccattcagtcacgaccgtaattagcaaggaccctggagcagctacccctgtagccaggacaagcctgtccccagggagcggagtccacccgcattctccccagtgccttgcttctgacctccagctgcgcctgcgttctgttaccggcctggccatgacaggtttgagtttgtgacactggccatcaatgtctcccccaggtggcagccaccaaagaggccacaatgctcttcagtctccactaaagttcacaggtgggcagacatcgccatcccaatccccaccacggcccgagtctccagactcctttactaaaatagaaataggatgttccttatccactggccacatgctgtagttctcctctctctaagatgctcatgtataaactgcttatatttggcacttgctgatgcttgatttaatatgtgtatttttgcaaagttaagagacgatgcgttgattgttaacatctgtcttccgactctccttgtcttctacctgaaagcaattcaggtgtgaaaggcgggcaggctggagcaattctgattaggttcggccaatctagatggaaatagccccatttggttgaagtccaactgcagctgataaacaacctaatagccattcacgtccagccaccctccatgattccatttctactcctcttaaagcaatttgtgctatctgagatggcgccctggcttagtattcagcatcataggaggacgtttacttaagggtgctggtgaaaactgaacaatgagttccaaagcagcagcaagtcttgggaatttgcatgagaaaaccacaagaaatgtaattatttttgctagcaaaactcagagtagggttgtcttcttatttaataccatgtcattacaaattatagaactcaatttaggaaacggtgatttagattctaagctgaaaggagctagttgcacaccgaacattattgttcatgataaaagaaatttaaattacacaaatatcatggagcacagcttaatcacacacgtcaacaccattctctctcatcgtctctaacgaatgagccctatcctttattcaagtcatgagaagagcagaagtcaatattattagatcgagaatctagatgcagaataaaattggggactccacattgtcataactcacatattaaaagaaaaacactctcgggttggttcagaaaacaaactctttgtgaaactgggacagaataaaaataaagacgggtacagggatattcaggaagcaggggttgctacagtaatatcagaaaaacttaaattcaagatcaaaataaacgaagaccaaggaagtcacgttatgaatgtgaaggataaagtgtacaaggaagatacagtgaatatcaccttgtcaggatttccttgaagagcattgaaacgtataaagcaacagctgataagaataggaaaaggagaaattggccagaacacaagagaagttctgagtattttcaaacctgaaaccaagaaaccaagaaaaagtccagatatttaacaaactcctttcagctctgataggtcataggaaggaagaacagaatgaacaaaggcgggaaggaaggaagccatagagaacatgaataaaataagcaataaagttgagtgaatactttttttttttacaaagaacacaaagatattagagaatatgtttttcagtgtccaaaaacatttagaaaaattgaccacaagaaacatcaataaatctctgaagtaaaactaggatagaataaacttttggactgcaatgtggtaatgttattttaaaagaataaggaaataatagcaataagccaaccacttaaagtttatgaatgtggccgggcgcagtggctcacgcctgtaatcccagcactctgggagggcaaggcgggtggatcacctgaggtcaggtgttcgagaccagcctggccaacgtggtgaaacctcgtctctactaaaaacacaaaaattagccaggcatggtggcgggcacctgtagtcccagatattcgggaggctgaggcaggagaatcgcttgaacccaggaggcagaggttgcagtgagctgagatcatgccactgcactccagcctgggcgacagagcgagactccatatcaaaaaaaaaaaaaaaaatttttttttgaacgctctgagcaaaccttgggtccaggtggaaaccaaaactggaatgcaggttggggataaatcactccaaggggaaggaacacgggagccgggatggacaccctggggtgccagctgggagagtcagtgcgtgaggggtttctgagacgactgtctgggctggaaggtaacctcctgccgcttcctgcatgaagaaatggggcagctttgcgctaagatttagcttctaagtgaacacatcctcaacattatcaagtcctttgtttttgtgaattttctgaccttactctagctcatttgtaaagtgaatttgaaattctaggaaaatggaagctgatgtacatgtttgtttttttaaaacagagagttctttaaaaagtctaataataaaaaataataagcctccagttagcctaatctaggaaatatgagcagaaaatatacatgatgaaaagtagcaatgagagagggtaaataaacacagatgctcagaaaatttcaggacttatcataaaaaaccctgtgttaataaatttgaaaatctggagaaaagaaatatttctaggaaactgtagaacacaaaaatgcactctggaaaagacatgactaaaatggaaagtaaatgtctaacaaattgtaacaagctatcaaggagtcctcgctatggaaaagcacgtataattaggaggaggaggagaaagggaaatctctagccagccaaagggagaagcaattttcccagcgtaatctaccaaaaacccacagcaacacacaaacattaagttggcggtgccgtatcactagcatttttattaagaacaaaagcagaatatctctaacgccagcactcagcattggaagttatagcgaagacaagaaacccataaaaaataaatgagcaacgtatgaatttggaagattaaaaaaatcattattttcagatgaaatgattgtccatatattttttttaaaatgcaagatactccactgacaagtctgaaatagtttttccttattttaaaaaaatctaaagaaaaaaatcacaaaatgttaacatttattcattttggatggtcagtaaatgagggacggctacattgtttttggtagtatgtgtgtgtaacatttaccaaaaaaaggtaatgaggatgggaaatgaggccctggtggtcctgcatataaattaattcacatattcaagaaaaatatatacatacacacacacacacacacacacccccccacactctttaacctgtgccttaccatacagaaagtagagcggcccccaaaataccagtgcaaagatgtgcaaaagaaataaaagttaaaaaaatctaagtaagtttcagcagtatcttgactgagtggtatcattccaggaataacaaaacattcaaacaagtattaatttatctttcaacgcgttaataggttgaagaaaaaacataatcttgaacaatgtccaaaaaatcgagttgaggaaaatcaaaattattcctaactaaaaattaagccccaagcaaaatacaagacataggtatttgtcaagaggaaataaattcattgatattgggcactgatggtattgcgtgtctagaacattcaaagtaacaggaaagttatggaaaataagatcattcaacaagggcgtcaacacaactaaaataaaagcaagaacgtgtttatctaaaaccataaccagttataaatgtaaggacagaaagattccattttaatattcaataaaaatacaatatcaatgaacggatttaacaagaaatttgtcatatctttttaagacaatgtttagaactcaccgaagaacataaaatgtttggggaaaatgacctggatttatgtaaaaatgtacaatattataaagatatcaattctctcctaaggcaatctgtatgcccaacacttagtgagtgtcagggatggggtggggtgggctcggtcctgcctccctccttgttctacctccttggaggctcacacccagcagacttcatcctgcttctgcctccagcccctccctccatccctcactacccaatgcttgaagtcctggcttccagtgatccggatactccgggaccacattctcagggacctcaagcaagaggactctccaactcatggctctcagttccttcaccccatctttatcatttggggatgcagaattgggactccaagaaggctcctgaccaaatcccagggcctgtgcgtacaaagatgccacctctgtgagtgtgcgaccttacctggcaagatggacttcgcaaatatgaagaaagttaccgaagagctgaacttaaaatagggcgatcctccaggtttatcctgtggacccgatgctgtcacatgagccaggagaagacgccagacagatacggggagcagggctcagcatgctggatttgaagatggaggggaccccaggagaaggaatgtgggtgacttttaggagcagaaagccaccccagctgatggccagccagagcactgggacctcagtcccccaactccaagacacgggattcttccgcagcttcagtgagcctggaagccagctctcctccagagcccacagctcagagcccacccacctgacacatatatttcaacctcgtgagatgctgagcagagacccagctgagcccacctggacgtctgccctacagaactggagttaataagcaccagctgttccaagctgctaccttggtggtgatttgttacacaacaatagaaaactaagacaccttcactttcacagttacattctgagaatgcaccattacacaatcctacaacccaaatgcgcacattcccataacgtgtcatcaccatcagctccagtcccaacctttctccctcttctatttatctctttctcttcccccttaaccgacctctctctgtgtgtctctgacagtggtgttttcaccaaagaagactctgctatcactgacaccacgtgtaacatcatgtttgaaaccgttcatttgcttaaatttgccaggatgggttatctcgtggacatctaaaaacccaacacaatcatcttctagtgttatgcaacctttaaaaactcattttccctttaatactctgccattgttccatcatctttggcaaacttctctaagaatcgtctccagaagctgtctccatttcctcgttagtcttcaaaactttccaatctggctctgtctccaccacatcattgaaagtattcacctgtgtctcccagtcaaacggacagtgtctatcttctcttgaccgctcaacagcatttgacaccattgcttcttttcgttgtattgatacgtgcctctctcttgaaatctataatgccacaaattcttggcttttcttttactccacagatcactgcttcccaatctcttttcctgggccgtttgtgtgatccaaccaagatgtggccccccttaacctctccatactgtctccctaagagttcttccattctttcactcttaaaaccatctacaagttgtcacctctcaaatgtgtgtccctaagcctgacaattctgctaaaccccagatttgtaaattcagtgcctagtagacatacccatttgcatgtcacagaagtttctgaaatgaccacaacaaatcttatgcatttatcccgactcctgcgccttccacttctttccgtctcggcgcagaacaccatcacagcaacgtctgctcaaagcagaaatagttgagtcattcttgatttcctcctttctcccactttttcattcaatccatctgtaaatcttattaatttcacctgctaaatatctctggaatctgtccaactgtgtctaaatccacagtggtcactctagtccacgctgtcctcatcttgttggtggacgttgctaaaatgcgtcactggtttcctcacatactcccgacctctgccaaacacacacttcacaactgtcagtgagaacttgaaacaaacataaataagaccatccaatttccctgcttaacacccttcattggcttcccattttcctgtgaataaaatctaatgtattcctgcaaataaaatagaaggcaggcagtaatggatgccagtgaggatgtgaagaaagatacactgttggtgggaacgtaaagtagtcagtccagccactctggtaaatctgccctcccacattcactgcagccaactcacaataggcgaaatatggaatcaacttaagtgcccagtgaaggatggacggatacagaaaatgtgatatatatatatatatatattttcaggactatttcagacattgggcaatgtccaaaaaatcgagttgaggaaaatcaaaattattcctaactaaaaattaagccccaagcaaaatacaagacataggtatttgtcaagaggaaataaattcattgatattgggcactgatggtattgcgtgcctagaaaattcaaagtaacaggaaagttatggaaaataagatcattcaacaagggcgtcaacacaactaaaataaaagcaagaacgtgtttatctaaaaccataaccagttataaatgcaaagacagaaagattccattttaatattcaataaaaatacaataccaatgaacagatttaacaagaaatttgtcatatcttttaaagaaaatgtttagacctcactgaggtctgatggaatgatggaattccatcatttgcagcaacatggacggaactggtccctatgttaagtgaaataagccaaccacagacatacaaacactgcatgttctcgctcatatgtgggagctaaaagagtggatgtcacggagctagagagtaggttggattggcagttaccagaggccaggaaggggtgagaaactgaggagaaaaaagaatgaaactggtatcaccactgaactgtacacttaaaaatagtaaagacagtaagttatataggcatatttcacctcaattttttaaaaactaacgccaggtgcggtggctcacgcctgtcatcccaaaactttgggaggccaaggcaggcaggtcatccgaggtgggagtttgagaccagcctgaccaacatgtagaaaccctgtctctactaaaaatacaaaaaatttacctgggcttggtggtgagcacctgtaatcccagctacttgggaggctgaggcaggagaatcgcttgaacccgggagacagaggttgcagtgagccgagatcacgccactgcactccagcctgggcaacaagagcgaaactccctctcaaaaaaaaaaaaaaaaaaaactaaataaaaaacatctgaagttcctgatgtaggggtcctatgagtttgtattgaactcagctaggcttcttccaagccttcctttgagctgtcaaccgctctactaactgagctctaaccactctgagctccttttaggtcctctaacccactgagcttttcctcctcccaggactgttgcccagttctcaacatctaagatgcctttctcctgctatccatttaattgctaccttcttatccttcatgattcagcttaaacgttgccttcacaggggctgttccagacaaacctagcataagcccccacatgccacattctccatcaaattatatcctcattcccttccatttgtaattacttttttatctgtttgtaaatctgtggtcaatctccctcatgagcttaagagctccctgagattggagccttttcctggaacgtattagatgcttaatgaatatttgtcgtaacaatattttaagatgtattcaaggattttaattgcgctaagtaattagcctacgggcatttgttaagtcaaggttagtatatacatgtgatggattcatacgcagctattaagagagtaatttagctcttagttctaccacaaaaaaaaatccacagaaaaaaatccagaatgcattgttgagtgaaaatagcaggtttcaaaatagtgtacatgtgactcttccaggcatcgcttgagagactcattaagcaacataataaataagtaattccctgccacttctcacagtggtacatagaatagaatgtagaatgtagctagaattgcacgtgtgcagaaatcacaaccgaacccaagcctacagctattctgggggggtgactgtctcaccgttccaggagccacccccaccctgcaggggcccgactgcatttctagaacaccatctagccgatattttaaatcagaccattgcaagcacatcttttcaattagatgcacgtgcaacagatgtcaaggacttaatttttctttattacaggatgtgtttatgtgtgcgggggatctgtgttgctgtctgaatgctcccccggttacaaaaattagttttattttctccaagtgatgagatttcaagtattatttattttctgctttcggcttgtctacattgttggaattttctacaattactttgtattttttaataactagaaatggaagctattttcctttggaaatatggacaaatgtcacgactgaatactcgtatgaattcaatgtaagtgaaggaaggcttagttcttcatctgaatccagatagcccgggaaacctttaattggcaactgcaagccagatgactgacggcctgtggttgtgttttgtttttcctcccttccttgcccatgttgtgtggaacacgctggtgacccagttcacctgcaggacagctgttccgctcatggtgtgcacttgcctgtcatttaatccaaacaataaacctgccatgcaggcaagtagagtcggggtgtaaaaaaaattttcctagttccagttcaacacttcaaaaatatatttgctaggggccgtgttcatcttttttgagaatgtagaaaatgatgtcagtcagaatgcaaatatttgtataaaatatttgtataaaaacttcaacatcttctgattatcatttattacaatgtgttaaaagagctgtcatttatacacaataaattctggtgaagtggaaccgggaggagtatgagatccactttggacagaacagctgggtgacttcctccgtatgcgagatcaccatcgccccgcttctgaaaaactctgggcctatttattgcaaaaggcctgcacaactgcctatccagcttataccacagaaagactaagtattcataacaggaaaacaggagtaaaataaaacacacagagacagaaaagtcaaaataaaacagcagcaatttccatctttgagcatatacaagagagacacaaatgatgaaaaccataattacgagatgaaatggaagaaagatctattttgtaatcacaagtcttcccgagtcttggggaaaaggttcatttctaagacgtgtgtcacggacttattgtgaattcaccctgacaccatttattccatagcttatgtttcttcactgatatgaggactttgattacagcatttgctaaaacgaacgcagatgatgttctcatgcgtgaatgaatatttctaaaataccgagatagtttcatcaaagacaagaattctggaatttaatcacaaacaggaacataaatagataccatattttcctattcaaataatgagtcagctcttattatagtcatctaattttatcaagaatagcacttggctaattagacaggagtcagtttaataactagctggcatttataagaatagaaatgggttctatgaaaaattgtttacgactgcaaaagaatggtgaaagctggtataatgcatgaaatcggagcaatgataagttaatgagcaatatgcaatggctgcagtcaaagttcctggcagtccaatccccactgcaccttaatatatgcaagcattcatgcacttagtgtgtatttgttgaaggcctgctcagcgtcagacacagtgggcttttccgtagctgtgcagatgatgtctttctgcaaggaccaaggaactgagcatttgaccaggtccacagagttctgctagtcagccttcaccgtgaacacacagaaccagacgccgtaacaagaagttcacacacttagtttctgcaatggagagcatggagaaataaagtctgactctggggcaccaaccgctcgctctctctccccacttctccaggatctgttggtaaaacctcaggtctcactccttccattttcagtctgagaacccaaagccacattttagcaagctgggagaatggaaagaatcacatcataaagataagatggtgtgtgtgtgtgtgtgtagtatggggtgtgcctctgtgtaatgtggggtgtgtctgtaatatggggtgtgtggggggtatgtgtggggggtgtgtatgtgtgtgtatctgtgtgtatgtgccttggggtgtgtgtggtgtaaggtgtgtgtgtggtgtggggtatgtgtgtctgtgtgtatctgtgtgtctgtggtttgggggtgtgtgggggggtctgtgtgtgtatctgtgtgtatgtggtttggggtgtgtgtgtatgtggtgtgaggtgtatgtgtgtgtgtgtggtgtgggggtttgtgtgtgcctatgtgtgtgtagctgtgtatatgtggtttggagtgtgtgtgtgtggtgtgaggtgtatgtgtgtatatgtgtgtgtggtgtgtgtgtggtgtaagtgtgtgtgtctatgtgcatctctatgtggtgtggggtgtgtgtgtggtgtgagatgtatgtgtgtgtatgtcaggtgtgtgtggtgtggggtgtgtgcgtttctatgtatgtgtatctgtatgtggtttgggttgtgcatgtgtgtgtgtggtataaggtgtatgtgtgtgtgtatgtgtgtgtggtgtgggggctgtgtgtgcctatgagtgtgtatctgtgtgtatgtggtttggggtgtgtctgtgtagtgtgaggtgtatgtgtgtatatgtgtgtgtgcggtgtggggtgtgtgtgatgtgtgtgtgtctatgtctgtgtatctatgtgtatctgctttggggtgtgtgtggtgtatgtgtgtgtatgtgtgtgaggtgtgtgtgatgtcgggggtgtgtgtggggttttaagtgtgtatgtgtgtggtgggggggtgtgtgtctatgtgtgtatctgtgtgtatgtggttttgggtgtgtgtgtggtgtgtgtatgtgtgtatgtgcgcatctgtgtgtatgtggtttgggtgcatatatgtgtgtggtgaggtgtatgtgtgtatgtgtatgtgtgtggagtgtgtttgtgtgtgtgtatatgtgtgtgtgtggtgtagggggtgtgtttatgtaaatactttctttcaagacagcaagttgcctttcatttaacggccgtatcagtgggtgtatgcacctgcacacacagactgtggctgaattagtgccacttaaagtagaacgtgccgggggtggtagctcacacctgtaatcccagcactttggaaggccaaggtggatggatcacttgagcccaggagttggagatcagcctgggcaacatagcgagaccctgtctctacaaaacatacaaaaactagctgggcgtggtggcctgcacctgtagccccagctactcaggaggctgaggtgggaggattgcttgaacccaggaggtcgaggctgcagtgagctaggattgcaccactgtactccagactgggtgacagagtgagactctgtctcgaaaaaaaaaagacaagaaaaaaaaatgtcccatctctcttttcctcctctgctaaatgcacacaactgctgtcttgcgggagacagcctagaaaaggaacgaaaacataggttcatgctgccccacatgagaacacgcgcttagagtggaaattccataaagatagtgaaatttgttcatcccttctacctaccccacagtgccaagcactgcactttgatcatggcatttgatgaatggattcatgagaggatcaaaaggagctacaaaggagaattggcatctggtttccccatcaattgtgatatttataataattgaataaataagatatactaaaatatcgtaataccatatacgatttactttagctgctaggtcggggagtcgctatctcttcagatctccgtgcaagcaagcccccagttccaccagggatggaggtacaactccacacgccccaggttcttcctgcggcattcagcacaaaacttgcttgtgtagactctatttgctgtgcagactctggagtctgcggaccctgaccttgagtcacacttttgcctcttcatgcatcatttcctcctcttatgaaacggggatgaaattagccctcatcgctaacggtatgtgtggcatgctctgcagtgcctggcacgtagttagtgctaagtgttagttgctgctggtactgctgttcgtgttattattcctagtaccagcactatggcctgctactattattaacataatcatcaatattatttaaacatgttttcctcctattctaggcaggtctttcaccggattcaaccagaaagaaaagtgctgctgctacccaaagtgctcatgagtgggagacgcagtgtcctggagctgaggctggagcaggggacagaattccaagaccgcacgtgcaccgtggacatgactgctctcaagacgtttgttcatggcagctgaggtttctctcagcccttcctccatgaaaagctcagcacctcctcctcccctggttcctctcacctggcactcttttttgtctgaagctaaagcaagctccttaccttccgcatggaagttctccatctctgcaaccttggccatagcagagaccaagtccctcaagcagcctgaatccttttcaggagttcttttgaaagaccatcttgcctcccttaggaatttaggggccagttgttgcaaagatggtgctcttaacccactcaatgtctttgcaaggcccctctccacccattattccatttgcacgtcccaacaaccctgtgtgacaatgggggccatcagtgctcttttgcaggtaaagtaacagagactcagagaatctacgtggttattcgagtctggcagagctacggcacaagcccaggtcttctgatgcacactcagcgtgcgcatcccctctggagcagttaaccatacattataaatatctcaagcacagatgcagacacaaggttatttgagtggagtgttcctaatcagaggtataccagaaactcatttaattcaaaatatatttacttatgttttcatgcccaaaactttcagcagccttttggaagcatcagctgaaaatatatgggatgaacggttccatcatgaaggagctcatatttcaggtgtaaagaaatgatttatatgcatgcaaaagctagaggaaaaggcaaaattgaacaaactgttcctcaaattttattttattatttgtttttggagataggattttgctatgttgcccaggctggcctcaaactcgtgggctcaagccatcctcctgccttggcctcccacgtagctgggactgcaagtgtgcaccaacacgcctggctgcccccagattttaattaaaaattccaaagggatgcaagaaaggctcaaaccaagtgctgatgaatctgacaagtagcaaagattatatgtcagcctctctggcctgcttctcaaccacctctcttcattttcttctccctcctcctttctcctatataaacccattttaacaatggatctgaaattagccattttaaagcaacattctctgattccaattctgattttctatattccagagtgaaaacattccatgatcaaaaatgcttaagaaatagggggttcgagaaattaagacagattctctcaccgcaggacttagattatttgacacaatggtgtgtattgtgtgttcgcatttgtcaagcatctttgggcacagagaacttaatttcctggagaattccacggtgttggtgtcctctgaaacgcacgtcagatgctccccacagctggagaatgactaaaggactccaaaaggttggccttctggggggtttgaattttaacaggtggcaaagctgtcagatggaatcttcgtcctcagaaaacaggccaatggaactactttgaaggcaccagaagtcagtctgccagcccataatttcagggtctgcacatcggttgcctggaaaggaagccacgtaaggatttcccacagggaaagctggactacaggcaggcctcaaaaacccattcgatctgaagaaatatggaaacactggaacagtatttctggcagaggcaaaagtgccaatcaaaacgtgcagcggaactcacagagcccattttggacagtgccactcacccttcaacacacaggtgcatcacctgggatcttcttaaaatgcagcctgtgactctgcccgtctgtgggctgggggaaaagggcaagaacttgcatttcttgccaacttccaggagatgtgatactggtcactggaccacccctgggatttagggagtcatgaagcctgctggtctttcgaagtggggagcaggagtgctgctcttaagtggccaagaccacaggtttcctttgttgaagaaatattttttgatctcctgctgtatgctgggcaccatgctaggtgctgaggatataatagtgcaaaagacagacgtgatctttgtactcatggagcaaattcactggggggtgacaggaaataaatacatcagagagacaatctgagacacacgctggaggatcaaagacaaaaacaaaaccaagagacgggaaagaggacaggagtggaagagtcagccatggagagggtgaccaggggcaccgtctctgaggatggggcactgagcagggctggaggggagaagggctgagtggctagaggagctgagagacctgccggggtcctgaagaccaccctcaggttggctgtctcactggaggactcacaggactcagcatatggttgcacaaacagctgggacttattacaacagaaggtcagaccacaaaaccagcaaaggaccagggtaacacaggtggaagtcagggcaagccaggctcaagctcccaagggtccctccccagggagtcacacaggacgcacttaacttcttcagcactgagctctgacaacacctacagtgtcccctaccatggaagcttgtcagaggctcagcatccggagttgttgatatggtttgtgtatcagtccattctcaagctgctatgaagaaatacccgagactggataacttataatgaggtttaattgactcacagttccacacggctgccaagcctcaggaaacctacaagcgtggcggaaggcaccttctcacagggcggcaggagacagaatgagtgccgagcgaagggggaagtcccttataaaaccatcagatcttgtgagaactcaccatgacgagcatggggaaaatcacccccatgattcaattatctccacctggtcttgcccttgacatttggggattattgtaattcaagatatgattttcaggagacagagattcacactgacatggtttggctctgcgttcccacttggatctcatgttcatttgtcacccccaatgttggggatgggacctggtgagaagtggatcatggggcagatttctcatgaatggtttagtaccatccacttagaactgtcctcgaggtagtgagtgagtcatcgtgagatctggttgtttaaaagtatgtggcacctcgcacatctctttcttgttcttgctttcaccatgtgatgtgcctactcctccttttccttctaccatgattggaagcttcctgaggcctccccagaagcagaaactgccatgcttcctgtacaacctgcagaactgtgagccaaataaacctcttttctttataaattacctagtctcgactatttctttatagcaatggaagaatggcctaacacagttgtttttgggggctggtcatgtggacatttctccccagcatatgctgaaattccagactcctagaagaaaagcaggtgtcctgcataagccatattttttatacaaagagtttaggcgcagtacgcccctttcatcagttagggaatggtgggagtcctcctaaaatccacatttccgtggaccagccaagggccagccttgccagcagcctttgtaaggagagcgggctcaggcctgtgatgcaaactcttttatgcacattggcctttcagccatgatgctccttctgtgcaagggcccagggaagcaaaagcaggctggtcaggaacacagaggcaggtcagtgtgtttagaattcagctgtaggaagaatcgtggagaggaaggaggtagaggtggaagtgagaacaaatttgcggctctatcacttgctagctatgtcacatttaacttctccaaacctcagtttgttaatatgtaaaatgggaacaatacctatcttatagggcttaatataaggtataaagcagagtgcccagatatttgttaaaacataatatggtgtctcttattattggttttaaattgggggcctgatttaatctcattcccgttaaaataactaacatgaatagaggccttagcatgagccaggcgttgatgtaggaaagtgcttctcatcggtgaagtcatcccatcctatgacagccctgtgagggacagacactctaccgtgggccagtttacaggtgagacagctgaggcacagagcgcggtgtccaaggtcacacagctatggagggctgcgcaagaattcgaacccaggaagcccaccaaagcatacaagaaaccagctggattacaaaatttcagttcataaggtaaagttttgaagcagttttaatcttcttccagtaacggctctcaactttattccatcaaatctctttctactacatagcaggctccatcatcaacatttcaggcaactccataatttttcaggtactttttgagttttgaaaaatgtttattatggctaggaagactcagtcctgttcaaccatattttaagctatcagcttctaaccaatattagattgtgttaccgactcaatgcttgtgccctcccccgcccccagaattcctatgttgaagccctcgccccaagtatgacggattcaggaggtgaagcacttaggaggtgatgaggcttagatgaggtcacaacggtgggggcccccgggatgggactagttcccttataagaagggaaagaaacatcagagcttcctttatccaccatgcaagggcacagcaagaaggtgtccatctgcaagacagggacagagccctcaccagaaactgaatctgcaggcaccttgatctgggacttgcagccttcagaccatgagaaataaatgtctgttgtttgagccacccagtctgtggcacctgttccaccatctgagctgacacttacagattagccatttgaaggtccggatgggtaagaggatcctgctgtctcatcaccctcccactatctggcaagtatttcttctgttgctgaggtagagagcaggcgagagagctctttttccttaagggatggcccctggataactggttgtttgctattgatctttaacaactgttccctatttgctcacttcgttcctttaacacagatgggcagtcttttttttttttttttccctgagatggagtctcactctgtcacccaggctggagtacagtggcatgatctcagctcactgcaacctccacctccccggttcaagctattctcccgtctcggcctcccaagtagctgggattacaggcacaggccacccgggtaatttttgtattttttttttttttagtagagatggggttttgccatgttggccaggctggtcttgaactcctgacctcaggtcatctgcccgccttggcccccccaaactgctgggattacaggcgtgagccactgcgcccggcccagtcactttcttccgtgtctccctgggtgggcgactgcttcaggctcaagctcctctcccgtcctccagctgggcagtgcactctgctgcctccaccgctgctatccctcatttactcatcaatttatctgctaatagggttactggcgagaggcttgagctccaaccaccttccataatgtcctcttgacccatcggtgacgccagcctcccctgccatgccctggggacacaaggccctccacctgcactctcccaagcccagtgtctcttctctgccccttgctgcatctggagccactgtgtgtgctgctgggtgggtggagtcatcactttcagacaattacccaggaggggctgcatggtatggggtggactgtgccctcgggacgcccactgtggctgccatccaggctgcacacaaacattccttccaggcccacactttaaagcgaggggtataaccaggtgcagtggctcacgcctctgattccagcactttgggaggatgaggcaggaggatcacttgagcccaggagttcaagaccagcctggccaacacagcaagaccctatctctacaaaaaaattaaaaaattagctggcatggtggcgcatgcctataattccagctattcatgaggctgaggcaggagaatcatgagctcagggggcagaggctgcagtgagctgtgattgcttactgcactctagtctgggcaacagagcaagacccagtctctaaaaaaatcaagttaataaaataaaaagtattaagtcagtagtggtcctgagacttgctgcatccctgaactgtgcagaagggccacatgtcactttcaggtgacaacttcaagggccgcacgtgtctccactgtgaccacgggagcaggggccaggatacagcctccatcggcttgagtccctgagtgaccctcctaagaggggcccatcctgctgaccagagctgagcacacagcgtgggtgagaagtacatcttctttgggttaaaccgcctagaggtgtcgtagggttttgtttgatacagcatgacatagctgatttcttgacagaaaagagacagggagaaacagcccacactgcaaatgacaagttcccttgagtcagcctttcaccgtgcctgtcgttcctcatgtctctagaggtaaatgcactgaatgagtgcagcccgccttgctcctgggacacaagagtcttttatcaagaagaaaaagatcttctttgaactcaactttgtactcatgaagtgctggaatccttccgctgtgataacgacccggtcaggaaaatcatcccaatgccccacagcggaaggctatttacctaaagaatttcaaaagccaacagacagggattggactggattttgtaggtatggacacattccagcctggtaaccaggtacgaatggactagcagggtcagaggcctgagacagcaagatccatccgaggactgggtgaaatgcaggtgtggggagaagcttcgctggtcaaccagcaacaaggatggagaaaaaaagtacaaaaggaaaaaaaatcaaaactctgctttgacctagttgtgaaagaaaaatagagtgaaaagcagtttgatgatgtcttttctcagaagctgactaaataagtcttgtcttgaactgaaatgcaaaaataaaaaggggctgtgctaataactattctaaaaattacaccataatgaaatatgcaaaatactaaattatgaattgattttagtgatcattatttggtggttcagaaggcaatttaacatctcataacaatcactcttaataatagcaattaataattaagcgcgtctctatatttgatcttctgctaagctctccccaggcttgaccttttaaattcttaaggctgtcttatgcaatgagtgctatgattattcccattttgcagatgaagacactgaggcttgaagaaactaagtaatttgcccaacagcacccagttaacaaagggtcctctccagtttctaagccccaaattcatggtcacacccccaggcagaactctggagcactggctaaaaactgtaagcagctgaaccaaaacaggctttcttctcccttccatggtcctcatataagcaaggagtagaatttgcaaaatactaatgggtattttgcaactttttaactattttacttctatggctgattagactgagtccacagtaatttctgtccttcctcattagtggttgctggaacccacgttctgagcctgcggtgtttcctgctgtggcagttcactaaattaaatttcaaaacattccttgccatagacccagacatccttaacaaacaaattccagcaagtctcaagtgtaaaaaggtgtctgaggaagttcttgtttgtcactggaagttaatctttagccccctcacctcagttaagtgcattccgagctaacagatgcaaagtgcttggaattatgtttttaatgtgagtatggaaactgagaaagcacagccattaaaaaataaaatatgtataagctgcctgctacagccactaagtgataaaaccataatcttcctaaagaaatgggccacatgtttgtttatattaatgttaataacttgctaagtaatgataaatgtatgataatttattctaagtaaaatgaagtgtgccctaaagacagactctgtaaatgaaagcttatgctcacccagtttagaggaggaacattaataacttattcttttactgcaatgagaatgattgtatgcaaatcatatgcaaagatacccacagtagcaaaataaaggctaagcagggggcctgggacagagaattattggcagaggttctgtgaaatgatctctcaccctctttgcaatggctcaggaattcatctcaccgagccagagaattttccttagcttgttctttgggcatatttaagattcaggattattagtctttgcttctccattacataaatagaattaataaaagccgcctaatgttatattgcatacatttagaaatcattaagccaaacaatctttgtgaatttagaaattatgtaagtattatctttataaataatgttaacaattctgatttatccatgtagataaaccccaaatatctattagcattcacagcagtcttccttcccctcccaatatcacaaccattacctattacgttggtacaatatgagcactcaaattaaattcatgttattatttgtgggagatatggttggttggctactcaaaaacattttatcctccctgtgggctaatgagaagtaaggaagaagagaagaaagggaagaaagggaaggaaggaaaggaaagaagggaggaaggaagggagggagggagggagaaggaagggaggaaaggagggagggaggaaaggagggagggagggaggaaaggagggagggagggaggaagaaaaggagggagggagggagggaggaaaggaagggagaaaaaagggagggagaagagaaggatgaaaggtatcctctagaggaaaaaattattccaagagagaaacaggcaaaattatctatcccagagccatctgcaccttgcctgtgaaagaggtggaagggtataaagccatactgtcactatgaggaggtggccgagggaattaattgcaagaagccagtgtgaatctccaacaccactgtgcttctgaaccaaggatgctggcagctaccaacttctagacttctttttatgtgagacaaacaagcccaaagatggctaaggctctgttgattgaattttctgttacttgcagccagcagcattcctagctgatatgttattcctataacaaaccagtggcatcaaagcacaatgagaatcagaaaatgaaaaaaaagaaaaccagaatcatggttagaataatcgtggttattatagagttcagtggcttttctgaaatacgacggccacagggagaggcatcaccccagaaagggacatctccttcctcttcctcttcctcttcccgggaatttagggatgatggcaataagacttgtgaaatccaattccactactgagtacagcacaatttttccatgacaaatgtgcttttatgggattggcaaggtggagaagttggcacccaatgctcccctaaggaatgagactaaagcttgccaagcacaccaggtcacccaaactcagggcctccttgtctacagaggtcaatgtctgtcctgagccactcctgggacagtctccagacctggggtaacagctgagtcaccttagccccgtgttttcccttcctgcttctgccaggaaatgccaggactaagtctcaggtgcgaactgagatgaggctggaaagcttcactgcagagcacaggagatgggggagcttttgaagcatcaaccttgttcctgaaataagggtaggtgattctccacacttcatctgaaatcatccaaagccaagacagcaaaaaataagggtgtcttttctgagaaacccagagcttttaccatcaattagaacgactcacccaggtcagatcctggactgctgcaaccaactgaatcaaatctccagctaaaacctcaggttttaagtttgtttgtctcctttcaggttatatttcattacttacttgtgaaaaagaatctagagtgtgatctcactcagctccaagcctctcagatacagagtggcacagagctcaggctctgagctgtttccttagacacagtgcatttgcacccacacctgcatcctccaactgcaaattaaggctgatggcaatatctacttcattcagtcaatggaaggattgaagaaccgtatacatacatacacacatacacatacatacaaacatatgtgatacacacacatatccatcaatacatacacagccacatgagagagagaaagagagacgatagatgacaacatacacactcatatatcatccagaagagctgtgaaaggaaaatatcttgggccctcaaaatcactaaaagctaaaaggaaaattcatgctgagaactgcccaggacaaacctgcctctcattctattcaaagtcatccctctgctcattcagacagaggcatattctgattgcctccttcggaaaggcttagtagaaactcaaaaggatgcaagctttcctctctcacctacctgtaacctggaagccccctccctgcttccaatgtccctgcctttctgaatggaaccagtatccttcttccataaattgattgatgtctcctgtttccctaaaatgtataaaaccaagctgggccccaaccaccttgggcacaagttgtcaggactccctggggctgtgtcacaggcactcgtccttaactttgggagataaacctcccaaaatgattgggccttatctcgtcatttttctctacgtagaaagcactttataaaagttagttattattattacaacgattatttaaaaactcaaacctaagtgtttaactcaggagtttcaataattggtgatggaaaagtcaacgtagttgggtgttgagaagtgatttttctactgcatgctactcaaatttctaagtcacgagaattcaagtgttggagacaccccaggactctccgtctggctcccctcctccccttccctccctcctgggctcaggctaggagttggctccacccacaggcaggctctctctttccaagctccttctctccaggcttctagtttctagaagttccaccatgagtcctgaaattgaacctcattggcctgtttatttctgaccccctgggtcacataccctcctctggagccaggaactgggacccagcccactcaccagcacatcactgaaggggtgaagaaagctggtttcccaaaagggaactccagaccccgatacccacagaagagagaacagacgctgacatgggcactgacagatgaccctttcaaggctggagtcagggtagacagccattgtccctcccacacatgcacaccactgaatacgcaaatgcgattgcgtgtgtctgcttccatcacaaggcgcaatgatattttatatagagagactgtggtctttgatgccaagtgagtgtgggtttgagaggcgctctgaggcccgacagcttctgatcccggatggggattatgcggccggtgcctcggctggctcagccgtgaaaaataaaacagggtggattccaaacgagacgacacacgtgaatgctttagaccatgacctagcggttttctctattattctgtattctaaggaatgaatacgcagttataacaatgattagcctcctgcttctagtttcagtaggaaacagagctggattcagagccgacagacctcaccagctctcagctcttctactgaccagcagaaaaactgagcaagccattaaacccagggtgcgcatcttccagcctcccaacaacccccaggctgtttgtgcatgacctccaaataagcacacgttgaagcatttttttttcttttctttttctttctttctttttcttttttttttttgagactgagtcttgctctgttggcaggctggagtgcagtagcacgatctcagctcactgcaatctccacctcccgggttccagagatccccctgcctcagcctcccgagtagctgggacgacaggcacctgccaccatgcccggctcttttttttttttttttttttttttttgtattttagtagagacgaggtttcaccatgttggccaggctggtctcaatctccggacctcgtgatccgcccgtctcagcctcccaaagagctgggattacaggtgtcagccactgcacctggccgttttgtagcatttttaaagggttggaagaaggaacaggaggaagagatatagaataacggaaagaaaagaaggagaggaaaaagggggagggaaagaatgaaaaggaagaggaggaagagaagatgtaacagaggccacatgtgttttacaaattatatatatacataaaatatttttgtaaaaggatatatcataaatattatatattatattctataacatggtatataacatatcgaataggacatatatttactacgtagctctttacaaaaaagcttgcagaccctgcactaaaccatggagcctgtttgtttatgaaatggggagatgacatcctcgcagcttcccccataggtccactgggagcatcaaacaagatgatgcatatctgagtatttttgtggcttctgcagcactaggtccatcccagcatggccacctctgcctcctcccaggcctctgcccggcaggtgaagggctgaggtgcgcaggctcagagatagtcaggggacgctgcaggcatttgttccattccgcccgtcactgttgccacaaacccggccatgatctgagaggaaggctttctttatggagccgtcacttttctgaatcctgggggagtccttcaaaggcaccgtctccaataatcccactttcacctgtcagagagcttgttttgaattcagtttcaaccccttcaatccaagttccaccttgctaagaactagcaaactcatttaactctttctcgcaatccccctctactccctaccttagctggtcactctcagaaagtcaaccttgacctacgggttcttcacactgatgcctctcgcaaattacaaatgcctctggccgatgtccagactttgaccttgaagatgctcgtgcctgagtgcaggctgttctgtggtttagtgtgtgctccacacacaactctacttggctttcatagaccccgtagatatttttccagataaattgtcctcgcattgatgtgtgacccatgcaactgaattgtttttaatgcaggcctcaagtaagctacagtcggacacacacaaaggcaaaccttgttccctttctgcccttgtaattccttcctacaccattaaagaatatttctgggctgggtatggtggttcatgcctgtaatcccagcactttgggaggctgaggtgggcggatcatgtgagcctaggagtttgagaccagcctgggccatgtggtgaaaccccatccctacaaaaaaatgaaaaacaaaaacaaaaacaaaaacaaaaaacagccagctgtggtggtgtgcacctgtagtcccagctacttgggaggaggaggtgggaggatcgcttgagcccaggagttcgaggctgctgtgagctgtgatcacgccactgttctccagcctgggcaacagagcaagaccctatctcaaaaaaacaaaaaactcagaatatttgtttcatttcattcctgtttttaatgtgaatttgtgtttttctaagaataaagctgtacccatgtgaaattcacagcccattgccacaggcaccgtccccaatttcagctctagcttccactcctctgcccatgggcaaggcatttaacaagtcggtgtcagtctacaggaaactcctctcaagcaaatagcataactaggtctggggatctcggctgttgttcctaatgcctacatgcctaaaactattttttttttaattcaagcatgtcgcatatgagcagtacccaggattcctcactttcaaatgtgctctccacaagattctgacacccagcctggttgggggaatcactgagggggtgtcatctctgttcttcctccccaggaactttcggatcactgttcaaggactgaggcccatctgctccataagggattgtaaccgagtggcccagacttgaaacacattttacagtttttcctttcccttccttcttcatctcagaatgtagcctggaaatacactttaagacttcacttccctcctttccaccaggcactcggatgtgctattctccctcctccaagtatgcacttacttagaaattctaggggcttgttttgaaacaaaccagtcccgagacccagctgctgcttaaatggagttatggacaattagtccaccaccaccatcgggccagcatcaagataatggcaaccaaacctcaggacaggcaatttctcaagatagccattggaacagggcacatggacctacaccccgccccctccctcccataccactcctgcatatctcccatacagttttccttcctaaaccccctctctcagccctgaaagatgaatggtcttttgaggacatgagcctgaccatgcaccagctgctagcactggaataaagccgctttccttccaccactcctcgcttctgttctggtccctgggcagtgagcagcaggacctgagtcggtttcaggatgagcacgattcctgtgatgaaggcatcaggcggcagggctcacagtgcagacccacaaatggaaccccgtccacagagggctcaggccagcacagcgtcttaaaatcatctgaatctcaccattttgaagtggaaaccacatgctctattccccacaggctgcacattgggccgttttattcatcaggaacttggggcatggtggatggaacctatgagctttttggtatctgaacaagaactgataaagatggtaaatggatactatggagaattgaacagaagggagaggaacaaacagcaacgtgcccagatcttaggaaacacatgcttactgaatgaagcaggtaaaaaaggaagccaggatagagtgtaacatcagccgtatgcactaggacacatgcccacatggccatctgtctttattttacaaagacacgggatatttgaggctcaatagcaaaggcattaggatcggcacccatgggagatgagaaacagccctagtgcaaggagatgcaagaaaagtagaaaatacagcaaggaaagggctttgctggggttaatgacagtctgtcctcaaactgttaggttaactcaattttctgtccatgaggttttggggttttgaggggttcgtctttgtttttgttttgagataggatcttactttgtcacccaggctgaagtgcagtggcgtgatcttggctcactgaagcttcgacctcctaggttcaagcgatcctcctgcctcagcccctcaagtagctgggattacaaacaagcgccaccaggtccggctaattgttttatttttagtagagacaaggtttcaccatgttgtccaggctagtctcgaactcctgacctcaaatgatccacctgcctcggactcccaaagtgctgggattacaggcgtgagctaccacaccgagcctgtgcatgaggttttaaaaaatcatgcgcaaaaaagactgtaatatgaaaaattattatgttggttgtaaaatgctaaatccttgaaatgtatagtatagttgtgtgattaaacggggcagggacatctgtggcacacctaatactcacgcgccttcccatattttccccaatgccttgcagggatgagtccctgggaccagctatgctcctactcactctgagcagaaatgatccagccccttcattgctggagcacctcagagcttcagtctgaccctctaggggctctcttccccaccatgggaaggtgtggagccctcctgggccagatggtacaactcccagatgctcaagcttccatcagcctgttccctgagcagcaggactccactgtcttgtactaaacatataactgaaatgagaaatacaactctgttatgtcctgggatgtcccagtacccagcacatcctaatactcccagctcatgtaactgtgtcaatgcatcaattgccattgattggttatatatttacctgttagtcatgtttcatatggagtgtgagtgcatgtcacatgtttaatatgactgtgatggagcctctcaaaggaaggatggttagatcttacaatcctttaaaaatcctttaaaaagctctgtctgctccaactaccatttcacatctggcttaatcctccagtctaatgtgctccctgacctctgcagacatttggagctgagaccttgtgatctcagcatcctcttgagacaggagagagagagagttctccatcagctgagtctcagtatctctgcagtgtttcctatgatcagcagaattggtatttgttaactaaatgattctgataactaagtggattgcttgtgtctccaggaatgcagagtgtgtgtgtgtgtgtgtgtgcgcgcgtgtgtgtgtgtaccccgaatactgagagaatgtcatattacccaagtatatgctacatttcataaatgtaaagatgtatacattagctctttattaagtaaaagtagtgtttctataacaacataatggcactaccttccttctatgtgcataaaataaacatctcccatgaatcattaaatcataaaaagggcccccaaaaccataaaaagagatgaattactgcagtaaaatgactctctaggtgtgtgttgatatttacacacacagctactaaaatccagcagtctgaggcaacgattattgtacagtacttatatctctacaaacttaaagatttggacagcttgttaaaaaacacattgtagctatagccatttacagactaattaaggcaatcattaacaaatctatccctctaattgattccaaattttgcaaagcaaagaagaaaatgtaaatgaaaaagaaatctattcttaacctacaggagaaaggaattaggttcaaagacactctctaggaaacggaaaccatgacacgtttgttgtcgataaacagcgctgtatgtgaccactgccacttaaaggaatgtattccagaaataattatgtaatccaggcagtaacatatgtgttacccaagtctagtaattatttttttatagatgctgcttgcattatttaaaatatgcatgtttgtggaaagtattttgtgacaattttctttgttgacatctccctaaaagaatttattctcaaggatattcccttttcatgggaagtaagcctggaaataccaaaactaaacacaggtccacggtgctatttacaaggcagagagtcctgtactgaagatcttagtacaaaattcacacgtccagatgaattttgttaagttgctaggtttacaaacaattgctttttaaaactttctacagttgcaggtaaaatacaaacaaaagacacgcacatacacaaaaaagaacagcacctttatcttcctcaatgaggcaacttctccaaatagaaggatttatgctttaaaaggtgaaaaccaaggagaagtaatttattcccactccaaacttgctcagacctttctaatagtgattttcccccaccaaatgaaaagcttgctttcaatgtcttcgatctgctgttaacatttttaacccaaaacgtaaacgcagatgatttacttcccaaccacacacccatgtctctctcagaatgaatgagctacagcatcacaatagttcctggacttcctgcctctccggagcccacgaaatatacatgaaatggtttcgtgccacctgcaaatgaaaaagtcaaataaaatttatagtttggaggcagatttccaaaaaccctggaacggctaagttaatacatctgtcatatataattacacacaaaatgtaatccaaaacatctatttttttctttctctcttcagacaagaataaagcaattgcccagacctgagcttaaatagctgccccaccaaacaacgatattcacctctgacgttttcatgcaccaataaaatttgatcattcaacgtgcttttcaggagcagttgctctctccattacacaaactgctgcactggattcctggtctttttaaaggatgaccataaatcaggattaaaagccacaggtgagctgctgttaactcagaatgtccacactgtctttcctaaatcactcatcaacccaggtatgaccaaggaaaaaggactgcccaaggtatgctctagaatagaaagcgtctttccaactctcttccgaaaaatctgaaagactgcatttatggtctagatgcaatttgagagaatgcaacggttccttatctggaaagagagagacaaaacatttataaaactttgtctgtcagagcggccagttcaggcattgcacttttccctacatctgattccttagttacttaaattttagattgcctaacccccttccactgaatccaaagaaagaggagtaagaaaagacaggcttaacacagatgtggctctgtaactgttggttaaactgggtaaaaaatatttgtgccatatatgatcaagtgttattttaaatatagaaagagctgttagaaagtaatcaaaaagagaaataccctaacattgaaaaatagtattcataggatatgaataggaaagagtgattctccaaagaaaaaatgccagcggcaaacaagaacactatttaacctagtagtaatcaaagacaagcaaattaaaagactaatgagatattcttttttccccttaattataaaacttactgttggcaagggaacaaggtaactgatattccacacactgctatattccatttagcagtataaactgctgtcattttttggaggtcagttaagaataggaacttttaaacttaaaactcttttttttttttttttgagacgaagtctccctctgttgcccagactggagtgcagtggtgcaatctcagctcactgcaacctccaccaccggttttgagagattctccttcctcggcttcccaattagctgggattacaggcgtccaccaccacgcctggctaattttttttttttttttttttttttttttttttgagatggaatctcgcactgtcgcctgggctagagtacagtgatgcgatctcagccccgcaaccttcgcctcctggtttcaagcaattcttctgcctcagcctcccgagcagctgggattacaggtgtgtgccaccatgcctggctattttgtatttttagtaaaaacggggtttcactatgttggccaagctggtctcgaactcctgaccttgtgatccgcctgcctcggcctcccaaagtactgggattacaggtgtgagccaccgtacccggccctaatttttgtatttttagtagagacagggtttcaccatgttggccaggctagtcttgaactcctgacctcaggtgatccgcctgcctcagcctcccaaagtgctgggattatagacatgatccactgtgcccggccttaaacttcaaactcttaaagtacataggtagttttggccccaggaattccccttctgggaatatgccttaaaaaaagactgagcatatttttaaaaacatatatgaatataaggagagctatcacagcacactattgaaaacactacaaacactgaaccagtccatagcaggtcacttggaagacctgaagggaaagagaataggagcttcaacagaggcgatccggatccaaaggaaccactgggtgctgtgcggttacgtctgaggccatcacccgctgcagagccaagcctgcggcgactgggaggtgaggtgagcgctcatcaaacccagctcccacacagaacgtccgtgagtgtctgattcacacagggttcatgcagtgtgtcactccctggcatctacactcctctttgctaaactcaaatgcacccctgatcagtaaaaactattttaatacaccccctaaatatgtgtattattacacctatgaatgtactaatatattatgtacattaaaaaatatgacctcaattttttaagtgtttaggatacaatgtaaattacatataaatcaaagctctgttttccttgcacacaccctgggtgagagaccgccgctcccggaggctcttcgtcctctgcagaacacacctggggtggtgaaaggtgtcggctgaagcatggagcacatcctccgggctccccagtgaccttgggcactgccccccaacagagcttcaggcccctcccccactatggccccgaggatgcccctcccagcctgtctgaggagtcatgccaagtccctggcacccagggttaaattccttcatttgagcacacgtccggcggcccttcattgtaagctctcagtaaacggttccccggaaattaaaatacaaaaattctccaacttcaatccatgaaatgaattataattagagaaaaataaaatatgttttagttttaattttctataatcttaaaaaatatttatgtatctatcttttatgtctccgagaaggcacacacagaaagtaaaaagcccagggcgggggctgcgcagcctgccctcaggccttcctccagcaaggaggctcccagtgcggccgcccgcttcccaggccaactccagactgtgttccagtcccaccctggcagcctgggcaacaccagcgagcttctgaagccactagcacctcagttcctcatcctcaaacatcaaacaaggacccccgcctcatgggatttgtaacaattaaataagacaatactcgaatgcaatggttgcttaatgcttaataaatatagcattaaaagcttaataaggaaagcatgaaatgcttaataattatcacctagaatggttatcgtcactgatgactaaatttaagaacaatcattagctgagtgtgctgtttggttacagaactgggggagtctctggcagagtatagattaagtgtattcaactttgtcacaataaaatgtaaaaagaatcaaattttggcactgcggatgcataaacacgcagagttaacacattacatattaaatactatatctgacatgtgcgcacccctgtgtatatacataattctacttttttaaagcctcaacaatggagttaccaaaagttttcagcgtgctctctactatccttttcccccttggagagcatcaaatctcaaaaggaagaaagaaaagattcacataattctaaaaaaatctatttctaagattaaaaaagaaaaaaaaaagaaattgccataggtggttgcttccaagccctcgtaagattgtctaattagattgaatgagtttttatttcattcattcggggctgagacatgatgaaatcccagtttaatcaacccttggtcccagggctgctcagaaaaaaacttttcctcaaagccatgaacttctgccaagagcgtgttaattttagcttctgtatttccttcttccctctgtaatagtaatgaggtgcactgaaatgttaatattacttgggatgttcatttaaactctttcttaaacttttgccctaagttctctttttctaataggcaaagtgatgttttgccaagcgagaggcacagatggagaactcaacgacgaagttgtgaaggtgaatgcgtcactgctaaaatattaattgtatttaaatgagaatgtcctctcttttccccaaaataccaaagcaatcaactcaggaatagtctactgaataaatgggttctagtccttttaataaaaataaaattaatatataagaaaattaagtaataatagtaatggctgatattcgttgagcacctcctaagagccagcccttgctctaagcactcgtggttttcgtgtttttttttttttttgagacggagtctcggtctgtcccccaggctggagtacagtggcgcgatctcggctcactgcaagctctgcctcctggtttcacgccattctcctgcctcagcctcctgagtagctgggactacaggcgcccaccaccacgcccggctaattttttttttttttttttttttttgtatttttagtagagatggggtttcaccttgttagccaggatggtctcgatctcctgaccttgtgatccacccgcctcggcctcccaaagtgctgggatgacaggcgtgagccaccgcgcccggccagcactcctgtgttttcacctggatgtctgaccccacaattgcaacatctcattttcccaaagtgatggagacccctggggacagacacagagatttcaggtggtttaaacgctggcattcaataggactgggtcgttctgtgaagaaattattctctttccgatgtcttgccaatcctactgatgccattgaggcagaaatatttcttttttttttggttttgttttatatttgttttgagatagagtcctgctctgtttcccaggctggagtgcagtagtgtgatcttatctcactgcagcctcagcctcctgggctcaagcactcctcccacctcagactcctgaggagctgggactacaggcacatgacaccatgcccagcttattttttaattttctgcagagacagggtctcaccatgttgcccaggcgggtctagaactcctgggctcaagcgatcctccagccttgacctcccaaagagctgagatttcaggcgagggagagattcctgcttcctgctggtgtatctttaatttccccagcattgccgatctcccctttcagtggacacagagcaggacacggtatctgctaagagacgagtcatcctgtttgcttttgttgtgttcaatttttagcctctatttttcataaataatcctggctttccacttatattagttatgtaaaattttatgataaaatattttattattgaaaaagtgtctcattacaaaagagaacattcagcaaataatagtactgttggttccagatatggcaaaaaacgtaaaacacaaatgagttaagtttggaagtctctaacaatgttacgaatatagtatattctgtaaatagtactgcctgtaagatgttgtttaactctaacagtatttttttcaatatacttgcccatagagcccactttttgaaggagaatctccagtgtgtctgatccacataagactgttttccaaaataaaaaaacattttaataaaaaaagaatatgaccaaataatagattaagaattttcagaaagcctcaattagaagataaatctatctaaaatattagagtttataaatacgttgtcaaatatttactagattcttcctcatatagaccatgtcaaatttatgacacgattccaccccataagtgatcataattgcatcgaatcacaagacataaatcaaacacatggaatgtagaatgcaaaaatgatttattgaaaaccactacacgctaaatgatattgacagattatttatgcaatcaaaaacaaaaaggatcaaaataacctgcagaaacaaaaataagcaaacaatctcaagaggtgctgaccttgtacgagcggaaacagggacacaggcaggaagggaccttcacagtattagagtctataatacaaatacatcacatttgtaacaacaacaaaaaataccagctactcaaaaaactactactgacacactaacaaaatagatattgaaagacactttcactaccatctaactgacctctccctgaacctatcagaacttatcaaatggccaggcatgatggctcatgcttataattccagcaccttgagaggccgaggtggggggattgcttgagcccaggagttcagggccagcctgggcaatatagtaagaccctgtgtctacaaaaattaaaaaaaaaatttttttaattagttgggtgtggtggtgtgtgcctgtagttataactacatgggaggctgaggcaggaagatcacttgagcccaggaggtcaagactgcagtgagccatgatcatgccactgcactccagcctgggtggcagagtgagactctgtctcggaaaccaacaaataaaaagaacttatgaagtgccatggaacaggcattcttccattgggtcaatgctagcccgcatatttcaacacatctgaagaggggataaatcttatgaatgacacttatttttaatgacatacaataacttatgccaattcatctttacatgcttgaaacaattgagggaagggggaaggagagagagcttgcatgagaagcatataatctgaagaagaggtgagcctgcaagtcactctgccaggtgggcatttgacctggagtgtgtgtgagatgaggtctcatgcctaccccctccactctccggatcccccatatctcttgtagtgtatcttgccaagacaaatgtaatcccaatgtttagggagattattcatcactattaaagattccagcaatttcacggatgttcatctgaacagacaaagctcatcgggtttaaaagaaaatcttgcagtgctggactttctaagcaaagcctgtgagcccttatgcacctctaaataatgagaagaacgatgctgtgcttggagaaatttcttcagtgtaagcaggtgtctgaaggccacagtagtgaaatcaatgctttcagttccaacagaatcataacctctcccttatatggtcccagaactcatcttttgcattgtcaaggggctgaatcacagtccttaatgaactagtaacaataggattttgagtcataaaatccactttccattttggcttggagtggtggaggtcacactaagcaccatccatttgaaggaaggatagagtcacctattcatgagacaggagggatttcaaaacatctggtgatgattatgctctataatcagctgacatttctacttcctttacctctgatgcaagtgcaatgagatccaaccaactcccacggagccagctggtaaaataattaaagtgctaccttaccctgtgttttcaaaacgagaagtttaccttttggtgtacagagaaacggtgattttatttcaatatctagaagaaaaacatacgtactcaagggaaataacatgaaattaatatgtatggatacatatatttaaaatacgcataccaagtaaatctgttttgtggctaatatcccagggctaactaataatcaaaacaacacttccctataagaatgtttaaatgcagatttatgttcctgagaaatgttatagcctaagaggaacttctaaaggcagataaaacctgaatgtctttctttgtgccgctgttttagaggtatcaagagcaacatgttttacattagtcagaaataaataacaacaaaaccattcacaacctttttgggaaatgaaacacgtctgagacggaaagggccacgcttgcaatactatacttgctctttctcttactacatggaaattctagagatactgactgtgtttaaatattatcctacaaaagcccctcagctgccccactggtaaggtctgtctcaaaatttcattacaagttcatattagatttaacccaaattaaagtgattctcaaagcaaaatcactattataaacagtatctagtaaaattcaaatcaaaatgacacagggcagataagccccaaaattggggcttaacccaggagggttcttggcattgcccaggaaagaattcaagggtgagccagtggtaacttttactgaagcagcagtgaacagcagcagcagaggtcctgcccctggcagagcagggctgctccacaggccgtgctcccagagcagcaactcagaggcagctctgcagtcgtactgatacccacttttaattacatgcaaattaaggggcaagttatgcagcaatttctagaaatagagtagtaacttccaggtcattgggtcgttgccatggaaaggggaggcagcttttgggtgttaccatggcaatgataaaccaacatggactggtgggcatttcttatggggaggtgcttttgccttgtccctgtttcaggtagtcttcaatctggtccacagcccaagccccacttctggagtcaagtctcacctcctacctcaaactgacctaagtttatctaattattactctgtgtgatcaattttcatttaattacccatgcacttatcatggcctttcattcattcctgcatttgcatgctttcttagagctggttttccttctatttgaaaatgcctttagcatctctttcactgaaggctgactaagtcaaagtctttctggttggtttttcaaaaatactattatttagtcttcatttttaaagaatatattttctatatatagaattctaggtccttgggttctcttcatcttaaacacatcactccattgtcttctgaatgtcattatttctgttcaaaagtcaactttaatcttattgttgctttcttttacgttaattgtcattttcctctttttagcaagtccgttatgatatacccaggtgtgatttcctttacggctggacatcatatcacttcttgaatctgtggcttgatgttgctcactagctttggaaaattctctgtttctctctttcatctttgctcttgagaatatattctcctgacctgtattccagttcactcattctaatattctcttaagccaaagtattatatttttaactttggttattctattattcagttctagaatttttatttgattctttgtatatattttaatttcctgctaatcttgtcatgtttccttttattgatttattatagttatttttaaatccactatgaaaattccagtatctggatcatccatgagtcgacttctgccccctctcccttggccttagtttcttgtatgcctgggaaacttttccactggacaccagacaatgtattacaaaaaattataaatactgtggattacgttaatttaccccagagagaatttattttgttgcaagcaggcaattagagtaagaggagagattcttaatccagcctgtgcttgaactatttcaaagtagatgttgagtttcagtgaggattaatctatttctggttcacttgtgttcctggcttctggctgtttggcaactgcaaccaagagcctggatgttgactggcccatcttcctgggcaggtcctgaacttcatttttgtctctctaggtcaacgttattatgagttgttgcttacctcctcagcctctttgctggcactttctgttcaattccccagccttttgtctgctgtgattaattggaaatgcttcaagagaaacagtggtgcaaaacactggaatcactctgaggctttttcctcttctccaggtttttaccctcagtcttggctgctgtgatagccttgaacttcaattttagtcttcccaggtctgaggggcttccaacggctctggtcagctctgttcacccttggccatggcttaaaatcagcagaggcatcagctcaaaaggcatttccgaatattaggaacactgactgcatttctcttctgtagtggagtacagatacctgacactcctctaatccaggggtgaggtctacgtccttgctctatgaccgctttgacctccctgcagaacgggactgaggtgacgttctgctagtctcctggctcaagccttagagactggcagcttccacttcctgtcttttggaacacttgccctggaaaaaaaagatgtcgtgcaagaagtctgacaaccctaaaactatcacgcagtgcggaaccccaaggttgccacgggagaagctcccagacatgcatggggcagccttcagaggactccagccacagccaccacctgcccgcagtagtgttagggactccaagcagaatgacacagctgagctcatcggctccaagaacctgaaatgggggtgtgtctgctcaaattaaaagcactttatgtaagttgtggtttagcaatgactttgcataatgtgttgattgatctgttcaattaactccaataagtgagagttgactcccctctggatgctgagcattgtgatttcttccagcaggatttcctctctgaaccaagggtgcgtcctttgtacctgacatctattaggttggtgcgaaagtaattgcagttttttgccaataaaacactcaaaaatcgtttcctaatggttcctttagaaatcaccacagcgattctgtaaagatttccagggcatatggtccctaaaggatcatcctgaaatgaagcatgaaggaattgggacacagaagtgacaatttttcttcttcgatagataataagaactgtctcccggtaccggaatgcttcagcttggtcttaagataaaaatgtcttgtttgagtaagttggtcctagcacttaaaaaatctgaacatcaaaaagacacgttttccaatggggaaaaagtagaaaattatatcaagaaggtaaaatagtctacatgactcttagcaaggactatcctgggtagaggtgtaggacagtcatttgcaaattagatattttctgttcaggaaaatgtgggcactttggtcttttcactgggtttgtctttttgatgagttactttaatttctcctgtttctcaatttcatgaaaattcaaaataattctgagggatcattttaatttctcccaaagattgattcttggagtctcttgagttgaaaccaatgagacgttcaggtcccatcagcacatgtgagtcaacacatccctgaagtgggaggacaaccacgtgaagaagtgaattctcctaccaccactatctgtcctactcatcttcctctttgcttccctcaacttcatcccactgttcccgttcacaccctcttgcctcatcccagccaagttgatttcccttcctgcctctcgtataattgcaaattatcattttaaggctggaatattcattcactcccaagactggagtaggggcttagtaattaaggagaaatgttccagagaaaaacacattctatgtggtcacggacaggagtttataatgcaagcagtcagaccttaagcatccctggctttccagtctccacttttacaaagggacatctcagagcttcagtagtggtctagtcatgtttaatcaattttcatttcccaaacccaagtgtatcccattttgacatctctatatataaatacgctgctttttaaaacattttaaagaatataagcaaggttttctaaaatacatgcctaaataccaaaaaatacaagcataaaccatacttgtttttctaggggaaaaagcaaatctccccgcttagtttgagtcatcaatccaaaactgaaaataaaagccttgagatgcagtttgctctgactttacaaaaatcgaattcctttctatataataattgaatttgaatctactcgagttatgtgaacacagctatagatgatgactatttataccacataattactaaattacaataccattgacactcccaccaaagaaaagttttggcttcatcatttacaaaagctaactggtcaccccgtgactgttgctggtgaggaaagcaggggagagaaactgcagggaaggaactgagctttactgaggccagttccctgccaggcaacgcggtagccattgcatacacattctctcctctgaatcttacaacagtcctataaattatgatatcagtatacacgattacacagataagggagttgaatcagaaaatgttcagattaaacaataataaataccagagccgaggttttatcttggtgctgcgtgacccctgaatatacccaggggcttcccaccattccacaccacctcagcctgcctgtcttgtcaaatggatggggatatttgcataagttcttaacagcaagagaaaaatgctcacgcatatagcaatagtcttccatttggtaagagcctccactgaaatgtggaattcccatatatttgtggatttgaaaactatgatcctagacttagtttctttctgaaggtattttgtgggagagctgaggaagcgaaaggcccaagtctgaaagaagtggtggatctctctctctcctctctgtctcctgtgctcacattgatttttgcaaagctccaatctggaaggacgaggaacacgtgactcacagacaggaggaaggagctaggggagttcttcccagttctgggtggagaacactccacagggcccccaagtcataattcaaccctgagccctttaacaaatgtgtctttgactggggccaggcctgcccccacggaggatgtgcaccaggcacttagttccaagttcacgggaaacttggccacgcaaagatgaaacatgttaaggggatgtgggtggggcaaaaatgtcagcaaaggcgacatcaagattcctctaagtacacaatgcacacttcaagggcctcagggtgggtgagggttggttcctgtagttgttaacattattttgctttggtttgtttgcttgcaggggtctaggtatggacagggtattttatacatatgtcttctataggaatcaggacgttttctacaatacttcccagagttgaataaagatcagtaattggcatcattcaatcaggaaactttctgcaaatccatcagcatcttccagtgagaggacaagctgaggctacatgtttagcacaaatgcttttaattgttaccaacgatgatttattcatatttatgcaatgccacacacactggggacttttccatgtgaggacacaaaataaatacttttcttagaaattagattcttttgaaagaaaaagctcaccaaaaataacagcagctaggcattttttattggttccagcagattccaccaggatgaacatccagtcatcagcagttattggtgtgtgttgatcagaacacagaaataaaggtgaaactgaggtcaatatttacttcaaaaagggaacgacatctcaatattcatgcaaatattagctcggaaaatatagctttcattctgaatgcttctctccaaatatctagcacagatgtagccaggtagatgttcctatccatagggaaaactgacttctagaaagttcatcagcatctaatttgcgtatacagctaatccaagcacatgaaaagctacattttctttatgctgaatagtttcccaattatttgtaaattagttgacttgcttttcacatttagaattttaaaatctcctagctcattatagagactcttttaaaccagtcagaacagatttccttctcgcaggctactataataaatattaaattgaaaaattgttcatttaccacaaggtgccacaatgttgattaaattgtacgcacgccagcattaacactgctctaggttggagataattggaactgtagtgacatgcaaagggctgtacaaaagcacaagaatgtttactgcagcatgatttgtaatagtgaaaaattcaaggcaaccaaagtgttagcagtagtaaaatgaatgacagcacattaacactgttttatttttaagtgatgtgtgcacccatgttcacagcactgcttccctacagcactgcttccctacagcagtgcatgctgcacactgcaaaactccaagggagacgcctgcaacactgtctatgtcaggggccagcaaactttccataaagggccagagagtcaatattttaggctttgtgagccacagggtctttgccacaactactcaattctgccaccaatgtatgagtatggctatattttaataaaactttgtgtttgcccaccataattggaattttgtgcaattttcacattgtaaaaccttattttgaattcttaaccatttaaaaaatgtaaagacttttaaactcacaaaacatacaagaacaggtggcaggctgggcttgaccctcgagctgcagcttgcagcccctggtttatgtggaagtcatcaactgatgtcatgccacccacaacctgcacaacctcacacaaaagccttgtgcaaatgtgtaaagcctgaaaaatgctgtgccaaattcctaatacctgttacttctagggtctggggagggggagagaggatgcagaagagtttacaagttttattttatttgctgagtgtatatatttttatccatagaaatacacaaccaaggctaggcgcagtggctcacacctgtaataccagcactttgggaggccgaggcgggcagatcacttgagcccaggagtttgagaccagcctgggcaacatggcgaaaccctgtctctgcaaaaaatacaaaaattagctgggcttggtgatgcatgcctgtagtcacagctgctcataaggttgaagtgggaggattgcttgagcccggcaggttgaggctgaagtgagctgagatcgcaccactgcactccagcctgggtaacagagcaagaccctgtctaaaaataaaaaaataaaaaataaaaaaaaacaatgtacaaccaattctttgtaaagactctaaaaatgggtgggtctcaagcctattgtgtatttagggggcagagattcccatggcagtcagatcaggggtgatctctggagatggggaaggagtggtatcttggaagcaggacatcgaggggtgaggacaaggtttcattcatgaccctgcatcaggcttatacaagggaatgctttatcataagtcataaactgtcatttgtgttttatgcgcttttcactgtgcctccaaaagaagattctgtggtaggctaatcattcctcattctttgggagactttccaaacttttctgaagctgaatcaggatgctgagattgaccactaaaaattataataaattatgcagcaataaaatatcaaatctaaaatattactctttaattcacgtcactgccacgaaactccagtgtaacatgacggaagactgatggttgcaaacatcctccactctaaacatccctcaggtctgaagaaagatctgagacccagtcacagcttaagaaaggcctgtggaaaagccgcaccatcagagcatgtctttgccattggcaccacctcccttcaaccctcccagagtccacagtcacagagggaaaggggagagactgatgtgcagaatccactctggtctcaatttaacttcagaaatcgatgatgtttctagatgaggagaatggtttccttggacaatgaagagaatgtcgtggtgtcctaaatccccaaagagaagcgcagaggatattgaccaggaacaagaggccgtttgaaaacacaggaaggacagtgtcacggggcaatgaacgagggctctcacccaaggtcagcctgcacccagccgtgagcctccaagaacactcaagccttcaagccttcctgcttgcctgtaagtttacctccctctgctttagtctaaagcttcttcccatataaactaaaatcatgtgaacccatctgtttcattatatgagtcttaactggaaccgatggtttgaaagcatgaatcccatgacacttggcacatgggaggtcgtggctgaatgttggatttgcatttgtagggccaacgtgctctctgaggagttatggaagacagctcctgtgtagtcggcaattatcagtgggtcccctctgaatgccagtgcctttgatcattggactcagtttccgtaggagttgcatcttccagggagtggaggatgtgttctaggggagaggggagtcttaggtttgactcataagtttactgcaatacactcatcacgcaactccactccatccccccacaggcaacaggactgaacctactgcaagtcaagaaacacacagaagtttccaggtaacagagtgctggatcaaagttctgggcaggctggaaaagcaatgcaataacgcaaagaaaagccaccttggggggatgggcctccgtttcctctttggtaactcgaggcggggatactactaatgcccatggcagtcctcgtcactttcaccccacgtttcccatgttacgtcactggctgttctaagtgcacaatgcttaacgtggggaataaagtgggaggtggttaaggcttaaacagtggtccctggggacacaaaacgttcagctatcactgaactttcactatgtcccaggcactgtccttagctgtttccaaatttcactcttgaaattctcaccccggcctctgaggcaggcttgaccatcacctcattgtacagaaaaggaaatgtgacacagggccaatgtcacaggccaaggaagtcagaggagcaggattcagccccagaactcggcacacagtcaatgctcacgagtgggatgtcaagctctgatcgccaagtggggcaagaaaatcattccccacaattccccacagttcttcgggaagagcactgaaatggattgagttttctaaaaatagtctcatgaaagagtgagaaaaaaactgaccttgtggaacaaaagcaacattgcaatgagaacggcccaccaggagaatgaggaaactcttttctccccactgtctgacagtaacgtggactgtgtgccagctgcgggccaggaactctctggatcgttgatactcatcagctcctcctaagtggatgaggtaggtgttgtgctagcacccattttaaagatatggaaatgagacacagttagataaaatcccagctcatcttcacacagctagcaagcaccagagctgggatctgagccgagccatctggctggagactccctccctcctgactgtgctgccttactgaaacagcctcggtctaccagatgacttttcagaaggcaccatccagcaaccttggacctactttgtttgcccacatggtatttgcaatgactggatgtttatgcccctcccccaaattaatgctgagatcttaaccgaggtgatgctattagacggagagccctatgcaagacaatcagggaacagagtccggggaacgggatgggtgcccttataacagagtccgggggaacgggatggctgcccttgtaacagagtccgggggaacgggatgggtgcccttataacagagtccgggggaacgggatggctgcccttgtaacagagtccgggggaacgggatgggtgcccttataacagagtccgggggaacgggatgggtgcccttgtaacggagtccgggggaacgggatgggtgcccttgtaacagagtccgggggaacgggatgggtgcccttataacagagtccgggggaacgggatgggtgcccttgtaacggagtccaggggaacgggatgggtgcccttgtaacggagtccgggggaacgggatgggtgcccttataacagagtccgggggaacgggatgggtgcccttataacagagtccgggggaacgggatggctgcccttgtaacagagtccgggggaacgggatgggtgcccttgtaacagagtccgggggaacgggatgggtgcccttgtaacggagtccgggggaacgggatgggtgcccttgtaacggagtccgggggaacgggatgggtgcccttgtaacggagtccgggggaacgggatgggtgcccttgtaacagagtccaggggaacgggatgggtgcccttgttacggagtccgggggaacgggatggctgcccttgtaacggagtccgggggaacgggatgggtgcccttgtaacggagtccgggggaacgggatgggtgcccttgtaacagagtccgggggaacgggatgggtgcccttgtaacggagtccgggggaacgggatgggtgcccttataacagagtccgggggaacgggatgggtgcccttgtaacggagtccaggggaacgggatgggtgcccttgtaacggagtccgggggaacgggatgggtgcccttgtaacagagtccgggggaacgggatgggtgcccttgtaacggagtccgggggaacgggatgggtgcccttgtaacagagtccgggggaacgggatgggtgcccttataacagagtccgggggaacgggatgggtgcccttgtaacggagtccaggggaacgggatgggtgcccttgtaacggagtccgggggaacgggatgggtgcccttgtaacggagtccgggggaacgggatgggtgcccttgtaacagagtccgggggaacgggatgggtgcccttgtaacggagtccgggggaacgggatgggtgcccttgtaacagagtccgggggaacgggatgggtgcccttataacagagtccgggggaacgggatgggtgcccttgtaacggagtccaggggaacgggatgggtgcccttgtaacggagtccgggggaacgggatgggtgcccttgtaacggagtccgggggaacgggatgggtgcccttgtaacagagtccggggaaacgggatgggtgcccttgtaacggagtccgggggaacgggatgggtgcccttataacagagtccgggggaacgggatgggtgcccttgtaacggagtccgggggaacgggatgggtgcccttataacagagtccgggggaacgggatgggtgcccttgtaacggagtccaggggaacgggatgggtgcccttgtaacggagtccaggggaacgggatgggtgcccttataacagagtccgggggagcgggatgggtgtaacagagtccggggaaacgggatgggtgcccttgtaacagagtccaggggaacgggatgggtgcccttgtaacggagtccgggggaacgggatggctgcccttgtaacagagtccgggggaacgggatgggtgcccttataacagagtccgggggaacgggatgggtgcccttgtaacggagtccgggggaacgggatgggtgcccttataacagagtccgggggaacgggatgggtgcccttgtaacggagtccaggggaacgggatgggtgcccttgtaacggagtccgggggaacgggatgggtgcccttgtaacagagtccgggggaacgggatgggtgcccttgtaacggagtccgggggaacgggatgggtgcccttgtaacagagtccgggggaacgggatgggtgcccttataacagagtccgggggaacgggatgggtgcccttgtaacggagtccaggggaacgggatgggtgcccttgtaacggagtccgggggaacgggatgggtgcccttgtaacggagtccgggggaacgggatgggtgcccttgtaacagagtccggggaaacgggatgggtgcccttgtaacggagtccgggggaacgggatgggtgcccttataacagagtccgggggaacgggatgggtgcccttgtaacggagtccgggggaacgggatgggtgcccttataacagagtccgggggaacgggatgggtgcccttgtaacggagtccaggggaacgggatgggtgcccttgtaacggagtccaggggaacgggatgggtgcccttataacagagtccgggggagcgggatgggtgtaacagagtccggggaaacgggatgggtgcccttgtaacagagtccaggggaacgggatgggtgcccttgtaacggagtccgggggaacgggatggctgcccttgtaacagagtccgggggaacgggatgggtgcccttataacagagtccgggggaacgggatgggtgcccttgtaacggagtccgggggaacgggatgggtgcccttataacagagtccgggggaacgggatgggtgcccttgtaacggagtccaggggaacgggatgggtgcccttgtaacggagtccaggggaacgggatgggtgcccttgtaacagagtccgggggaacgggatgggtgcccttgtaacagagtccgggggaacgggatgggtgcccttgtaacagagtccgggggaacgggatgggtgcccttgtaacagagtccgggggaacgggatgggtgcccttgtaacagagtccgggggaacgggatgggtgcccttgtaacagagtccgggggaacgggatgggtgcccttgtaacggagtccgggggaacgggatgggtgcccttataacagagtccgggggagcgggatgggtgtaacagagtccggggaaacgggatgggtgcccttgtaacagagtccaggggaacgggatgggtgcccttgtaacggagtccgggggaacgggatggctgcccttgtaacagagtccgggggaacgggatgggtgcccttataacagagtccgggggaacgggatgggtgcccttgtaacggagtccgggggaacgggatgggtgcccttataacagagtccgggggaacgggatgggtgcccttgtaacggagtccaggggaacgggatgggtgcccttgtaacggagtccaggggaacgggatgggtgcccttgtaacggagtccaggggaacgggatgggtgcccttgtaacagagtccgggggaacgggatgggtgcccttgtaacagagtccggggaaacgggatgggtgcccttgtaacagagtcctgggaaacgggatgggtgcccttgtaacagagtccggggaaacgggatgggtgcccttgtaacagagtccggggaaacgggatgggtgcccttgtaacagagtccggggaaacgggatgggtgcccttgtaacggagtccggggaaacgggatgggtgcccttgtaacggagtccggggaaacgggatgggtgcccttgtaacggagtccgggggagcgggatgggtgcccttgtaacagagtccgggggaacgggatgggtgcccttataacagagtccgggggatgggatggctgcccttgtaacggagtccgggggaacgggatgggtgcccttggagtccgggggaacgggatgggtgcccttggagtccgggggaacgggatgggtgccctagtaacggagtccgggggaacgggatgggtgcccttgtaacggagtccgggggaacgggatgggtgcccttacaaaagagtcctgcgggagggtgttcatccgttccaccacgtgaggacacggtgagaaggtgccatctccgaaccagaaaccaggttcccagcagacactgaatctgcagctgccttgatcctggaatccaggatagagactgtggtcgagaaccatagacatagacccctgctgtttataagccacccatctatggaattttattaggttggtgtaaaagtaattgcagctttgccattaaacgtaatagcaaaaaccgcaattacttttgcaccaacatactcggctcaaaatgattaagacagtgttctcttttcttttcactgaattaattgccaatattttaaaattacaacatgtgatggttaatattggatgtcaacgtgattgaaggatgcctataatactttgcatagctggtaaagtatcatttctgggtgtgtctgtgagggtgttgccagagaagatgaacaactgagtcaatggactgggagatgcagacccaccctcagtgtgggcgggcaccaaccaatcagctgccaacgcggctagaaaaaagcaggcaaagagggtgggataagctgggttcctgaatcttctggccttcatctttctcccatgctggatgcttcctgccccagactccaggttcttcagcctttggattcttggacttacaccagtggtttgctgggggctctggggcctttggccacaggctgattggtggttgcactgtcggcctccctgcttttaaggttttgtgatcagaccgagccactactggcttccttgctcctcagcttgcagacagtctatcatgggactttgccttggatcttgcgagtcaattctccctaataaactccctttcatgtatacatctcccctgttagttctgtccctctggagaaccctgactcatacagaacatttcacataaaaatgtgcatttatactttctcatggaaattctggggtcctggtcacaggggactcacactgcccttggcattgagaagcagctgcccctagacaggacacgcacaccctagactaacacggccccactctgcctctgtggacatttgagaatgcaactggctaagaaaaactatgcaaaacttggaaataaggcaaaacgattactgcatgccctttcaaaatcatgctagaacattcgacaagtccactgaaatgtcatgggagactctagggaaagagaactttatttgacataccatttactattgatcagggcccaaactctgtcaatttagatgttaacttggagtagattgatacattacaaatgacttttgtccagtagagatgggaataatttctgtcttacagaaaagaaatcctcaaaggggactgttctattgccccagggcattaaactcgtctgcatcaaacttctcaatctcttaaagcgttctttttccctgtgtatatgtatgcataaatatatatacatatgtgcgtatatatataaaacttctcataacctaattttatctagctatgtcatcttgttggcttctgtattagtccattctcacgctgctataaaaacatatccgagactgggtaatatatataaaggaaagaggtttaattgactcacagttctgcagggctggggaggcctcaggaaacttacaatcatgaaagaaggggaagcaaacgtgtcctttttcacagggcagcaggagaaagaagaatgagagctgagcaaagagggaagccccttataaaatcatctgatctcatgagaacttactcagtatcacaagaacaggattggggaaactgcctccatgattcaattatagacacctagtcccgcccatgacacatagggattatgggaactacaattcaagatgagatttgggtggggacacagccaaaccatatcagtttgcttatcaacaaatgaagcaattattggaatctccttcactatgttatgtttttaaccttttgaaacgctttctgaaaatcttttttatagaattatactttgagaaatctgtgaccattccagtggaatgaaatgaaaaatgctctgccttgcagagttgaaaccacttttgcaaacattttaacagttagaaatagataactttgagaaaattataagaaacatagaggatgtgatctaaccaacccccaccttacctttaacctccaaaactgcccttggttactcctgggcttggaccaagctaactttgggagaaatttagtttatagttggaatgacaatagcccttccccaaaattaaacctcctcggtaaaaccaatgaaagcccaccaggttaggaaaatgagaggagcctgaattctgctaagatgtaggcttagttaaatgattaccaggctgggcccagtggctcacgcctgtaatcccaacaatttgggaggccaaggtgggtgaatcacctgaggacagtagttcgagaccagcctggccaacatggcgaaaccccatctctactaaaaatacaaaaattagccggtcatggtggtgcactcctgtaatcccagctactagggaggctgaggcaggagaatcacttgaaatcaaaggttgcaatgagccaagattgcaccactgcactccagcctgggcaacagagagagactctgtctcaaagaaaaaaaaaaaaaaaaggattaccagccattattctggaggtcacaagatttgcaacttccccaatttctggcagataacatcactactgtagaacctaagattggccttttgagatgtcctttcaggcttttgcatttctgatgaccagatggccccacccagacccaagactcttgacttaactgctcctgtagccacacccaacacacaagggtcatatacctacaattgcatccacaaccaatcagcagcatcccctccctagtcctctgcccaccaaactatccttgaaaaaccctagcctccaaattctctgggaagctcatctgagtcatgataaagctgctgtctcctgtttagctggctttacatgtgtgatactctttctcctttgcaattccccggtggtgataaatcaggtctgtctgggaagtgggaaaaataaacctgttggccagttacagaatggttttgaaggctggtttaggaagccacacaatacagatgctctcaactctaaatttcaagcctcaaatcaggtggaaacctcaaacttcgggaaattaatccttgctggggctggctgaggatttccatgctgaaagcagacccagccttcaggagccaagagcgaaggcgttttccagggggctgtgtgtttgctgacactccactgcacaggtgtctctctgcacagagcaaacctgccctttcaattcactctgagccactagttcaatcttttccatctgtgctctctgaactttccatttccaataggttcagactaattcacggcagccatgggggttgatcagctatgcctctcccatcacatccaagggctgcatgttgacatccttaaaagaatttagaaataaatctaatagagtgcctttcatgctggaggactgtttatttgaattccattaagagcggacacaagtataagtagagaatgagtctgggcttcaaaagcacttagccaagccatttacccccatgttggataaaaccattccattgtaataaaataaaaacacgactgaaagctgacacagcctaggctaaaagcttgatgtttaagaagcatcaagatgagcttagttaaaaaaaaaaaaagctatagcagctcagccacagaacagaaacacatcacaacatgctttgcatgttgatggaactgaacggccctggctggtgcagttccgccttcctcagcgagggagggattccagggcagatgtaaatgggaacttaaggccattcatcaattcattcagagaaccgaggcattgaaaattgtggaggagcttgggcttggaattgggaacaggccggttatcagacaaatgtgggctgtgtcacattaaagtcactataatttttagcttgggcaaaagtataaattacagaccttggtgtctgtcttagagcattgtgaagcctttacagaacagggaggcatggatttgtggacagtgctaaggaatcagctagccagccacccccacccccagccccgatggaaactaataggttttccagatgcaaaaccatgttcttcccaagggaatcaaagagtacacctgctccctgcacagttatgggtgcagagaccagggtgcaaagtgtacagcatctcacattaacacggcgagtctggtatttttaagttcactgttggtcagctcttttgtaaaatgaagaattctgttttttcatacaccttaatttttctaccttataatgatgctttttaaaatatcaactttgctaaagcaggccttaaaatctcccattcaagcaaaatattagtaagccttgctagtattaccctccgtataaagcttgtgtcctaagggctgatagaaaataagaattcaaaaacattgggattggggtaaaatcagctgtcctccccagaaaagaagcaagatttctgtgtagtcttatatccccacgatattttaatacatgaaatgctagcatcagaacatctaggtattgtttgtttctgtttttgtttttttggggggggcaggggaggaaattgtaacaggaatcttttctgccattttctggtaactgcccacaagaactaatatagcctcatcagtcggcagagtttatccctctaacagcaatgataagtttagggatatggtgggttttaaaataagtctgaaaaactttttatcactcatccctttaaagtgtgagcccaattgcgctaccactagcaccagtgagggctggacctgctagttcacttctaaagaacagcatgtagctgagatgacagaatgtgagttccaaaggtggggcataaaaagcactgccactcctatcttactctctgggggaagccagcgccatcttgtgaggagactcaagcagccccgcagagtggtccaggtggagagaattaaaaccaaagcatcagccatttgagcaaaccactttagaactggattctccagcccctgtcaggccttgagatgattccagacgtcagccttggaatctctcagcagaggccccagacatcatgaagcaaagacaaaccagccccacagggctgcgtctgaatttctctcctatagaaacagcaaaatcatatgtaactatcctgctttaagtcactatcagagttttggggtagtctgttttatagcaattgattaatacacatgcccacaggcagacccataagactcaaggagtggctgtttattttgaccactgaaaaagataaggtgtttttcctgctgaacctgaagtttggaggatgtaattggagacctgctggaagccaccacataaggagactgcctgagaaggaagccactcccgaggacagcagagacaagagatggggacagactagtggcactgatgttgggtccctggatcaagctacgcctgaaggttattctgacattcttacttgtttgggccaataaatccccttgccacctgcattgttacctgaagtaagtttgggttggatgtctgtcattaggtactcaatgccccctgacactgtacattcagcatgctctgcactgtctctcacatagtactctagatagtccgtgtcctctgagtgcaatggctaggtcttaaagtggccacaaccaattagacaaggttcagtcgtgcaagatgggtccacagaagtgagctccatccaaactctatgtgagctcatcatgaagcctgtaatcacagaacttatgctcatcatggagcctccaatgtcagaacttattttccagtggaaaaagttggaaatccagataataagcagacacacaaataaatgcccaggatgagctgaggtggaggtaagtgccgtaaaagtgatgcactggaaacccctgtgagcaggctgggtggaggcgacctctctcattggtgacagtctgctggcactggagtgctgaggggtagctctgcaatggtgcagaagcctgcaggacagagttccaggcagagggaactgcagagaaggaaatgaacttggaggcaggggttccatgaacagaataatgtccggtgtggctggagcatagagagcagaagggagaataccaggagaatatgagtaaacacaatcctactactatggtcacaaccaattacacaaaggcttggttgtgcaagatgggtccacagcagtgagttccctccaaactccgtgtgagctcatcacggagcctgcaatcatacaacttctgctcaacagttctacgaacactccaagagacaggagtgattacgtcttgcaatgagcaggcatggagggaatctgggtttcattgtgagtgcaatggtctgacttctgtattttaagcatcctggctgttgtgtgaagaatgaactgtggggagcaagggtgttcagtctgacacacggaatatactgaacgcatcgcaactgatgactgcttgggcatcctctatgcccggcactggtctacatgcctgatggatattatgtcacttaattcttgcagtcccatgatggaggtattttataacttgcattcagcaggcaagggaacaggggtacagtgaaggcagtggtcacgggactaatgagtcaagaagcctggatttgaaccagaagtcaggctccagagctacatcgtggtgtgactctcttgcagtgctataggtctggggttgtctggctgtctcagatcgtgtgcctaacgactaagacatcgttaagtttggtgtttgttttggtttggttttcctctcacactgctgtggttttactccacaccccctgggtttaaaactgtatgcttattctcaaaagatggcacacaaatggccaagaagtatatgaaaaagggttcgacatgactattcaccagggaaatgcaaatcaaaaccacaatgagatattacctcacacctgttaggatggctattatcaaaaagatgagaaatgagtgttagcatatacaccatggaatactatgcagccataaaaaatgatgagttcatgtcctttgtagggtcatggatgaagcaggaaaccatcactctcagcaaactatcgcaaggacaaaaaaccaaacactgcatgttctcactcataggtgggaattgaacaatgagaacacatggacacaaggtggggaacatcacacaccggggcctgttgtgcggtggggggaggggggagggatagcattaggagatatacctaatgtaaatgacgagttaatgagtgcagcacactaacatggcacatgtatacatatgtaacaaacccgcatgttgtgcacatgtaccctagaacttaaagtataataaaaatatattaaaaaaaaaaagaaaaatgagtgttggacaggatgtagaaaagagagactcctggcacactgtgggtgggaatgtaagttggtaaagccattacggcaaacagtacgtaggctcttcgagatattaaaaatagaactcccatatgatctagcaatcccactctgggtatatatccaaagaaaatgagtcagcaccttgcacagacatctgaactcccatgttcagaacttctgctcatcatgcagggggattcacaatagccaagatgagtcagcctatgtgtccattaatgaacgaatggatacagaaaatgtggggtgtatatatacatggaatattacttagtcttaaaaaagaaatccagccaggcacagtggctcatgcctgtaatcccggcaccttgcgaagctgaggcaggcagatggcctgagctcaggagttggagaccagactgggcaacacggaaaaaccccaaaaccctgtctctacaaaaaaaaaatacagaaattagctgggcacggtggtatgtgcctgtagtcctagctacatgggaggctgaggcaggaggatggcttgagcctgggagacagaagttgcagtgagctaagatcatgccactgcactccagcctgggtgacagagccagactctgtctcaaaaaaagaaaaagaaagaaagaaatcctgccatttgcaacaatatatacatgacactgaaagacacgaagttaagtgaaataagccaggcacagaaaccacatgatctcactcacatgcagaatctaaaaaagctaaactcagaggagcagagtaaaatggtagttgccagggctcagcaacactggtgagagaatagggagatgctgatgaaaaagggaaaaccttctattatgccagatgagcaagttctagagttcgaatgaaccgcagaaggactaaaattaataattctgtatagtgtccttgaaatgtactgagaggataaatcttcagtgttttcctcataaaaagagaaagtaaaacaaagaaaaccgtcactgtagaaagggataatgtgaactagcttgaccgtggtgacaatttcacaatgtatacatacagcaaatcatcaaattgtacatcttcaatagatacaatttttgtcaattttacctcaataaagcttaaaagctaaaataaattttaaaaggtatatatttaagccaaaactaacctagtgaaaaacaacagttgacaggggccagagatgggttggggttgctggaaaaggagcagaagaaacttctagggcaatggaaatgtctgtgtctctactaagacagcgtttctatggtacacacgaggcagtgtttctatggtacacatgagacagcatttgtacggtacacacatgaggcggcgtttctatggtacatacatgaggtggcgtttctatggtacacacatgagacagcgtttctatggtacacacatgaggcagcatttctatggtacacttgagacagcatttgtatggtacacacatgtgacagcatttctatggtacatacatgaggcagtgtttccatggtacacacacgagacagcatttgtatggtacacacatgaggcagcgtttctatggtacatgaggcagcgtttctagggaacacacatgagacagcatttctatggtacacacatgagacagcgtttatatggtacatacatctgtccaaaaagccaataactatatacttgaaacgggtacattttatgatatgctaattataccacaacaaaattgatttaaattttttctaaatcaatactaacttgtagtaaataacgtattaggatttgctcaagtatatcttccatgcacgatgacaagccatattacagcctccagctgaaccccctagaagacataatcgtgagtcgaggcttcctgtgtcagccgctgtggtcaagtcaactccatctgcacaatttcatgcagcagcagcacctgagttgattcaacccattctctatgccctgtacccctgtaagcaggtgccatctgcacattcaggtgcttcaagtcaaacagcaggtgtttcaaaagtgtgggactgcagaactggctttctagggccgggacaagctgttcttctagaagttcactgtccagctgcttgcgatgcaaggaacgcggcctctcttcccaccctgcccccagggtgttttggctaccatgcagcagaaggagccaggttcggaggtgcctcatctggcaatcaccaggcagggaacagggcaagaagacggacatccaggaaagagaaaaccagcttcgcataacagactcaaccccagccgcagacctccaagaatctgaactctgcttagcatctgtgggttgcaaattggctgggttttcatcatatctggcccttagaaccggttcctcagccactgtgtttttattttgctttgtgtttttttttttttaatatgaatgtcttcaggcagcacaggaatctggggttcccactgcaccccattatacattgtcttatgcccagctgattcccatattaagctgcattcctggtgcgtaaatatctttgaatttctcagctttggtttagacaaagcatgttcttcttggggcacaggcattgaagccaccagacacccagtgaaaacgagcaacaagttgtgaaattacctgcattttcagcttcaatcccttggcatacctgggggcattggtggtaggacctccatggataccaaaatcctcggatgctcaattcctgatatcaaatgaaatagtatttgcatataacctatgcacatcttcctgaatactttaaatcatctctaggttactcataataccaaacacaatgtaaatgctatttaagtggttgttacgccgtattgctttcatatttgcatttttattgttatattgttatttttattgtttgtgggtttttcctgaatattttcaatctgaagttggttgactctgcagatgcagaacccacgaatacagagcactgtctggaaagtgaacaacaaaaagtattttcctaaggagtcataaaaatcctttttttgtctgagttaggagcaattatcttgatggcgcttcttgaactctgcagtatcaagtggagatttacgtaagaggaggtttagatggttaatgataaccgttctgccaatgggtcattgcacagtatcatacacatgaatatgcatgtctccatctagacatctctagagccacatccacttgttgactgatatcatacagaacagatcagctccttgtcactggttcccagcagagagctttagaaacccctggcacttcctgagtgatgtgttcttggtattcatgaggagcctctttccaccacacctgggtttcgtttgtttgttttgtcacccaggctggagtgcagaggtgtgatcatggctcactgcagcctcgaactcctgggctcaagcaatccttcagcctcccgagtagctgggattacaggtgcatgccaccatgcccagctaatttttgtattttttgtagagacatggttttgccataatgcccaggttggtctagaacccctgggctcaagagatccacccacagcagcctctcaaggtgctgagattacaggcatgagccaccatgccagccacgcctgggtttatgctaaggaggtgactcatgggtgaacccttagataatttcaagggaggggctgacagcaccacaaagaccatgcatgggtttacagttccactccccaaacccctgaggaaggccacagtgatttcatcgactgcccttacataatgaaaccccacataaaactctggactgcaggctcagcagagcttcctggtggtgaacatcttaatgtgttgagcatgatgccctggattccatgaggagagagcgcaaaagctcggcatccctcccatccataccccagaaactgccctagctatctcctccatgtggcgcttcctgagttaaatcctttatcagaaaactgtaatcagaagcacagcatgcttttggtggcttctgtgggctgctttattgaacctaaagagaggttgtaggaaccccaaaatgtgtaggcacgttggacagaagtgcaggtaccttgggtattttggctcaggtttggttaagggtataaccttaaaatagagggaatcaatggacaaagcccctcgccccctacagctggcatctggagtgaaggaagtcttgttggggacccagccattaacccacggggtctgcactaactctaggtggtcagtgtcagaattgcattgaatcgcaggacacaccattggtatcagagctgacattagaacacctgtggagagagacacagacagcaggcagagtcgctcaaatgctaatgaggcttctgtcccagaaatcctggtcctgtgaaatgtgcccatttccctttggaattagcctgctgactgaggggtagcagaaatctattgttcaccacacctgcaatttcaatgtgggccttaagccagagaaaattaatatggaactaaacagtgattcgttccaggtgcgcccatgctccttttcaaatcccgtgagagtgaagtcagaaattcttcggaaacattctcttggttttatgctgaagttgctgggaggatggaggtcatcctgaagttgactgtcatcttgatatcatgagggcaagtctgcccaagagtgaaatcaacacaaaataaaataaggcaagctgtggaaagagggtgtctcgatgacatatttcacactgtgtgtgtccagctgagacagaaggcagagtacctcagccttgtagttaaaaaggcaacgaatccccctttctgtttcagatagtctgagttgtgttttctgtcacttgcatctgaatggtttctgaaaaatacaccaagtcgaaatccacttaaatgtttctagcaagcagaagcaacttaggaagtgtctcaatattggttctattctgtggtatcctggaactagttcatactggcttgcaaaagccaactgtaaaatcttcaagaatttagcaagtcagctgctgaactctcggtagtttgaaattagccatgtgggcgtgagaaccaatttttattaaacatgtaccagcacaccatgggctccagatctagggtcaaaaacctatcttcagaggctatatgggaagttccaagccagtctctgaaccccactaaaaatcccccatggcccttccggcctggatgtgatctttccataggcagcctccataggccaggcctacaggaacggaagaggaaagggatggaacagacaatgtctgcaggaaggcctgtgtgggtccacactccccagcgagctgcttcccttcatttacagctccactcagcaaagaggcggctccttaatgctatcaactctcccatgcttccaggacataccctgccaagtcccttccaccaacctcaatcacagaccaataaaagatcactttccagtttagtgacgtctcagtgtcacagcgggtgacacaaataggattaaattcctctattcagttgctaaagagacagacaacaaagcctctcctaacacccaatctctttttcctgataggagtaaatctccccaagacaaagtgggccttgggaggcacagaactcctaatccagtttacacagggggaggacaaataggagacactgacagcatcgtgaacgtgaacttcccaatggaacaactctcctgctctccagattaaacatcacgatcccctgccgtgcatcccctgcctggggtccccagctgtggcattatctcctcagcattcactgttcacaaaggcttttcaactgactgcagaataacgttaagaactaatgttctatcaagtctaaaagctgcaaaggtcaaacttgctcccaccaagggagaaaacaaacacgaaggatgctgtttagaagagtcatgttgttggggtctgtgtctatctgaaagccaccaactaatgtggttaaatctttggagcgaaagtcagtaagcagcaatccctgcaccattttcaagtacctttgtaatgtaccgacgtaagctccaaggttctgggttaaatggcgcacaggatgttgaccgtccatgcgtgaatgagtaagctaatatccaccatgtcaacaaacccgttaataaaacatgtacctcatgcaagattcaaatatgttagagctgggcaagagattggaaatgatgctgttcatacttcacgcgaggcagatgaagaaagagaagcctaggtgcctctcaataaaaagcaaaaagcattattcccttgtgaaaaaaatgatccttcattcagcgtgaagaaggcggctctcctatgaacacctcactcttaatcttgttgaaagaccctgagcaagtcacgcgcctggagtctgatagacccattacaaaaagaaaggtagggagacgctatgaaattcttgcgccccaattattgcagaggggacaccgttttgattgaattgctcagacggttatttttcttttaatttatcgcatcagacatatgcagcacggactatcttcaggcctctttgtttcatgctctaagatctgatagaagagggggcctccgaacagatgcattattctgattgtgattaacaaaatggaaaggaagagtgtgtgccaaggggagaaagctgttgggattgtcattatcacaccatttcgctgatttgctgcaactcaaataagggcagaaatgaagacaattaaaagagaaccagactgccgtcgcctacattactataaaaacaaacaataggaatttaagctgattcgtcaaaagcagcaggaaatttcagcaacagaatttttaaaatcccagttctttgcagaaccatttcaatggctagacgctgaaccagcgtgaacctgggcacaaagaatggatctgtcttgttgagaatctttactaccttgtttcaaattacctcttttacaaagagactgaatgagtgggtcaaccacaagggatcaaatgcgccagaagtaaaactcacaaaggcctgatttcacaaaagcaaaactatgccctttgttttcatttttcatttttgtggttaaaaaacacacagagagaactagagagggtctttcttgtgtacagattttatatcatttgccagagaaaagtattctaggctgaactgagaattcatgagacgataaattttaaaaatgtaaagtgaatcaggcaacttttaaaaaatccttccactaactccccattcatttgctctaagtgacttgtttccacccatctttgattccatgatctaccactcttcctctcccgcactaaacctcaggccctgctcagacggggattacaacagaaggctacaaactttctaagatgaatacatcatgaagcaccaacgtgcagcactttgactgtaggtaatgaggccgtattgtggacttgaaattcactaagaaagtaaatattaagtcttcttaccacaaaatacgataaatatgtgaggtaatgcatatgataaatagcttgacttatccactccacaatgtacacatatagcaaaacatgatgacgtacaccataaatacatacaatttttacttagtttaaaaataaatcgggaggctgaggcaggagaatcacttgaacctgggaggcggagactgcagtgagctgatatcataccactgcacttcagcctgggtgacagagcgagactctgtctcaaaaaataaaaaataaaatacataaataaattattttaaaagtaactgtgtgaggtgatgaatgcgttcattaacttgattgtggtaatcatttcacaatgcatatgtatatcaaatcatcatgtcatcctctttaaatatacataattttgtttgtcaattatacctcaataaagctaggttaaaaaaaaaaaaaaaacggaggtcaaaaagctacagtccctggactaaatgcaaactgacacttacttttatacagccccaaaagtaaaaatgtttttcacatttttcttttttttttttttttttgagatggagtttcactcttgtcacccaggctggagtgcaatggcgcaatctcggctcactgcaaattccacctcccggttcaagtgattctcctgcctcagcctcccgaatagctgggattacaggcgtgcgccaccacgcccagctaattttgtatttttagtagagacggggtctagaactcccgacctcaggtgatctgctcacctcggcctcccaaagtgctgggattacaggcgtgagccgccatgcccgggctgcacattattttaatggctaaaaagaaatgaaaagaaggatgatattgcatcacatataaaaagcatgtgtaatttcaataagtaaatcaagctgtattctagcagaggtacagacatcggcttacatgttgcctgggtgcttttgcaccaagacgacaattgagcagtagtgacagagaccgcatggcctgcctgcaaagctgaaagtgcgtgctggctggcccttaacagacaaagtgcgcaaggtcgtggcttagaagccacattgtattcaccctgtagggctttcacactggccctagaaagcgctgatgtccgatggcctcacaagtgcctcaggtgctatctgttcaggctgccttaacaaaccgtcatagaccagtggcttagaaacaacagacatttatttctcagagttctggaggctggaaagccgagaccatggtgccagcgtggttagttcctggtaagggcccggctctgcgttgccgacgtccgactgcttgtggtattctcaccaagtcatggaactggtgctatcctgagtcccatttagagaggatttgtaggttcaaatttaacaaatgttaaagggagacacacggacatccagcaggcatggcggggaagagaggcgtggcctctgtggctactctgtggcctggagctgcagttcaagtcacagaacaagggaggctggcttggggatttggcagggaggcaacgggaaaagcatgcgcctcatcccagggaggcagtgagaatgccagcccagccagggcttccgattttcgagagacagcagaaatccaaatttatcttaattttcttgatttaaaaaatgttgacaactcaattaagaaaacaacaccaacaaaattctgttgatcaaacacaacatgtccatcagcagcgggtggctgaccagcttccattttgttaattctggcctggagatttccaatttaatcaacatggtagtgtccatccatccagccatccgttcattatttccaagagcttcagtgtattctaggctgtgttttcagcattgttaaaatgctgagacttcattcgacagacctaaaacatggttcctggtctccaatagctcactacctagttccagaaacaagacatataaataaaaaacctaaggaaatcgacagaagggaggcccttaggctgcgtgtagattcttactactaaagcagcaagaagtgagccgagaaatgttatttccattccaaatccaattatctggtgatctaaactcgggtcttagcatcctcatcaccaaatcctatcattgggaagaagaactgccatcgttttgttgatcctaacaaagtccaaaagaaagaacaagcaaaccattatttccaattcagcaatctttccatacctggaagcttgttttgagatgcagcagaaatgatggctaaggattattggttgactgtgatttctctacagtaatctccacggctattacactacctctttcatgaacacatttgtcaggaccttatcagcaacaagtagcataaacccaagaccaacttgcttaaagaaaaacaagagaatttattggctcatgtaactgaacagctctggaggtatgggttatggcttcaggtatggctggatcaagcctcaacaacgatatcatgtttgtcttctctctgtctctttgtgttggcttcattatcaggctctctggggtggcttccagcagcttcagcttggcctcatccttactgctgttagtgtccacaaaatgggaccttatttcttccaagatttccaccaaaagtcatgaagctctctctcctctactggaattaggtcaggtattaacgcctgactcaatcactgtagccaagtcaatctgttgactgccctttcctagttctcaatctctggaagcaaagatgggctgagcccaacctcactatatgaactgatacagaggaagggagggttccccaaaaggaaacaaactgttgttatgagcgtgggaatagatgcagagcgtgggaatggagtgtgcaaatgcaacttctatccgtgaagaagagactatattccctccccagcccaaaacaagacacattttacaaagaaacaacctccttcagatgttatgaagaaaaggaaactattaatattagtttaactatgaatattatatttataattatgtaatattatagtataatactatattaaaactattaatattattccagagctgagacagaatgaaatagaaagttcaccatggccgtggtacaaacactttcagagaaccacacactgtgggtaagaagaacttcaaagagatttctgtgaccttccttaaatctcaagcatttcatgtacacgtgtcagaccaagaatccacctgatcaacagctgactctaagggccgctggctagcagaaggaagcacccattcctatttgttcagctgagaaacatccttaaacgcgtaaaacagataaggtcacagagaatctcattcatctggcttcccacagtcagcctgcaaacagacatgggtcagaacagcagggacagcaatttgagaatagcggcttaataatacctattaaccaaacgcgcgcgcgcgcacacacacacacacagagagagagagagagagagagagagcgctataagctgaagcccatcttgcagcctctctagagagctcttaggcagtgatgacaactccttttggaaagcttactcctgggtgtcttcatactggcacagaggtagctgtttctcttccagtcatgccaggataagttattctaatgtcttcatattaaccactccccatgaaacactggtaaggctgcatgaaatgatcttcaagcctggagtgattcctaaagcacagaatctatattatagactggggtcagtttgtggcaattttgccctgagaactgagaccatctgcatccacaaggcgagaactaagaccagctatttaatatatcaaaatgcctgtactgtctgttccaggaaattcctgcccaggaatacaagactgtgaaataatacatgatctcactgtttgcttcaggaaatttttgaaaacggatttatttaaacaataaatggctcacctgggctaaaagctcacttatgaaaagactgtgcatcaggattcacctcaggtcccttgttttggtgtgtctcctctattgaaggacctaccttaagctactcgggctcaaaccccaaatctcttttaagtatctattctcgaccttcctttcctgaaatcctactgagattctcagtgattgctttacgttactgtaattaagctttgcttaatgaaggagttatagtatggtgatcgggaggtggacagctgccaccttcactttctctgtcctattctgtgctgtgggttcactgactcctgcaagttacatcccaaggctccatgtcgctggttttaggctgggatggaccaatgacagctactggcaggagactagaggatggaaaagagagcccagggctgtcccccttgccctaggcctggggtgtcaccccaagtgtctgctgcagattgcttttttttttttttaaagacacagtctcgctttgtgcccaggctggagtgcagtggcatgacctcagctcattgcaacctccacctcccgggttcaaacgattttcctgcctcagcttccccagtagctgggattacaggcacctgcccagctaatttttgtatttttagtacagaaagggtttcaccatgttggccaggctggtcttgaactcctgacctcaagtgatccacctgccttggcctcccaaagtgctgggattacaggtgtgagccgctgcacccggcctacagattgcttcttggaagcacctgcaggatacacctgtcttggcacctggaccctggaaacaccatctcctccctctgccctccagcctagagagggcagcagctccctgttgtagctactctctcagtttcttccccttccactgtttgacacacagcttcttcatcatttgtagaaccaatttattttaccaaattctctgtgatggaaatatgtgaaatgcagtctattttccttgttaggccccaagtgatatatttaaaaactccactggggaaataaatgtcataaaatcaatcccagacataagagtttgtgttcctttcctagatcacagtctcacttccccaaaaagtctatgcctcagtcctacacattagagtcagatgggaagatttttaaaacagactggggtcccacctcaaatcaaatacatcagaatctctgggtctgctggctgaaaacaatgtttattaaaaggctttgtgtaagatgcagagaactggaaaaagtatcacttccatcctaacacaacatcaaagtgggataaactacaaaataatagtttcttgaacacatcaaagagctgaagttgcagagaaaccaattagcgtgaaatcaaaggaaaaacagagtcctgcaaagcgagaagaaacgtgagtaatggctcagttgcagcaggaggaagagactccaggtgccatgccaggagacgatggtggaaaaggtggaaaaggtggacaactctgaaacacctagggggaatttggcgatgccatagaaactaagaaaatgccaacagaaatgctagaaataatataatcatgaaaactcacaatcagagatgaagaataccttcaataggctgatttatagattaaaaatgactatgaacagaatcagtggtaggaaagtaggtcaataagaaattattaataatggaaatactgaaaaagaagacaaccaagaaaacaaacggaacagagcattgaagaccctctgaggcaatatgaaacagtctagcatacttgcaactggaattccaacaggaggggagaggaaaacaggaaagaggagctatctgaagaggaaacatgtgatgattttccaaaagtcataaaagattcaaaccacagaccccagaacctcagagaatcccaagcaggataaataaattttaagggacatcttgacacatcatgtttaaacttctaaaaaagaaaaagagaaaatgttgagggcagcaaaaaaaaagacacattacacacaaaacaacaaagaaaagaatttcagcagacttcttgtcagaagctatacaagccagaaggcaatgaagagatatcattaaagtactgaaaggaaaatcatcaacccagaattctatacccagtaaaaacagctctcaacaatgagggtaaaataaaaatattttctgaaaagtaaaaactgaaaatgcataaccatcagacttctgatataagatatgttaaaggagagtcttcagacagaaagactgtgttacaggcagaaatgaatatctgcacaaagaactgaaaacttccggatgtgattaaaatgtagggagatataaaatccattttgtcttatcttgaattgctctaaaaataactgtatgaagccaaaataacaacaatgtattttgggtttatagcatgcccaaaaataaaataaatggcatcagtaaaaccaaaagtgggaaagaggaattggaatatgcagttggcaggtgattacaccacacgcgaagtagtaatattgctcagaaattagattgtgatcaattaaatgcctgtattgaacaccctatggcaaccactgcagaattttttaaaagataaataataacccattagtagagataaaatagagttattaaccatattctaagaagcatgcagagaaaagggggatgccagaaggccacaaagaacagatagaacaaataaaacattgctaggaagattgtagatgtaaatccaaacatataaaattatatgaaatgcaaattgtttaatcagaccaattaaaaaatacagattgtcagaatgagtataaagtaacgcccatttacacgctgtctacgggaacacattatgaacacaaagacattaactagttaaaaataaaaggatagggaaaatacaccaagtgacctgaagtagttatattaataatataagaaaaataaacttccaaataaccaataacactggggaaaaaggatattacatatttataaaggagttgatacacttagaatgcataataatcctaaatgtatatgcaactaacgacagaacttcaaaatacattcagccacaactcacagaaccataaagagaaacaaaaaaatccataactattagagcaatgttgaagaggtactcctctcagtaatagaaaatatacataaagaaaattcataagaatatggactatctggtatgaaccaactcatctaattgacatttacagagcactcctcacaacagcacaaaataacattctattcaagagcacaacaagcattgagcaaggtagactgcattctggaaaactgaaaaaaactcaaaaaatataaatgcattaacatcctacaaagtatagtctttgaccaaaatgatattaacctaaaaatcgatatcagaaaggtatctagaaaatcccccaaacatctgaaaatttatgacaaatatctaaataacatgaatcataaggaagttataagggacattaggacacagataaaagagttcctagagaaaaatgtagactattaggaactgatgtaagtagaaaagtctcaaaaactgatctaatcttccacataaaggagtaagataaagaggagaaaattaaactcaaagtcacaaaagaaaaaatagtattagagcagaaatcaataaaacaacaaaataataaagaaaaatcaatgaaaatgaaaagctgcctctttgagttaacagataaaattcataaatctctagccagactgactgagaaaaaaagagtaaagaaacatattgctaataacaggaatgaaacagggaattatcgctacagatctaaaactacaaaaaggctaataaagcaatatcataaacaatgttatttctatctatttgacaatgtagataaaatgaaccaattcattaaaaagaaaacactaacaaaattcagccactatgaagtagataatttgaataatcctgaaactatcaaagaaattgaacttacaatttaatagcttctgaaaaaaaaattcagacccagatggtttcaccagacaatgtaaaccaaacatttaaagaagttctagctccaaatgtgtagtctcttccagaaaatagaaggaaatactcctcatctcttttacgaagcccgtagtaccctaacaccaaaagtagacaaagacagtatataaaagaaaactacagcaaatttctttcatgaatttagacagaaaaaccctcaacaaaatattagcaaatcaaatatatcaatatataaaataattatatgccatcactaaattgggtttgacgaggaaaataaggatagtccagtatttgaaaataaatcagtgtaatccaccacgtcatccagcttactaagacaagtcaggaataagttctagtggtctaaaccactgtaagatgactagttaacaataatacatagtttaaaatagctagaagaaggacattaaatgctcccaacacacaaaaaatcataaacatgtgagatgataaatatgctaattatcttgatctgatcactatacattatatgtactgaatcatcactatgtacaccataaatatgtacaattattatgtcaattgaaaacacacataacattgtttttaagaaggaaaaccagatgatcatggcaattggtgcaatagaagtagtctggcaaggttcaatgcctgtttatgaaaaaaatactctcagcaaattagcaacagagcagaacttcttcattttcacaaaaagcatctaaaagaaacctacaactaacatcatacttaacgttgtaaaatgtgatgtctttcccctaagtttgggaatagagaaaagatgtatgctctcaccactcttattcaacaccgttctggggaccctggccagtgcaatacacaagggacagggaaaagggaaagaaggaggggtgtggacaggcataaagactgaaaagcaagaaacacaattatattcaaaaatgacatggtcatgcatgcaaaacattaacagatgtctcacaaaaaaattactaaaacaagtgagtttaacacataaggtcaacatacaaaactcaattgcatatctataaaattgcaataaagaattataaattcaaattttttaaagaatattattccccaaagcacccaaaaatctggaagaccagtagaaatctaaaaactacgtgcagcatctgtaggctgaaactaaaacagtgctgataaaaatcaaagaaaacctaaataaattgtcagacataccatgtttatgaactacagaactcattattattaagatggcagttctcattatcattgaggtggattttctgcaggttcaatacacttccaatcaaaatcccagcaagatatttttgtttttatttgctttagaaattcacaagctagttccaaaatttcatttcaaatcaaaagatttagaatagacaaaacatttctgaataagaataaagttaaaagtttcacatatctgattagcatttcaagatgtcttctaaagaaaattaatcaggacaatgttgtattggtgaaaagacagagacacacatgggggaacaaaagagagctcagagtatatctaccatatacggtcagacaaccttgacaaaaatgtaaagtcgatttaaaagagaaataacaaactttacaataaattatgccagagcaactggatactcaaatgcaataaaagtgaatattgacctatacaccccaccatacacaaaaattaaccaagactggattatagacctcaatgcaataaaatctgtaacagtgtttataaaattagagacaggatctcgctctgtcacccatgcaggagcacagtggctcaatcgtagctcactgcaatctcaacctcctgagctaaagcgatcctcccacctcagcctcccaagaaactaggaccatgggcatacaccactatgcctggctaatttcttgattttttgtagagacggagtctcactatgttgcccaaaatgacacaactattaaacttatggaaaaagcacaaaaaagaaatgctttatgacatttggtttggcaaagacttctaagatatggcaatatcagttacataatagaaaagaagataaactggatgtcttctaaataaaaagtcttctctgcaaaagacatgttaaaataaacaacatgctatagactgagacaaaatattttcaaatcatgtatatggtttaaagacttgtctacaaaataaacaaacaattctcaaaactgaatagtaaagccacccaaattatttggccattttaaaatatcaaaaggatttgaacagatattttacccaaaaacatctacagatggcaaataatcacactaaatgccactcaacatcattagtaattaggggaatgcaaattaaaatcacaatgaagtaccactacacatgtattagaatggctacaataaaattacaatatgaaaatatcaagtgttggcaagaatgtggaacagctggaaccttacacattgctggcagaaatgccaaatggttcaaccattttgcaaaatagtttggcagtttcttatcatgttaaacacacacatctcatgtgaccccagcaatgtcatccctgggtatttacctacatacctaccaagaaatgaaagcatgtgtttacaccaaaccctgcacacaaatgcttatagtggtttcattcataacaaccaatactaaccactctggtgtctttcagatagctaatgggtaaacaaactctggtacaaccataccatggcatactactcagtaataaaaagaaatgaactaccagcataccaacaacttgtaagaatattaaatgcattaggcaatgtgaagtaagcctagcccaaaaggctacatagtgtatgacagtttatttaacattctggaaaaaacaaaactatagggacagaatcaaatgtgtggttcccaggggatgaggaaaaagagaggggcccattatcaaggggcaagaggaaacttttgagggttacagaaatgttctgtatcttgattttggcaacggttaccagaccatatgtatttctcaaaattcacagaactgttcaatagtagagggaattttactctatgcaaattatacttcaattagcctgactttctccactcaccatatcttcttatgtgagtctaacgtgtagccagagtgcagaatcactgcctcaacccttgtacacacaacagatggcttcccttgaaggacctgctccagggttctcaaccttgattgcatatcagaatcactttgggagctttgaaaactaccaatgcttggaactgatcctggcatattctgatgtcattggtctacaccgtggctcaggtgctgactggactgttgcaaaactctagaaatgattctaatgtgtacccaaggctgagaaccactcgtgtaaaaacaatggtcttcccacactactgctcctgcaactcctaatagaacactttttaaactctgtacccacttgcaaatttcaaaagtggtatctaatatttttcatccagtttcaatagttgctaaggatgaagtttctagtgtattgtaaatcttgacattttaaaatgaaactgttacatcactcttttaaatgtatccattggaatataaataacagaatggcttgacacccacgaccatccacttataaaacccatgaaaaactcttcactaataagaaatgttactttgttccattttctccttgaactcatgtttccattccagttatttcacagaattttaacctaatgtaataaccttgaaagtaactgtccattaccttattatgtcttcttaccacaaaaatgtatggttatatattgaacttaaactttttaaagtttctcctcactgtaagattctcattatgcaaaaatttctttggattggtgtcattacaattatgactgttacacaatcaaaacaatgaaaggtaaatacatatataacacattttaataaataccttttaagataaaaagtattttttattgcaaatgtatctcttaatgggctatgggatggtagtgttaagctccttgattaaaggaactgtctaattgtacttttgcaactgtggaggcttttacttctgaggggaatgaatcatagtaagaccggagatggaagagaagtgtcttgctattgtaaaatcaaagaactgtgtgtgagagagagaagacagaggatgaacaggtgattttgaattaacctggacagatcataaaatatacagaatatcagaaaatatacagacgttaaggatgtaaaacaaattccctttaaaacatccccattcccaaactcctaggaaggtctttgcatcgcccctccattcatataatgtagtttaaacagcactgatctacataaataacctaacaaatcattaaacaatccttcacactaaaggtaaataacttggtattgccatgcatcgccagggccagggagaacacaaatgagggaagctcttaggagtcaagaaacacagggcactctttgatatggtctggctgtgtccccacccacatctcatcttgaactgtagttcccataacctccacgtgtcgtggaagggacccggtgggaggtacctgaatcatgagggtggttacccccatgctgctgttctcctgatagtgagtcctcacaagatctgatggttttatagaggcttttcccccttttgctgggcacttctccttgctgctgccatacgaagaacatgtttacttctccttccaccatgattgtaagtttcctgaggcctccccagccatgctgaactgtgagtcaattaaacctctttcctttataaattacccagtctcgggtacgtcctcatagcagtgtgagaacagactaatacactcttgtatttcatatccctacttttgaaagagatctgagtatagagaactatttctccactctaagaaacacatgagttaaaacccagtgatcagtaaccagggggaaaacataaaaacagcactggcaggaggagaggagcctgtgcagaccgcccgcccctccctgtctaccgtggaggcagctgctcagctggagtgaattactcacacgtggcaatcccaggctagtgctgctcctacctccagagaagcaggaaaatccacttctatgaaagtcctctggtttcaaaatattgacaagacattcacagtgcagccacattaaacatatttgtaagccacagtataacacttgacattgtctgccaatcacaaaccacacctctgacatcaaagtacataaagaaactggatgacaaaataaaattttcctctctatttgttgaacacatattgccccatagcctccactgctgcgaagttcggttcctacccttttgattcacgtggcaccactttaattttaaattataaaataataataataatagtttccttttcctatcaaaaatctctttaacacatgcaaacaattctaggaaaattactttaagatagtaaaaaaatgtgacattgggtccaaatgcaagctgcaagtttttgttctttccaaagtttaaatatcaggctatctataatatcagcatatctaggaaatcattgtcctcattgtcttagggttgcatttatccaaactacaggcaaaaaacaactccctaatgtattctccctaattaagtaaatcaagcaaaaactccttattggaatcagatatgcagaacttaacgagataaggcagaactcatttgtaagctgggatttttttttaacacagctgtactcaaaatcactgttttccctcctattgttgacactgttcccctgaaaatgtaaataatattatttgagctgttctctctctttcaatagaattctcagtagttttactgatctcacatttcaaaatattgaatgcttgtaaaacaagcaattgtgtgttttgatgcttgcttttaacagcacataatgcaaatatttaatcacaacagtaatttccattgtgcatagtttttacatctaattaaggactctgaaaaattacaatcattgaaaacaaaagcttacatttcatttacacaaacacccaaaggatagagtaacttctccaggagggtaaaattctactgaagtcactattgaggcaacaacataaagccctctttttggttaaatattagagaaaatttgaatatttgaatcttagattaaaaattataacagccctgtctgggcgcgatggctcacacctgtaataccagcactttgagagaccgaggcaggaggatcacctgaggtcaggagttcaagaccagcctggacaacatggtgaaaccccatctctactaaaaatacaataaaaaaaattagctgggcatggtagcatgcatctgtagtcccagctactcaggaggctgaggcaggagaatcacttgaacccaggagacagaggttgcagtaagccaagatcacgccattgcactgcagcttggagagcagagcaagactccgtttaaaaacaaaattctaacagccctaagggtggactgttgctgtcctgttaaccacccggtacccactaccttctctttggtaacagtgtcccaacttgttttccataatataactcttcccctactttcataccacgtgattcaggtaggtcctccctccaggctctaaagtgagctggttctatttatttattgcataagtttaagccagtcatcataactagcccatccttctggccacagtgacttgagtcggggaagtcccaagaagcattatggtcttataagaggcaggcccagagctttgatggaactaagagaaacgttctttctttttactaaagttaggataagatgtaattctgagctaggaagccattttgtctagatgagggagagtgtctgaatagaacacaggaaggacagctaagagattctaggtccgtagagcctcacttgagcacctggatcaagccttgcctgatgccatttttgtccccagaatctcagttaagtgaacaaatacgtctccttttgactggtagtgttgaccagatacctatatgttcttctacgttccccagtcctctctgcagttggatggcagtcacgtttccaaatgccagccaatgagatgtgggcagaagtaatagagcccacatctggatgttaaatgcatcctacatggtccttgaaccctcctttccccagttgtgctgacctggactctgagtgaacaacaaatgaacctttcccatattaagccactgagacaccggcattacctgttcctgcagcacagccaacctggcctaactaatgtaccccttaggcaatttgagaatttcctcttcacctgctactaaaatattattagaaaagttttccttaaatccatgaaatgagctggaactcttccatttaatccacagtttcttggacattatcttatagtttgcttcagattctaaagaaagatccttgtaacggaagatctgctttgctttttctctttatagcatctgttcaatgctgaccaggacagtagtccagaggcctttgggatgacaaaaaaaggaacagttcttcctcttgagggcctcctgttcaaagaaacacaaagaatactttgaaatgctagaaaagtaagaacctatctagaaaaatcataaccaaatcagccatttattgagtatgcatctgtcaatatcatgaacgggaatgcgagaaacacaaaattaggatccttgcatcctttcctagaagcctcatgaaaagagaaacatgacatgtacgagatattctaacgtggctttttgcaaggtcaatagtatcaaaaatcaactttaataagatgagtatttctgtgagtatgatgagtatgaagattggcacacagaacaccagttctaggtcccttctggagtaactccttgaatcaaagaagccccagtcctataaattggatgtgcagggatctctcagagcttgggtttttggcctggcctaggtcctgttgagcaggtgcatccatctggaacttggcgcagggcagtgagtgacatgaggccatggtttcacatgggatccgccctgcttacatattctagagtgctgtctttggttatttacgggtagtcctgccgggccctacaccataggtgctgaaaggaaggcaatggtactattgggattggggccagaataggaacacactgtggctgggagttcccactggctgctggtgttcctggcacccaaccctggctccctggtactcaaggagtctagctgctacctcctatgctctaataaaactgtctctaccacagtgggatctgttgtcagcagtgaagaccatgaccaacacagaagaagcacaattgtggaaaagagatttctaaagagttacacgaaagccaaaaatgtcagtccttcctcacatcacgcaatcagcgaattcttctgcagctgtattatacagcttgccagagatatttatcactgtccatgcctcattttcccccactagactctaatctcatgagggcagagttaatctcatattcatctctgtatcctcagagtgtatcatattacgtttataatttgtcctcaaaatgattgaataaatagattcatacgcttggttccttatacctctgatgtttcctgttgaagataaaatactcgaaccaaatagatcctaggacggaacgtgaaagtttcatgcaggcattaaggcagcaggggcctcccgaattccatggaggtcaccgaatcagggaactctcattccagatgaaaatatagagaaacctgttgccctgactgcttgataacagcgacgcccaaacagcaggtcctagaggagcctcctcttccccggtgactcggtggcacccttgccattccatctttaaatgcatctccttcttcctcataaccttgaagccaaagtctctttacctccacgtcatctgtccactgacgtcctctcactggggcccacttcagaaagcacacctggaagaaactgctggatgcaattctgggtcctcctcactgatcagactcaatgacctcatccactctaatccctcacccctcaagagccaactcatctcggggcaaaggaccacactttgaccaaaacagagttctgggggccttgagagcaacatcatcaaagagcaagacctctattcatgaagacttttgaatagttttctaggcatacagaagcactgaggaaatgccgttgggtgcggctgaaattgacacttgccattgctaagagcatcaggttcagcggactggacactttcaaatccggctaatatctgtgcaaaatggtgcagccctttcaggaaagaacttggcagcgaaagctctcctcatacttttttggcccagagattaagtaactgtgaggctatctaaggaagtaactcaaaacttaaattatgcacaaagataattatttcttataatagtagaaaagtataaattatgtaattgtccagcaaacatagaaactttgaagccatgatacagacattaaatttatactcataatacatttttaaacatgaggaaatacttatgtaaacacatgaactcgaaaaagttgaaaacaaattataggtaccacatagagagtgaacaaaactggcttaaaaattcatagaaaaacaactagaaagaaatatatcaaaaatgtgaagcagtcatctttgggtactgaaattgtttctttttacttctcatttcaaaaataatttgaagtagctcacaaaaaataaatgcaatgggataaattaagaaggcaagaaaacagacagaacaaggatagaaaaatcaaataaagccaaggaaaaaacttattcacaggaggcctgtcttaaattcccatccttacaaacagcaaatttagctctgagagtcctaaaagttaaagcaaagctaaacaggtggccacttataaacttcacagtgctctctggataaagtataaactatttcccaggattaatgcagctgtttttctcctgatactaaggcccaagaaaattttctccaacgtgtcctagaagaggaaaaatctatgtttaatagacaatattcttaaaacatctctaccaatctttcttgactatcactcaatactgtctaataacctcatgccaaagtataattcaatttaaaggattttatgagagtcaaattgcctagctttctacttttctggcttgatctgagtgaacagatgggccgaaggatatttcttcttctttctctcctcccctcttcccttctcctccctctcctcctcctcgttttttcttactacctttatggacattctatacctttcataaatgcacttgcataactgtaaaatttggatttttttcccaagtattattacttatttcctaagtaataataggaattacttaactaaaacacaatctctatacacgcaggccacatcatctccccatcatttatggctacaagcagctgtgttggagatgctacaatttgttactaggagcccagaaccctgggccatccatgcctttgtagtctttgcttggacacattcaaaatggacacactcacgaagtggcctgatttatgcataatggcgcctgttttaaggactctgtttgtttgtttgtttgtttgtgacagagtctcactctgtcatccaggctggagtgctgtggcatgatctcagctcactacaacctccacctcccaggttcaagtgattctcctgcctcagccttctgagtagctggcactacaggcacatggcaccacgcccagctaatttttgtgcttttagtagagacagggtttcatcatgttggccaggctggtcttgaactcttgacctcgtgatccgcctgcctcggcctcccaaagtgctgggattacaggcaggagccaccacgcctggcttaaggactcctttttgttgacttgggctagttatttcagattcctgtacctcaatttttgcctctgtaaaatggagatgctactacacaaaggatggtggtgaggatttcatgagtgaatgaaagtacaacatttagaaccctgccttgcctaaatgagcattcgatcaatgataataaaaatcaggattatgatttcttttgagtaagaagctctcccaccctccccaccctacccaccctgctcagcttccatccattcacaggaccttcctctggtgttccagctggatctgcttatgctatctgaagccacagagacaggcacatccttctttcaaaagacagacatctctgtagttaaaagaagtcatcgcttttccaagtcaaactcatggagtttcttcaatattacttgctatgataaggggtctaggtttctcattttctgaatgagttaaaattttccatttttccccttcagcagaaggagaccaatgtagcacaattctctggatttgatatcatccatccattgccaatgcaatatggtgaaaatactttatttgtcctataaattataattgtgtgaactgagccagcaagacagcagccctattttctgttcagccttcactcacacatctggaaaccacacctggtcctgccttgggtccagccctcctgccatggggcacttgacccttgctccacaccttcccatccctcagtggatggatcgaaggggagcatgattttcacgccctacagagcttatcccgaggcttgtccacagaaatgggaaagaagccttctctgatccccaccagcatcagatgaggctgggcgtgaagtcatttgtccatcacactgtccaggcctgtattattctgttctcatgctgccaaaagagacacatccaagactgggtaatttataaaggaaagaggtttaatggactgatagttccacatggctgggaagcctcacaatcatggcaaaaggcaaaggagaagcaaaggcacagcctgcatggtggcaggcaagagagcgtgtggaggacaactcccatttataaaaccattagatcctgtgagacttattcactccatgagagtgtatgggggacaccgccccccatgattcaattatctccacctggtcccacccttgacatgtggggattattacaattcaaggtgagatttgggaggggactcagccaaggggatatcaaggcctatccaccagtagagcagaaacaaagagggtctgaaaggtagagagagatgaagcaggttctggtgggatccttaaagaccccgggtcagcctcatctaaaatcagcacaactctggactcctaagtctcttaagataattcgaagcttcatgtaacagagtcctgatggtgtggagtcaggataaagcatgaggatattccacatccataatgataaaactatgattattcatgagtgctcctggccttccaggcctccgcttccataagacacattgacaagacaccccacagagctcgcaccttccttgttggtttcttgtagtttctcttttttttttcctctggcagtttcatgactgtcaactcttattaagcttattttcatacgaatctccaagtctttttacacgtgttcctctcaaactcctctctcgtacctcccaagtcagcgtgtgtgatctacgttcagcatgttgcaatatcccctttgtctcacatgttagattgtcctcatctcaggtgagcttttggtcacaactctgccacgcaaaggccttaccactccaccccttctgtgtagctgctcttctgaggtttgcgcgaaggagctcatctgtttggacagccacctctgatacaaatgttcacctgggcagggctggggacagagtcctggggtctccttggaacgtgctcaaggttcataccacaccatctgctaccatctgagctgctgggaatccaccaaagcatagcaccccccaggtacacgtcaccgttgtgtggacaacagtgctggggtgagcgctaatcccagtgcccagcatcagtaagcaccgaatacagacctcttcatttgtttgtaacgttactgaaatctctatctttactccacattctatccagtagcaaaacaaagctctgtagatactgccacactcccaccccacccaatgatttcagggatcacttctaagttttgagaggttcggagtgaccacaacaaccaggagggctttgtgattggtacaaatgatatcttgtctcctgtggtcagtccacacagactatggtttgtgcctccctggtcttgaccacaaggcctcctcgggccaattgggcttcctcagccatgcctgcacagccctggctgccaggaaaagattctgctatttgagccatgctcgggcatgctgcctggtcacctcatacgaacattccttctgcttcatctccaggctatttaggacagagtgtcttcatttgtggctctcccaatatattcacgaagtcaatctagaatatttttaatttgtcattggagtgacgtggcacagagcagctgaaaagcccaccagcatctaagctgccctccaaattctcctgccctttcccctagtaaaaaaaaaaaattacttggtgaaggaagaagagaaaggctgagaaaccatatgcctgggaagataggttcttccaaatcttttctctattgctggataccagcttttgaaatcaaaagtcaggaatttgatttctctgtctctcttttttttttttttttttttgtttggagacagggtctcactctgtcactcaggttagagtgtattacatgatcacagctcactgcaacctccaccatccaggttccagcaatcctcccaccttagcctccagagtagctgggacaacaggcacacaccactgcacctggctcattttttttgttttgttttgttttgtttttgtagagatggagtcttgctttgttgcccaggctggtcttgaactcctggactcctcaagtgatcctcccacctgggccccccaaagagctgggattacagacatgagccatcatgcttggccttgactttcctgtctcgtgccttctgctgttccaagaggcagtggctgccaggtgttcatctgcacgagaaaggagaggccagggcagcagggaatgagagcaggcagggcaatgtcgccatctgttttgatatcaaaatactttattgccacaatatcctgccaaacactctttgagtctcggcaggctattttatcactgaagcgtcttcccatctaccagtatagctttcctgaccaaaatgcaaacaaacaaataacaacaatgaaatctgacagacatcttcttagtgaatctgcagagggagattcccataaacataaacatttaatgtcactctcgtgaaaagaataacttaatgtcactaaaagttaaacacttttttggaacctcttgtctttccaaatgtacatctgaatctccctttatttatatactttacttacttcctaagagtggaacctcttgtctttccaaatgtacatctgaatttccctttatttatatactttacttactttatatactttacttacttcttaagggaggagaagtggctatttgaattctctttcaaaggcatgttttttacctttataactgttgactgatctgttctaaaactatgtacttcagtcgcttttcagatgcatgccacaggtttgtttactttcaaggtcaagggccttccttctccatcaattcttaatttatggagggggtgcaccttgggtgactcctgaaaccaatgtttaaggacagaggtgacggaagcacctagcctctgactgtggtatgtaccccttaattcttcctacagcagatttttcttttaaataaatgacaaagtcatctaaaaatattccgagtctttggtcccatgtcacaacaaatccatgctggtttcctcttcgttttgtgagaggccgcaccatatcatctccacaattcattcaagtgtgctgtctggcgtcaaacatcaaaatcaacaacgcatatgttcacagcatcaagcatccttcttctgcaaacaggaagagtctgtgtcttcattccgcatgcttcttcctcattctttataatttcccagagaccactgatgtgtcacctacacttttggtcctggaagaccagaggccatgtcttagtcttccctgcccaggaccctacacatgttagggacatagatgaataaacaggtcctgaagacagtccactgggcatgtctgcaagttctttaagaagcttgacctagggaggtgggggaggaggaaaataaaaataaaaaaaacaaaaaagaagctgacctaggagataaccaaaccattccacaccatcagagaatctcttctacctccctggtggtcttggaagtaaatccccattttaatccctttcaggtgttatttctgattgctgctggaaaaaataatgctgagaaaactaaataacatgatgttcatttattcatttgctcaacaaatatcaagggtcatctgtataccaggctctgagctaaaaactaaaatggtctcaagacctctctgcactcagcccctggcaagcctggcaccatgtaacaattctgcctgacaaaccgcctggtttttagttattccatataattatcagaagtcagcagaatggccaggggtatgggttctggcatcagaattcagactctgcctgtcttttatgttgctatgacttggagaagttacttaacatctctgaacttcaacttctggtccagtacatatctaccccattgagtttatctgcaaattcacaaaaattatcctcataagtcactccgcacagtgcctgccatacaacaattactcaaaacattagctggtattattgaccaaagtatttcctgcggcgctctgaattactggaaaaggcagcatcaaaccactgcactgtcaggtaaatgatttccagcaatatttcacactcttggaagcacagttaaaaattgtattgagcccctgcaatgtccaaagcacaaagctaaaaatactggagagaaatcagagatagaaaaaatacccatttttttgtcccctagaagaacttaaaatttaggagaggaggcagaaaatagttgtagaatgtcaaccttgtgaaaggcagaagtgcactcccccaaaagatattcacatccaaatccctgaaatatgggaatgttggttactttatttggaaatgttaaaaggcgacgtgactaagtcaagatgggagattatgtggatcacttgggatcctcccagtccatccggtaacgccagcccatccttcagacaaggcgagtcttcccagttactctaagtcaactgccaaattatctgcatccagagacactcgccccatcctccagagcacacccacagtgctaactttatgtttttctgtgtaattcacatgttcccctatctctcctacaaatggcaagttctctgggaatagtaaccatatcaacctgtgcttttcctcactacggtactccctgtgcccagcacggtatggggtgcattgttggtgctcagaaggcagttactgttatgaaataggaaaggagagggaacaaaggaagaggggaatgatgaatacgaaactgcccaggtctgagcttacaacttaaagcaacggagtaatggtatgaggcactttgacatctagaggaatgactggcactaaacatccctacctaaggacgctttagtacctgtcctgtgtcctcacaacacttagaaatagttcctgctgagctctgtgttcactgaaggcatgtggcctttgacatttgttgaatgaatatgcagatggatggaatgatgaatggatggatgaaatgatagatggatagatggaaggatgggtggatagaaggatggaatgatgaatgaatggatggatgggcagacagacagatggaaggatggatggatggatggatgcacggatggatggatggatggatggatgcatggatggatggatggatgcatgcatggatggatggatggatggatggatggatggatggatgatggatggagggatggatggatggatggactggtagatggatgggtggataatggatggatgcatggatggatggatggatggatggatggatgggtggatgggtagatggactggtggatggactggtggatggatgggtagatgatggatggatggacggatgaatgaacgggtggatggatgggtggatgggatgatgggtgaatacatgggtggaaagacggataacacctggattaacagaaaaattgatagataaattctaaatattgtgtagcatagcttctataataaaatatttttgaaatttttgttgtttactcattttttcttggctcttagaatataactaagttaaacagatcctcaaacttggaattctacctttctatgcacataaatatttttaataaaatcacattttgatttaactctttaattcatacaaaacaaaacttagtggtctcttcattctttgtcttttcaatttgacagaatttgaatgtaagcaaaaagccacactctctctctcccccactaactggctcccttctgatattctttcctctcccaaaaagttcctgacccctaaagaagttatcactgtactttgaagctctttttggtccacagcttccttcaataagggtggtgctgtcctacccagaagcttcactctgacccaattaacaccccagtgtcatcaaattgtgtcaaatggaatttcatgatgcagatattatttataagctcagggacagttcagttcatgtcgcaatgtattcatatcacctctcctctaagattctctgatcccttgaaagttctcacccagctggaaatcgaatatgaactatatttaacaggattttaattggaagtaaacacacagacacaccacacacagacaatgcaaagtgcctaaactgtctggggctgattgaaaaagaatattaccaagtattaaacatccgtttcagcatattattagaggccagaagctctacatatggaagcagtttcaggaaggcgctccaagaagcccactgcccaggccattggctgcactcagctggaagcaggcagagcacgtgcccagcgccaccctaggcacagggagcacgacactgccgcagccccgctcgcaatgttgcaggtctctcagcgtctgcttctttcctaccagcatgtgcaagggaacataactgggaaggatgcacgtgaggactgtaacaagcaacctaaatgtggcaaccctcttgactttgtatttaaaaatcaccttgccctctgcccaactccaatctcctcacccatttttcctctcagcccaccctccatacacctgccccctcccataaagttcacagtaatgcattaaagctcatctgcaggctagcaccattgcaaactacatcaagctgccagcaaagctagaccttaaacatttaaggccattccccagaaaaattaggggccataggacaaggctgctggggaaactccgtgtgtcataccatacttcctaggtcccaggggcatagaaatacaagcaacaaaactttatgtttatttgtttttaaaaaatatctacaagagggtgggtttgttctataactaatcattttctgcttatgaaatataaacgtgtaaggctcaagcatattaacctggtattaaaatctgccctttgtttcattcaaaaattcctatttggaaagacaatacagtagaaatgataatatgtggaaacagatatttaatacttgataatattctttttcaatcagccccagacaaatgaggcactttggggtatgtgtgtatgtgtgtgtgtctgtgtgtttactttcaattaaaatccttttcaatatagtccatacttgattgcaagatgggtgagaactttcaagtgatcagagaatcttagagggaggtgatatgaacacattgggaaaagaatggccctgtccctgaatgtataaatcacatctgcatcatgaaattccattttatgcaatttgctaataggggtgttgatttttttcttgttctttgacatattgtgactaatcctgaatcatctaccatgtgctcagactctgctaattgctgtacaaagtctccacacagaactgattcacttttgaactgtctggctgacttgcttaagttcaatacacaaaatatgtcatatgctaggcttatcgtaaacattttacgtgctaatttttggccacctagtaaagaggcttccacatcacacaggacctcatttaaggacatgttcagtgttcccagttgaaaaagttcacaagtattaggctaaatacaattctcttcaacactgctcagtctaataaagaaatcagtaacagacctatgtacctaagtgaaaaaacacaatagtgaggtcctatttccaaagctattctgtacctttcttaatacaaccttgttattgcagcataaacacaaagaagtctggacctattataaaaccaagtgagaaccaaccccccccgccccaaaaaaaaaatgctgggctgttgttgctgtggattttggtttttttaacctcacgtctgcctgagtcaggttcactgaattcatcaaccttttctttggtttcctgtgcacattataaatccagaaggctctgatcccagggattgttctaactcataattaggaaacgtgagcccatttcaaccacacttcaaagacagggaaggagggggaacgtaaattcctctttctaaatcgaaccatcacagaactcggcatttcaactgtcttcatctattatcagatccaaagcaacataacctcagtgattctggaagaactcagagaacagacaattcatgtaattaaaagactttgtgcgtgataattggctttgaagtttctgagagagatctcatctcaaaaatctttgcagaaaaatatgggtacagggttcttgcagcacgtattagagactgctgagacgcttcactctcctcccagtgtatctatctgcaggaaaggggcacgggtgggggaaccacacacaagcagcccaggtcaatcatgagaaagaatctcccgcacaaatcacaccatttctcttcaaggaagaatgactgtccagagcttccaaacttgctcttcccatgacagacagggatgctggcagaagagaagaggaaacattgaggaattcctgccttgacacatggcttcaagtcagggctccgctgggaaaattcgggtcacaacttgtagctgaaactccacgtgcaccctgcggggccgctgctgctcccagcaccctacggaagggtgagcgccagaccctgtgcccaaacctcacagcggcagacctggagaaacccatcccccttcttcagagccgccccccaggctatatttttggcagcctataatacacaaaatagtattcccatacaacaggagtgctccaaaattatttccaaataggtcagtgccaccagggaaagtcaatcccaaattccagaaatctccctggtcatctcaatcccctcctcccccgacagccggctcggccctccagaggccacctttcctctcaagggtccccacgccctctccctttacagaaaaggctttcaggaaacagccttcctttcctttcggctccttagtagtctcacctaaggcctcccacccaagtgctccaggacaagcaccttcggccaaggggcgtccgaggagcttggctgccgcacgagcgcacgttcacacgcgcgcacacacacatgcacacaagcgcgcacacacacttgcacacgagccctctctcccggccgcccccatcctccacacactcccacacactcactccaggcgaagttagtccccgggccctggcggccgcggcgtcctcacctttggaaaacagggcggccaggctgatgagtaccggcgaccagtggtgccacagcgtccccatctcagacgggcacatcctggagacccggagcgcagatcctccgctccccggcgccgtccaggcgaacaagagaccgtctcagtcccctagaggcccgcagcggggccggtggcgagggagcgcccggctaggggcccgagcagcccgggcgccctgctccctcttcccgccagtccatggccaggccgggaggcgacgaccgcgcgggctcctgagttgctctccggagtccaacacgcgcgcaggcaaaccccacctccctccttcgaccccaacagaattttttttaaattttaatccacagggggtatttcctttcctgtttacccgagcgaagagtggcccccggtggcccaaggaggggcgcctccaggcgcagggctccggcggctccagctgctcccgggctggctagcgggcgctggcgcaggcggcgccggggtggcggggctgcggagcccgggacgcgggcagaggcggctcggagccccccgggcgggtggccgggctcgctgggcggcccggggctccctggcccgcagcccccatcccaggccggccgctgcgcctcggggctcgggcgcgcgcgcgctccggcacccaaagtttggcgggtgcggctgctccccggccgccgcctcggcccgcccggccccgggcccggctggggctcgcggggctctacgcgcgccgagcgcactgcaggctccggagacgcggggctcccccctgcgcccgggggaggcgggccagatgtgcgcggaggagggcccgccggctcggggacgcggccgagcaacgcagctgcctcctgccagcaggcgcgggggctccgctccgcaaggaccgcatccggaacggaacggaggcgatcgccacggtgcccggagccggctggggctttcgccttaaaaatttgtctgcttttaaaaagccccaccctttcggagtgacagctgtgagccccaatccgcaaagtaaatcccacctccccctggccgccccacgcccagcctcccggccaccctccctgcgagcgcggacgcgcggtggcggcgggcgagggctcccagcgcgggcgcaccccggggacggagccacccactctcccaacaggtgtccagctggccaccggcctctcgtcgtcatcaaaacctcaggcccaggggaggtcctccagcccgggggcacctgaggctcttcgccagggagagcgcaaggatggctggagaagggccctcgccccgccctgcgcatctcccagggatcgcagtgaggaagtctctgacacgccacactgaggtcatgctggccccaagccccttcccagagcgatcccccaagttagtgtccctagaaacatgtcgtgtgctccccagggctcactgggaaaggaaatggatccattaggagacaacattgctttgagaagataaaagacatgattctcaacaccgcccggaatctccaactaagacattcccacaccaagatccctaagcaccgtcctgtaatttgtagcccaagaactgctttgctccacgagagcctttaaattaaccccatcaaagctcagagggaagaaaagcattcagaatttttaaggaatattgtaaaccaacaagccctgaatctaatgaggtgaattcacctcagtagataaaaatgggtcgttatcatctgactgagggggcaatggacttttttatcctgtatgcctgtagttgcagaaatataccaatgctttaagagtttttagctttcaaagtttcaaggaagatcaaaaaagccactgctgttctaccgaagattgtttttctgggttcatgtcctttgagatgtg

SEQ ID NO: 624 - DNA, 4889 bp, Homo sapiens
  source 1..4889: mol_type = genomic DNA
ggctaaataaggctacttgtgtatgaacaaatgcttcaaagaaagaatcttctcaactagcagaaaggtctaaggctaacaattagactagaagattggaagaaacctccaaccctgtgtgagtctccctgctcctgaccagtaggttcaagagcatttgtccatctggcccagaaatgcatgctatgtgtctcctgatggcagacactgtgagctagccatctcttcaagctccttcgtaccccctaaatgtttgttgtcaaaagccaaaccagtctttctatctgaaggcagagaaagaatttgtaagattttatatatcttagggatgcaaaagaaagacaaagaaaccctggttaaagtatgaagcttaacccatggaagcagtgactgcaatagttaaatatatttggaaaccaaaaaagtatctgagacaggtctcaatcagtttagaggtttattttgccaaggttgaggaaatgcctgggaaagagatgcaagtcacaggaggctatgtggcttgcactttttccagggaaggtttttaggacttcaatatttaaaggggaaaaggggcaacagggggaagaaaggggaaagggaaaaaaagagggagggtatcacatgttgtgtgaaaaggtggggaagagggaacagtcaactctgcatttgtctggcgctcagtaaatctgcactttacataagataaacgtagaggaagatgacaaatatgaccttatcttagggtggtggggtgggggggggagtaggtgggggtgatttctagtcttctgtggtcttgtacctgtgaagagctgttaatttacattgtcagggtgagggaggcccccttgggagacatgaggccgtctatcttgcagctatctgtctaggaacaaaaggaaaggcagctttttgcaagactcaatttccaagcgtaacttttccctttggcaaactgagtttggggtcctgagattttgttttcctttcgcatatttaaaggataaagaaaaagctgacaaacagcatcgagtgttggtaaagatatagtgcaaccaaaactcttatatactgctggttggagtatcagttgctacaaccgttctgaaaatctgtctggcagtatctactgactgaacattctcatattccactactaagtatataacccccccaagaagcatatacatatatgctatatatatatagatttattttactttaccgaaagacatatgctagaatattaatagtgacactattaaccaaaagtcagtaaccactcaaatgctcatgcacagaatggataaagaaatggcaatatcatcacataatcaactattttgcagcaataaaaagaacaatatatttaaatcttacaatcataatactaagcaaaaaaaaaaaaaacaaaaaaaaacagaagcaaaagagcatattccgtgagattccatttgtatcaagttcaaaagaaatcaaagatcatctacgcttttagaagtctggagatttattaaccatggttggatggacagtgatatgaaaggggcacaaggggcacttccaggttgctagcacgttctatcttttgatctgagtaaacagttacatgagtgtattaaaacagaggctttaaaaagagtgcctttgtgagcctttgacctctttatcaatacctactccccaggaatttgcaaccatttttatcacctccactttttgttttattgttgttgttaaaaatgaactcagtatgtttaataaagtttggtattatcaaaatcgcagtacaaacatcaagtcacacgcccacatgacagaattccatttataaaatgtttctcgggaagcccccactgggcccgtgcccaaagagagcctgaccacagcctggggtctctgggtgggcagaaaaggtgagtatgggggtggggaggaactcggggtagggggaggagggcggagaggaaggaaagtggagaaaaatgcagactcagaagcagtccatataacagctcaaaaagagctagccggcgatattatcacaacgatacagtacaaatcaaagcaaaaataaaaataatttggccgatacagcaggctacactgccaagaacccagatggcggccttcctgcggccatccgcacgggcctcctcaccccccatctctcccgtgcgcccactcgcttccttctcgctcactcgcaggcactctctcgctaggaaacacagaaagtattttgtgtttggagatagtaaccttagtcaaatgaatcttccgaagagtcgctgaaggaggaatgcaccttagcctctcgaagcagcaaacaaaaccactgcttcctgctggtggctggcttaggtttcagagtccgggagggggcggaggagggggtgtgtgccaggccctcttggtcagctaggggccgccagctgccttgctgtcctttgccaccatgccacacaggagggaaggcatcagtttggagctagccggaggggccttgggcgggccactctccttcaggaattcttcgtcttcctctgagtctgtattgtaagagtagctgctcacttcggaggcaaacgcggaatgggccgacttgggctggcctctggccttgaaccccacccctatcttcctggctttggcggcccttttgtgtttaccttctctggaagatttcagagacaggccggaggcccttggccagcaccttcctgtccttgcccagcaggctgtcataaggagttaagtacttgctgcagcccctgccagtttttgatttccccccagcactgtctgaaaacttgaagggtgacttcaacttgtcctgcttggtgagggagagggcctttgtcgagcttgcttgccaactgctcctggtcgctgtccatcttcttcttcttaatcttcagctgacttatgaacttagacgaagcctcgtgttcatcccaagtctggttcctctccctggctttccctgttccaataagggcattgtgttcctccttgggccctttgtgtctcttccttattcctgctcccagctcatagtcatctgatgtcggcagagatttgctgctcagctttccgctactgttgcagttcttccccctcttgcgggcgggcgacagggctctcgggggcgtgggtctgtttccacggcctgcgtgccaagcttccatgggactcctcgtgcctgtcctcggagtcccggcgccgctgcagcttcaccagctcatgctgcttctccttgtactggtgctggacctcggcccgccacattctgaagtccagttccaggacgtccatgtcctccacggaggacttcatggggtacatccgctcctccttcttgcgcatccagctgtacttattgtgggcttcagctcccgtgggagccgcaggttcttgagcgggtcccaccacgggcccatccagcacctccctcagcatgtggctgccggctgccagcaggctctccagtgagggccgagccaccagggcccgctccgcacctcccaccttcttgctcctcctctccagctccagctctgcgatctcgctcagcagggtgatgccgtgcagaaagctctgctccaagacaaggctctcggcagcttcctgcttctccaaggcctggactccagtagcacctggggagggcagaggcctggcctggggcagctccatggccacctccatgccagccagtgggtcttccaggccgggcaggaactgctcagagcttgcctcttccaggtagcaggtgctgccgggcacaggcacggcctcccggggctccagtctcgggcactctccctccccggcgggcacgtcacagtctgacatttctaggctgggctggggctcgctcagggccgcctgggccaggccttcctccggcgctgcctctgccgcaggaaccgccacaggcacctccactggctcctccttggcctccactagcgtctcgggtgtcagctgcacccccaggtccaatgcggccgtgcagggttctgtccggcccggggaatccacgcatgcttcaggcccctccgcaaagtctgggcactcagagggctcggtgcagccctgcccggtggcactcagcgcctgggcctccaacgggccacctctgcatccgcctgcagggctcggggtagccatggtttccatggcgggcagtggcagcggcaactccagaggcggcagctctgcggggcgctcgtccacatcctccacctccaccttcgcctcctgttcagccagcggctcttcctccgggtcctcccgcagcggctctgggatcttggagggggacaggaggatgagcttgtcttcgggcgagagtgtcaggcgcttggtcccatcagctgggagcagcacatcaggggccaggccatccgcatcggcggccactgtgggctgccccaggaaagggtagggcctcccgtagtgtggtggcagggcttggaacggatacctgggcggcatatctgagaacaaggcctggaaagtgctgggggcttccttatccaactccaagtccttcttctcgaccacgttgtcgggggtctcttccttgcgggtgatacccggggtggacagcagggagtggggaggcaggctggtggggtgggagctaggggtagcagggtaggtgtaggcaggcgccttggacacgtcctccagcggctggatgaccttggccttcagggcggccatgggggacgcgcggggcgatggcggcgggctcaccgccttgccatagatgctcgcagggccggcagccaggcggggggctttcgcagcagcatcccagggcaagcggtggccaggccagccttgcccccggcccccaggccccagttgctcca

SEQ ID NO: 625 - DNA, 309990 bp, Homo sapiens
  source 1..309990: mol_type = genomic DNA
ctacctggaaaactccaattcatcctctgagaccagcccaactgcccctggtctgtgaagtgtgatccccaaagccatcaggcaggcaacctacctccctggggacaggatgagacacagaagcccaactgagctacagacctactgtcctccagtgggcagatccaaagtgttcattacacaatagatcaatgaccccccaagtggacggaccaaggtgcccaccacattaatagaaggacgaccccagtaggtaaggcccaggtactcattaggtaacagattgctgagagatgaatgggggacccataacatcctcctgcagcaagtggcaggggcctgtccagctgaggtctcatggccactgggtctctccaacagtccccagggctggctctggtcggggacctaggcacatgtgcacactgtacggagcccagtaattgtgacaagtatggtgttcttgggaagcacactccctaagccgcagtgaaatcaatgccctgtccacctttccaccttgtgacattggtcaaaggtctgggcaatgactggcttcaaagactcaatgggagcttcctgttggacaagatttaatctgccaccacctgccctctcttctgctccaaagcagtagtaccgggaccatttcaagttcactctcccaacatagctggggtgaaatatctctgtgtctcctcagagtggaaagctacagtctctgggggctgaccacgcaggcagaaaactgtgcacagggtggcagctaactgccatctttatctgtccataaccaaatgagcccaaagcattgcttcttttctggtttggatctgagggagtgaggttagatggggtcctgtgtcccatcacctgactcaggagggaggggacaggcccaagagggcagagtccgtagaaaagggcaaactcccttaaggtggggagggaggagccttggctgggggaacagaagaggcaggtgacactggctgtctccagcatctgttgatgtgtaagtgaatccaccagtctcaatattcacttttagtgcccacttcaatagacactgggaggtccttcaggagctggcccacttcaggggtgtgtttctgcagccagtgtgtgtgtaggggtattcatagcaacatcgaaaacatgtcaggacccattatcaacactgcattgtggttaatcttcaaagatctttgaatataacatttcaaaggtctctgggcagaaatcttaatatattcctgacagcaaaacatttgtgattttataactgaatccactgatttgtaaacacacagacacacattcatgaacgagcacacacgcagacgcacagacacatgtggacaaagatacatctgtgcaagcacatgcacacatttgcagagacacatacacaaaagtgcacacatgcacacgcatacacacatgtgcaaacacacacaaacatacttcagggtacacaaataccgtctcacggaggcttaccaagttcataattttattatactctgaatagagatgatatttaaggagcagagaaaatgactatacaaaagatttatagaacattcatttacatactggatatattctttacagtatcagaaaagtaaaaatatgcactaacaaggcagagaagacgttacaaggtatttgatgctgagaataaatgcacagtgacttttaacatggctatagcttaacactggaggaatacaacaatacgttcttttactgagtagttagtaggaccctggctataacatgcgttgggcacagttcgtgaactctccgcatttactccccagggcagtacgtgcctgtccagcgggagccctggagacaaaatgcctggaaacgttccttttcctgtggccctagagccggtgtccacggtgggggctctctcacggtttctgagcccacagtacaatctgtgatgacacacagcttgttctgtttaatgcacatgtaacacaaaaggaagaaagaaacttcctataccagctcttcagaaatcgtggaaacttgcttcctttggttcctcagagggagctatctgcttggagcaaattccccgatgcccttgaccacgtttaccttgtgtaaaaatcacacctggccaatgagttcaaaaagcacgtttgcagggcttcctgaatgccgtcgaggcatggcttcatgagggccatcgcgggcaccccgatgtctctgtgattccctggcaggctgcgtttctcaatactgagaccctagtttgctctgacttctaaatgagctctctcatccttcatcagaaggataaggaacctggcctgcactctttgggttaaacatgggtagagaccgtctcaggatgaggacctcttggggaaagtacaaacctctgctccctgtggccacattcctgcagtggatgaaaaaccgagatgctagaggcctctgctaaagacatcagggtcaacacatgaggatctgctgaaaatgccagcacctcctgacagtcatgccaccgcaagttagagaaggaggtccacaacgaccaaggcaaacatttggcacagaaatgaggcacttggtttggtgcatcaataggagctaaaaagtggaatggtccacctgctttcacacacgcatacacgcacgcatgcacacacgcacacacacacaacacccactgtgatttggctgcttccaactctgcctgtttctaagttttcctcggcccctcactttaaagcagagttcacaaagcacattcccaaaccccagctccctgacaggagcttgtgacaccagtgtggcctaagaatgggggatttgacttttgaaagcagaggagggaatttcgggctggatcgcaatcaggacagtcagcatgcctgcagagcacctaggctgtgagaggatggggccaaggccttattctgatgtggcccagctccatctttcactctggggatgttccagggtcacaaattcccccaaacctttgaccacgaacagattcaagcaggaaaaccagggcattggaatgttgaaataagcctgaaatacacttgattcagtggcttagatgatggcaaacagtggcactcaaaaacagcttgtcagtaccggggtttcttctctttttcctcatcctcccttctgctcacacatgccacaaccacacatggtccccagcaggaaccccaaggtggcaaggagcagcacaaagagggctgataaatgcaggcgaacttcaggtcgtgcagcttcaggcctgaagatgatcgaaaagcccatgtgggggatgctgagcttaaatccaggagttttccatccctcctggactctctccatcagaaaagaagtcatccacaatcggggaaaaacattccaatgagtaaaacatcagggtaggttgcttgaggcaaagccacctttgggcggcaccgcatatgggagacccacagtccactgcacactctttcagtggccaggggcctgcggtgcatcctacatagggacaagcctcacaaaatcacagcttggcaggctgcagcatttgacactggtacagtatagcaatggcaaattatcataaataatttggcataagtaaaatataaattacatagaaataatatttttgttccttcttctcatttctcctctcggtcctcacaggctctccccagcccagctcgcccagctcgcccagctcgcccagctcaccacaggtgagcaggaggcacagagcactcaccatggtggggtggcatggggtctccaacgtggccaattcttcccaccacccccatcctcacagcccatcgcaaaggcccctcgttgtaggccctgctgtgttccagaagggcctgacttgcacaaaccttcgtcaaacatacgcccccttctcagtttcgttagcatctccatcttgggaagaccgaggtgagggaaacccccggcctcgggtgcagctggacagaagcgcccatgcggacgggcgaagcatggcagtcactcggcacctctgcctcaagggctggggattcctcatcccccggaatgctagtgtgccagggacatggggaccacctcgtgttctgtgctgtttccttgcatgtccctttcccatggggaccctagggggtggggtgcacccatgcccagcttcttctacccaaaaagcatgtggctacagagatgtgtcagataagtcactttcaggaaaggccaattcacggtgatgttgtttgttcttgtttttgcagagctggaagatcctctttcccctcatgggcctggaatgtcaggtttactagtttggtaaaaagtgggggccccaccctcacccaacggctgtctccagggcttcgagaggcatcggtgggtccagggagggaggggagttctcagaccttctttggggaaccaatcatgacctttgatacgaagttgacaatggcactggcaggctgctcagggtcatgctctgcaaacaggtggcacacattatccgtggcactgccctgcttccgggccacaaatccaaagactctgccaaaggaaagtccagtcagagtggtcagtgtcccacaaagtaccaagcttctacttcctccagctgccagcggcactgtcaggaggaattttaagtggcacctatcaaaaatcaaccacgtgcccagcaccctgctggccacctgttcatgcactttacctccagccttcacagacctacagatgggatgtctgactctagctctgcagtgaggaccctgaggctgagaggtgagtgccctgtccacagccccaggttaggacctgaatcaaagctgaggctcaacttcctctatagatgcttccccacgccagggccagaatctcctgggcacctgtccctgcagattcctgagccccagtcctgacatactggaccacagtctgcaaggcgagtggcaagggactcaggggctcctgagatgatgccagaatgcaagtcctgtctggacttcgacactcccacccactgggaccgaaggggaaatacactaggcgctcctctcaggccttggaagcctgcattacaaactacatagacttcagggagctgtttaaaaagaacagcccatcgaattatttttcttagaagaattagagccattatcttaataggcttttatgagtcctgcacttcacacaataatgaccatatccctatccaggtcctgggcaaaggactttcttctctttcttagaaaaatgaaggattttttttgtttaaatttagcagtttccgcatcatgaagggaccagtcaatgacactcaggtaaccccaatacagtcacaaattccaagcacatgaaagcccgtgtttctgctaccagccagagtgggagtgtgcccagaacacagtccccaccggggaagcccagctcgtcagtaccagggtctcttctccttctccccgcttctgctaacgcatgcactgagcaacttcctggacagacaagccatttgaaaacaggattccagggaaggatgcctgtgatcaggcactgtggtcattaaatccgggttatgccgaggaaaccaggctggggggatacagcccattgtgcctccaagtgggaggttaggatgaggtccctcagctggccctgacaggaacactgggccaggaatgagcccaggccaagcaaggccacggtactcagggagccagggaaaggtgtgcttataaaaggggaactctaagccgggcacggtggctcacacctttaatcccggcactttgggaggctgaggcaggtggatcacctgaggtcaggagttcgagaccagcctgaccaacatggtgaaaccccgtctctactaaatacaaaaaattagctgggcctggtggcggacgcctgtaatcccagctatttgggaggctgaggcaggagaattgcttgaacccgggaggcagaggttgcagtgagccaagatcgcgccactgcactccagcctgggcaaaaagagcaaaactctgtctcaaaaaaaaaaaaaaactctaacagctgcctggactggctgtggagcaacggtgtgatgaaggccctcctccgttgcatttggtaaatttggaacacccgcttcatccacacacctgcacaaagggagcaattccttctagctgtgcagacctcagcactgctgagcccatgcattcccaaatggccaaaaaggctgtgccatccatctccctgtatctatgccacagtgttatatgacacatgtaaatattgcacatccagccaacagccggcagaaaagttaacagcatccagatccttgtccataatgagaacacttttacttttttcttttttaaaagaaattggcatggtgtagtcattttcttataaggcaccccctgtgcaaatctggaagagaattcaactttggagtacaactgcagacaaggagagaatgtaaagaaatctcagcaacttactttgaggaagggccatctttgatccaccttgcaaattaaagagaaaaacagaggttaatttttttaaactaaaggatagaattaagtacactccttgctcaataaaaatgcaaatttcttacttcctgtcttgtgggtccaaggcacagaaaatcacactgttcacggggtaatgcctccggaagaagagcctgttgggacatgggggagagaggatggctcctgttactagggcttttgggtgatgggggatgcactgggcgggctctcccatacatgaagattcttccagcagaaaacatttcatacttttactcatcacttggagagaagaaagtgcgtgctcattcaaagtcaacagatgtcatgaagctgggcagaacagttgttaccagtagacggaagcaccacacaggctgaaactgtcagccgtgtggaaggcgggaatcgggtcaagaagccctaacaagccgggtgcagtggctcacgcctgtaatcccagcactttgggaggctgaggcgggttgatcacctgaggtcaggagttcaagaccagcctgaccaacatgtgaaaccccgtctctactaaaaacacaaaaattagtcgggtgtggtgacatgtgcctgtaattccagctacttgggaggtggaaacaggagaattgcttgaacctgggaggcagaggttgcagtgggctgagatcgctccactgcactccagcttgggcgacagagtgagattccatctcaaaaaaaaaaaagccctaacaaactggaaaagctggtagggtgtgagatggacacaaggaagcacctctggccctgccagacactgctggctgcaggatcgtggggaaaccactaacagcctccaggctccgagccttggtttcctcacctgtgaaaagtggatcatgttaccagcccaccccttccacaggacagatgcccaagtcagatgcagtcacaggtctgagagcactgagtgaacaataaagtgctgtgcaaggaatattccttaaggaaggactccacatggtcactgatacgacccccatagagacctccttccaggctcacctgacagcccttagtcactgacatgaccacctggggcattctcctccggctcacctgcccagcccttccttccaagagtgctatccacccagtccacatggtccccagaggatgcccaactcaacactctgctgtgtccaggctgggccagtctagctggctttggggtcacccctctccttctgggaatgactctgcaccggcacagagtaaagctcatctggagatgaagagagaggccaggagataggctagggcagaggcagagcctgggtgtgcttcaattcaaggtgaccctgcagccacctgcagcccctctcaaacaggtgccttttaaggctgattgttggtgagaagatcccccttttgtctagaattagccagtctgaactcaaacgctatctcttacagtatgaaagatctgaactgatgtggacatgacccatctccagggaatataaagaatacagggaaactaaagagacacagaaaaaagacaactctgacaagggcacatagaacagatcctgtgaagaaataacatatcttccaagggcagcagggaggagggaacagtcaacattgtgagggtccttaaggagcccaaccctgaccctgagtctaccatgtcgccaagctatgcctccagaccctgagtccaccatgcagcctagccatgcccctgaccctgaccctgaccctgagtccactaggcagtctagccatactcctgactgtaagcctgagtccaccaagcagcctggccatgccctgagcctgaccctgagcccaccaggtagatgatccatatcccaaaccctaagtccaccatgtagctccgctatgcccctgacactgactctgagtccaccgtgcagctgagccacacccaacgggaaccctgagtgagccatgtagccgagccatgcccctgaccctgtgtccaccatgtaactgagctatgcctgacactgaccctgagtccaccatgcagctgagccatacccaactgggaccctgggtgagccatgcagctgagccatgcccctgaccctgagtctaccatgcagatgagccatgccccgaccctgagtctaccataaagccaaggcacaaccctgactctgaccctgagtccaccaaacagcaaagctatgccccctgaacctgaccatgagtccaccatacagctgagctatgtccctgaccctgagtccaccgtgaaactgagccttgcctgtgaccctgaccctgagaacacagtggggctgagccatgcccctgaccctgagaacatggtggggttgagccacaaccctgaccctgtccctgcgtgtgccacacagggcacttgctgagtgcccttttcatttgagacactaaaccttgaaataggtattttggtgcaggattgaaatacgagagcatcaagcattgggaccctgcccagggtcatctactggtcagtgtcaggggcactgaacgggtctgaccagcaaaacccacgttctgctttgtgctcatttttttcagcagatgaagggtgatgagctaaacctgcctaaactcacttattcctgaagctacagaggggaagatcctgccttcaacctcccaggtggtttgggcagatgaagaaaatgtcttgcttctagggacatgggcaccacagagaggcatgggggccctgctcggggagcatcctgggaaagcagccaggctggtctgagtgtcccctgccggcctgtctgctgtgatggctgctgccatcatgctgctgccacggttgatgccaacgtgcctcctcaaccacacaatacaaaataattgcatctgaaatgctctgttcctaggccacaggctgcactcagggatggcattctggagggagggagacaggaacagccctgtggctgctctgttccatgcttatgctgggcattcagtaaagatccacatggagaacatctgctccagcataactggctcagtaacagctcaggcgtaagtcatttgaaattggccaacggaaatagtacatatcaaggtcatacgctcacctgaaaggaaatgaccctctgttaaaacaataggttccaagatcattggactctgatcatagtatcagagtgtttttaaggaactgagttaaaagattttttgcatttgcaattatgtgtgtatgtgtgtaattttaaaacgccaaacgtctttttttattttattttactgatttctaagaaaaatagccttgcaaacaaatgctaagagttcctatgtggttcccaggacgtatttaatgacagaaaaatacctagacagaccctgggtgactcatgacctcaaagacggctaatgatttacctggatgactactcacactagggaagaacaagaggaacgtgacagccccgcccctgctggacggctcctgcctccctctaggcactcacttcctctgattgtctgtcagggtgatgccctgggctgacaccttgaagtgcacaactgtggacacaggtggaggctcctggaccagggtgatgctcagggccttctggatcgcctggtggccggtgagggactccatctccacagagttcaagtaccacacattgcaggctggaagacaccaagggagacacatgttagttgcaactattgggacaggtgtgtcctgttaacacacaggcagttgctgatgtgcagactgggtttatgaacaacttgcgcatgtggcctatgctgggtgcatgtaaggcagatggcctttgcccctaattctgaaaacatgaacagtgagtgctccaaggatgcacttactcccatgtcaaggcagagaataagcgagttactagagcaaagcagacccgcctggtgtggctttgccttcccaccagccagagggagctttctattcgccctgcagcagtattaaaccctcgtgtcccaggtggagcccaaggcaccttctctggtctcagggtgggtatggacaacagtcacattaatatgaaacccaactactgttataggtaaggagcccagaggcccttgagaaacaaccatgagggaagcatgtgtcctcaaatcctggttgccaagagaaggaatggcttgcagtgagctcagagaacaggctggaaaaagccaaaagtggcccggcctcacctgtgtcctggctccccatgctgccaagggagagctgtgggtcttgtccctgaccatctcctcttgggagaagaaaaacaactgggctccataacaacccttctttcccttctagcctgtgaccctgcagttcaagcataagtgcacgtgtgactttggggcatgggtgaaattgaggtgttccaagacatccagccttagcctgaagctcattcactgaagtaaaccagggcctctcctgcccaaaggctgagtaggcttcctcctgaggaacagaactgccctcactcacttgccccttgtctactgtatacatgtccctctatgtgagcatgtgggtgtcttaattccgtggttaaaggcctctaaagtttcacttaacagaaaaagagtgttttcccacagtctacagcaacacatctcagcactcggatgcacggtacgcgctgggtagtgttgtctccctcggccgtgtcctcctggggtaggcagccctgggaagcagctccattttctctttgcctttaagtctgacttttcagaaccagcaagggccatgcctattggcaggtgtgttggcaggtgcacagacagatgtgttggcaggtggtttggcaggtatgttggtagacgttctggcagatgtgttggcaggtgcactggaaggtgtgctggcaggtggtctgacaggtgtgccacagggtgcattgacacacaagcccacagatgggctaggatgtccctgggtgtcacagtgcagggtgacttgtgagttgctggaccatcctttctatccaccgcaaaggccatattgtttatagctgaagacactctgaggaattgagcccactatttttgatgatcacttggtgatatggtttggctctgtccccacccaaatctcatcttgaattgtagctcccataattcccatgtgtggtgggagcaacctggtgggaggtaattgaatcatgggggtgggtttttcccatgctgttctcgtaatagtgagtaagtctcacgagatctgatgattttataaagggtagttcccctgcacatactctcttgcctgccaccatgtaagatgtgcctttgctcttcctttgccttctaccatgatcatgaggcctccccagccatgtgaaactgtgagtccattaaacctcttcttctttataaattacccagtctcagatatggctgtattagcatcatgagagccgactagtatacttggcgatatttatcaggtggatatgaaatgcctagaagtaacctagtggtcccgcttctgaggagattgagaaaggaaatattctgtaaccacataggatagctaaccttcagggaaagacatttgtgccacatattcattacagtgggaaaaaccagaaacacattagaaatgagagaggggtgaaattagctccctcggtgtaataccaagcaaccagcaagcggtaaccaggaaaatcacatggcagcatggaaagacgtcatcagcaatcagcagggaaagcagaataaaaaccacgtctgctatgattagaacgggaaaatgaaaagcatgtgtgcatcagataggagctgcgagggagcctggagaattcaaaacagacttcacgagagggacagtccgcctttgattttattagcattactgtcatgctgatcatgcagttatgaaagagagaaaaaagggaaaattttgacctaactactaggaaaattccacaaaattggcacaatctcaatcagttcacacagaaccacagctgccacaacccagacccatgctctcttgaaggagtcacagatggctttctgatgaggagcagtcttgctggctagagtttggtagcaatctgctgtttggggaatctctctccccaaatgcaggaactatgtcatcattccttaaagcagagaagaaaatgctgccactagggaggctgttctacggagcacacatcaaccaactgacaccaagtgccccaaagcctctctccagcagagaacaggcatgcctgcgcctgcctatgattgtccaactgcacctgacccaagaccatccaatgccacttgacaggtgctcttggccagaggtgaagattcagtgcccagtaagagttaccaggaaggcacccaccagacccatggcatggagttctgtcaattgctaggctactctgggaaagggacttgataacacagaacaaaagtctgaggcccacatgtgggaatttgtcctaaggcaacaatccagatttcagaaaaaataaataatgcagaaagatggtcctctaagcattgtctgtggtattaaaaattagaaacatggtaaatgaacatccataaggaggtgaattatatgatggactattgtgtagccatgaaaaaaatgagacctgcattatgtttgtaaaaaccatgggtaaacttattatgctaagagaagagaaaagaatcgtacaggcagcatgaccccaagtacaaggaaaaaggcagcataggattggatctgcttgacatcaggagtggtctttgggctggagaacactttacctgctgtccactcttcctcccaatattcaggggctgcataggggcaaccgatctatgagtagttcatttttccttttcttttattttccatttttaaaacttaaagaacatataagactctataaaaaaaaaaaagtatacctaccatatgctaaaaaatgcaactgcaacatttctgggaaatctattagaaggctactgaaaagaagtaagtctttcttttcaggattatattatattcctctgcttcaacaagaaacaattaagaaccgaggcttaaaacacaaatagaaattgttttagagattggaacaaaggcataatggccttaatatttaaaaaaagggattaaactggagagcattacaagtttattcccatctttgtgagttgtctgctaatatttctgagtttcagcttcctgaatctttataacggggaaattggacatgatcatctcaaagaacattgcacatccaggagtctaggactctaagtgaattaggacaacagatgaagttcagtttaggaaagaaaactcactaaattgctggaggtcatcagagattgcaataattccaccgtcttgctacaatggttgttctgcactgattctaaacacctgcagccaatcctccaggtgaagacgacactagctgaggggtggtcactgtgacagcctcactcctctggtgacagatctgctgtcctggttccgtggcttggaatcgcggttaatgtaatggacagcagacattcgcagctctcaatgtgtttcagaaatgagatttttaaaggaaagaagctcaaggcagtcataatttaagcttcatatataaatgcccaactcagatgatcagatacaaactccaagttctgaatgaagtcttgactctaagaagacccacccttaaaaaacatttggagttattgatacatttcatacgtaattttaaaagatggaagtgcacttaaaaatgataagtcaagatagaagagaaagttttaatatctaaaaacaagtgctattaggatgcactgttatgatcaactaaattcattcaattcatttattaattccacacttactgggtgaatgcaggataactaagaagcttaaggagaaaagtgaaattgcgtgtgccctggtgctaccatatagggctgaatgggcagggctgtgtccctgagacaatatgggcacagctggacgtgggagctgaatgccaggcctagatctaccattcaggagccagagctgccaacttgggtcctctgtctatgacatgggatgacaggacactacacccacacgccctgtgggtgaaggggaggagacaataagctgggcaggacaagtgctctgtgcctgttgctatcaccgttcttctgcgctttcttgaacactgccgatgcataagttgtgattttaaaaccactaattaaaggttttcaaaatttcaaatacatttttaaaaggtgcaactgaaacaaataaatccatcagagtggagctggttttgtagccctgtctcctcagttgagagtgagtgagctgctcatcagataggtctacagtaaattcctgcatccttctgggcacttcactgggacccacagacagggtccactgttactttaacagaagaaagctaagaaccatgatgggctccagggaccccctaaaacagatttaggggctgtggcccaggaccagcccaggtccctcacaagggaaagggtgaggccggcttcccaggaaaggccattcctcttgggccagaaaaatgctcccaaggcattgtcaatgtcctattcatttaatcttttcaactgctatgtgtggaaatattattatccccactgaccagatacaaacctcaggtccgcatggctaagtgatttgccagagatcaaaatcctgagtagcagaacatggccggaaacccatgaccacagctacatttttcattttggagcttcgagttttagcacacttgcaatttggggcaagctattttcacctttgttttggccacagataacttatcctataaggagagtctaaaataacttaaacactacaaaattccattcaaaacagagtaattttactttagcttggtaacagacacagtgatgtataattttacagggaaaagctacatagaagaataatacaaattgtagaggaaataagaaaatgcctatacatttcatacaccttcattgtggagttacacctgtaaactactctgcagatatgaggtacagaatggaggtatttctagtccaattttctaccagactcagaaattccctccccaacatttctgacaataaacacctaccttgcatgaaaaacttaaaacagttttgaaagtcagggtttgaaagtcagcagtccccactgtcctctctagctgtgtccctccctcatggccacagaaccacaagagccctatggtgtgtggtttgtttacaaccttcttaaactggggccactacgactgcatctaatgctgcaaaagtaacctggcctggaactagtaagcgattacagaaagatgctggatacaaggttaatgtacaaatggtcaactgctttcctacagaccagcaataaacaagtaaaatttgaaattaaatacacaataccatttacagtagcacctcccaaaaactacttacatataaatctaacaaactatagacaagatctatatgaggaacactattaaactttgatgaaagatacaaaaaactaaataaatggagagatattccatattcatggacagcaggactcaacttttgccaaggtgtcagttcttcctaatttcatctatagattcaatgcaatctcaataaaaatcccagcaacttattttgtggatattaacaaagtgattctacagttaatacagaaaggcaaaagatcaaaaatagcaaacacaatattgaaagagaagagcaaagttggaggactgacattatttgacttccaggattactataaagctaaagcaatcaagaaaatgtgatattggtgaaagaacaaataggtcaattaaagaactcgaaagtagacccacatgaatatagttaactgatcttagacaaaagagcaaagggaatacaactgtgaaaagacagatttttcaactggtggtacagaagcaactgtacatctgcaggcaaaaaaataaaaaatgaatcaagacacagaccttacttccttcacaaaaattaacttaaaacggatcacagacttaaaggtaaaatttgaaactataaaatctagctggccttgggtttggtggtgacttttaagatacaataccaaagtcacaatccataaaacaggaaatcaataagctggattttattaaaattaaaaacttctgctctgtagaagaatgaaaaggcaagccatgaaatggaagaaaatattttcaaaaggcctatcaggtaaaggactagtgtctaaaatacaccaagaattcccaaaatttaacaataagaaaacaaaacccaattaaacaaacaagccaaaggcctttatggacacctcaccaaagaagatatacagatggtaaataagcatatgaaaaggtgctacacatcataagtcatcagaaacaatgagataccactacgctactattagaaaggccacattccagaacactggcaacaccaaattctggagaggatgtggggcaacaagaactcacattcattgctagtgggaatgcaaaatgggacagccacattggaagacagtttgcctgtaccttataaaaccaaacacactcttaccatacaatccaggaatgcgctccttggtatctacgcacaggagttgaaaacttatatccactcaaaaacctgcacatgggtgtttagagcagcattattcattactgccaaaacctgaaagcacccacaatgtcctttagtaggtgaatgggttactaaactgatacacccagacaaggaaatatttgctgctaaaaaaaaatgagctatcaagccataaaaacacatggaggaaacttaaatgcatatgactaagtgaaaggagccaacctcaaaaggctatgaactgtatggtttcaactatatgacaatactggaaaagttgaaaatatggagacaataaaaatatgagtggttgcttggggttggtgggggagggagaacgaacagaaaaggcacagaggatttttagggcaataaaactattcactatgatactgtaacggtgattacctgtcattatgcatttgtccaaacctgtagaatgcatgacatcaaggtgaacctaaatatcaagtccctaaactagggactcaggtgacgaggctgtgttaatgcaggttcatcaaccataacatgtgcatcactttgctgggggatgttgacagcggggaggctatgcgtgtatatggtgtatctctgtaccttcttctccattttgctgtgaatctgtcactgctctaaaaaagaaactctatgaataatttttttaagtgacctgctctgtctggcgagctggttcttgggtgttgtatgtctcactggggttgctggcagtgtgggtcaaatcattgactcatgtcaagtgacttgttgagtcatgtctctggaacatttttacatttacagttgccgagacagatcacccacatcctgtcttactatattttcccccaaactaaatccagggcttgacatttattccactgaatttagtcttgcttgagttagaccggcccatgaaggccttgctgatgtcccaacaactgcaccccacccagctctgtgcaagcttctataaaaggaaacctccttcaaggctcacagaaaagaaaggaaacctgaatactgaagtgcaaaaggaagttgtgtcagtgagtcctttttctccccagtcaccagatgtagaaatggagctgcatttactgacctgccccctgcttcaacagctcagctgctgaattggctgccgtctggggagaactttctgctatttcctccaatggatctgtaggaaggggcaagaaaatacagaaatgagtcctgctcctgaccaagaatcctcatgacaaagttagacaatttgatgacagaattcccagatggtgacatgcaatggttttgcagagtcaagagtttctctttgggacaataatttggcccatagaaaccatgatcacattctgaataaaagtagagatgacaaggcctaacaaaatatttttctaatcaccgaattagtcatatgaacaatgacactttgaaaagtaaatcacatttacctatatattaagttagaccatttttatgtgaagttgtgactgcttaggaaagtgggacatacggtcacatcgccctgacatgctgtgggtgttatttaatttcattatggatattgtttaacaaacataaaagtaaaaagaacagtgcatccatcatctaagttcaacaacatcaacattttgcccattccgtagaaacgtaaaaattaaatgtcaatgaccctgaagccttctttgtctgagggttttatatttttaaactacagaatctttgctctatagaaatctttcatcaaaatccatgatgtaaagctatctgggagctgtcagtgaagtagaatctcctcttctctccttaatttggatgaactcattggccttttcttgggttcaaccaagagaatacgaaaaaacttccagtcttattatttttctcagtggatcttcatggatctctaaaaccggtggccttgactgcagacaatctacacagagcctgactagcactgaggaccccttacctctctctgggataagcagcttgcacggcaaggccaagggcgtgatggaatgctggcacaccaaggccgtcaggctccctgcaaagtggacagacagcaaacaagagtcaacaactgctgtagatgttgtgtgctcagccaatttatcagctggaatgaaacggatgcaaaggctgagcccttatctttttagcaactggtatgttagattagtgtgcagctttgtgtaaaacttcaaagaagtataaagttccacaagatagttgagaggtaagtaaatggaactgtttatcattcttatcatagacacatcattaccaaattatataaagactaaagcatacagtttgttggatcttgaatcaggagggttgacatcaagccaactccaacttcaaccatatatattacccctgcacaatgcttcttaacaaagctctaataacaatgatgcctaaggctgcactgtgctttgtgtggattgctcaagtcatctttccaacaagctcgtgaggtagggaaggctcccaatttgcagggaagggagggtgctctgttgggagctctatgttgttccttgtgctgtgggatagggtcatgctggagctccaaccttctcaggacttacctgcctgccaactaggatagaatcttattgacgtctgtaattcctacgtctgatatggtgcttttcatttgtttggttttgacagagcttttaagaacaacttcaaatctagtttatcttaaagataataatgcagatcagcaggatttcagaactggggactgaaatatgagtaaaccaccataagagtgatagtcccaaatctcaggttggtgagcagagggaatccaggcctcatgagttcagaacattgacagcaacctctcaagcaactcaccgaaatatggttcattcgagcaccctttcaaccgcactcccttcggggtacactcgatcaaaaagtgccggacgagttcattggccaaatctccagctgtggcaagaaatttaaagaaagaagaattttttgaaaatgggagcatgggagaattcaatagagagaacataaaagccaggagctacagttgaaaaggctcttctctgaatacgagtccagtcactgcaaaagaggctgccaagaaccatcttcgtcctaggaatggtagccgggctgcaggacagctggatgagcacaggctaggccagatacagggcgggaacccttgcaatgacagtgtgggggctggagaggtcccttgggagaggccctcaaacattgtgcaagaatccccaacgaagggaatgagcttgcagctaagaaagaggatcatgaatctccagctgaatcctctcccaaagaggagaggtgagaaaggctcagacacaaaatgatacctataatgaatcactgaaaagagctggaaggaggtcagtcttctgggtgggatttaaccaggagcctggatctttaaaaccttccagaaagcaagcactcagctgcacgggagcagcactctaccacattgctattaacagtaaacagtgcatctgctttaggccagcccatgagtccaaagagaaaacacatcataaaaagccactgaatggcaaaactatctgagagtggaaaagtacaaacagcacaaccaaaagaacaagaagtcactgccctatgctaatgagtccaacagaccttcacagtgtgctgtatttctgggatccagtgcttccttcatcaccctccattggggcatgtctgcctaaacttctaatatttctggtgttggaaacctcctggcagcaagatccactggagttgggcttggtccccagtgccttgcccacagtaggcttccaaaagatgtttataaacatgacaaatatcactgtgtcagcatttcacaagggcagtaaagcttgcagaaaaggaaatgatcagattccataaaaggctgtgttgaattaaagtgggataagaacatattgacattcagttgtgggaagaaaatgacgcctggcttccaaactgaaggggacaccaagcgtgggtctggattccacttgtgagaaatggctcagtgggaagtccttctggccagggctctctggagaacagcatccagaacgtccctagctgtcccatctccagtttactggaggtggtatggtgaatggttgtggctctttatgacctggtaaactctttgctcaaatctatccttggattgtgaaatctgaatgtcaaatccagggacaagatgaagacacagcagtcagataagatttcacccagaggccaccaacaacactcggtttcctcaagtctgctattctaatatcccctattttgttcctttcatcttaagattgagtccaaagtctgtcagagaggcaggatgcacgcacagaggtaaaaacagttatatactctcatctagattccaaaaagataatgcatgcagaaatgttatttgtccttgctttaaaactttacacggaaacgaaggagccaaccaaaaccatccatcattcctcctctcccaataatctctcatctctgcagactcgccagatgctcttggtcctgcgaccctctttcctgccatcatcattattcagtttcagtcctcaacaatcaggtctaattcagctctccagctacaaaagcccttatctccactcagaaatagcatcgtgttgggcttcttatgctggaattctggatgctagaagatcctacttttcaagaattatctgtcctttctcccctacacaacgccttctctctacttcacttcaggacaatcagtagccacaggcttcggggctgagctttgactgagccccgggtctttcccagcctcactccccaccccttccactctcacaccattacctgtgccaaaatgaacccatctatgtttcccggaaacgctacagccctgcctgaggctggacctcctggcagccaaatcatacattccacagggtgtaactccaaggcgattttctccaggaagcatgaagcagaggtttcatccaagaatttggaaaaattctctcaggtattaggcacagagcatgagtgaaccaggtgggtgtctcacttttctataaacacagggagtttaaaatccgagctgcttctgatttccccactcctagtgaatcaagctgtccttactgggaaccaacgacctgcaatgtcccctcagtccacaatttccatttggggagacagacagagtgaaagaatagcttccctttccttagtctagtctgcagcatggtagcacacaaagatgagtataatggggcaaaaagggcagggggagaaaaaaaaaagaaaactgaaaatcaagtgtccaccaacaatagaatggatcaattggctgtaggattttcataagatagaaagccagaacttccaaagagaacaacagctacaagcaatcttagaaatatgattggtggatgctggtgaggttgtagagaaaaaggaatgcttttgcactgttggtgagagtgtaaaatagttcagccattgtggaagacagcgtggcgattcctcaaagacctagaggcagtaataccataggacccagcaatcccattactgggtattatacccaaaggaatagaaatccttctattacaggttggtgcaaaagtcattatggtttttgccatgatttttaatgcaaaaaggattcaggcaggcatagtcctttacctgcattagagatcatctcatgagtctaggcttattctagtatcacttttaatccatctaaaaatgccctactgggtatagatacaagaatagtactcaacagtatgctagttttcatataaaaaatgtgtttgcctgcatttggacaggtaaccagtgaaaagacacacacgaatctactccagatggttgcccaagggaggtgacagggtggtgaggggggtagagccgaaatggaagcaaaacgggcttagtggatgccttatcccatggttctaatttttgaacaatgaaatggattacctattcaaaacaatagaaaataaaattaacaaattaatgttctttcttaaataaggtgaaaactttgtaaaatatacctgaaaaaataaatactaagaataaaatttgtgagtattgttaaagtcatcttttattttattagcctaaaaataaaccaacagagtttctctgtggatgagctgaacagatcaatagggagcagtaaccttacctttcttgttcagctgcaggactgaaggtgggggcgtggccaccttcatggccaggccataggcccctcggaaggaatggctgtctcgaacaatgaatgagcccggctccttgtccttcaacatggcgatggctggagaaagggaggagaaagacaagaaggtctgccgggtggacaaaggtctatgcccactcataaccttgggtaggtcctctccccttactctttttgcaaactggatcagtggggacctggccgggatccctctgcttggctggaagaactacatgtccatgcagttgagggaccttcagggaggtctctgtggtgtcgtgtatgtttcatgggtgggcctgcctgttgaggaggcagaaaggacaggaacatccctctctttagctagactgaggtgccgggcactgtcctgtgggctgcccatggaagaacacaggatttctgttaatcccacaatacctgtgatgtccaaatgatggtccccacctgacagcccaggaaaccaaggctcacgctgagtaagaaacaagaccagatccaaatatacacaaaggggagaaacaggcagtgggagggaggctgtcgcagaacaccctgcctctgcttggacactgccccctgtggcatttttcttaaagattttagaacatgagaacatgaactctttcaacagcataaaaggaaagaagttttttttttttttttttttgagatggagtctcgctctgttgcccaggctagagtgcagtggcatggtctcggctcactgcaacctccacttctgggttcaagcgattctcctgcctcagcctccggagtagctgggactacaggcacctgccaccacgtctggctaattttttgtatttttagtagagatggggtttcaccatgttagccaggatggtcttgatctcctgaccttgtgatccacccgcctcagcctcccaaagtgctgggattacaggcgtgagccactgcgcctggccaggaaagaagtttctaattacattttctgatgatagaaagggcatacccaaaatgttactgaaaatttaatacaaattccaagattcaccaaggaagtaacaaaaacctggcctgcaggtggccccctatcccgtggctccatggctgatgtggccaaatgggcccagcctggatggggctgaggacacattccccatgtgcccgccaacccagggcctcgcacagtgggtcacccagcttccctggtgaggctggtaggcattcaactaatcataatcattgcttcaaaaaatctctctccttcatggccaaaatctggcatttccaagaagagggagtgggttagggtaatagtaacctcaactcgatactgcccagacaagccagagtgttccctgataactagactacatctcagaatttcttttctagacatttactctttattttaaaaaagggaaaactggggatttagagtataaagttatacataattacagccatggaaatgctgcctttctggaatgccaaaggctctgcctggaagcgatcagggcgcagaacatgaaccagtaagtgctgggatgcccccggcatgcctcagtaaatacctccacggcgcactcccacagaggcccctcacatgcccccaggcctgaccggacccacagccaaggcatctgtctggccataggatgaaacgaatggtttcttttacacatttttcaatgtctgcaccgtggccctgtgcacaggatgagggcacggggaggagctcaacatgcccctggggatgaagcaggagcttctaaacagcacgcagtgggaaggatgggcaggaaaacacaggcaggctcaccgtgcatgcccgagactgctggtagctccagccaggcctgcagccgcccatgcaagggacccagggctgggtggggggcctcctggggcagggcacaggccctgggaataaaccctgaattctggtgcacgttttctcacagcgtagtctataaacttgggggctgaacgtgaatgacattttttcagtttttaatttttatttttttgagataggctctctcactctgttgcccagactgaagtacagtgacacaatcatagctcactgcagcctcaacctgctgggcccaagtgatcctcccacctcagcttcctgagtagctgggactacaagtgtacaccaccacacccagctaatttttaaaaatttttggtagacactgggtctcactatgttgcccaggctggccttaaactcctgggctcaagtgatcctcccacctcagcttccctaagttgctgggattataggagtgagtcactgcgccgggcctacttttttgttttctctaagtaggacaaaagatcacttacattttgtttcaactgtgatatacctcagagcttttctttttgtaagtcatggttctacttctctgtggtaaataaagtgtagaagcctcacgggactgagactttgggcacctgtggatggcagtggagggaacacgggctttgctccgaccagttctccccatgccaggagggaagccccagctgccaggctgcaggggtgcaagggggctgtgctctcctgcacaggcaatgggagtaagaggagaattttagacccgctgtttttccaaacagaagtaggctgaggagcctggtgtgctgaagttggaaaaacgagcgtccacacactgcacacagcagctgcgtgctccaccctggcactggcatcgcattcctcacctggagacagggatgaggggaggggaggcaagtgagtctcctcgcaccttctcacactgtcgcgccctgcatctggagaagcatctggagaagcaacaccccagaagtacaactgggacagtagtacttaattttgattttactttaaggtcctcttttcctcctgaggtatttttatgttagctttaagaaacctcaaggaattaagtatgtgacaaattgcactcccaaagaggttatctgggtgttttttttcctcctgcatcaccctgaaatgtcattgtagcttttctagaaaaaggcacatctgacagttaaaatccaaataaatgacacccaagggcagccttccgctgtttggagactctgacacgggcagtagaaggttcgtctgcacaggtctcttctatgtaaaatatgtagaaaatgaaagttatccttttagagctcagctggaaaaaccaacactcgatgcacatgttggccatcctgagatggggtcctcccagcaaaccttctacaatgtgtgctgaagatcaagcacatgccaacagcagcccctacacatactgcacatccacatccacttatcctgcatctaccaggcgccagcaagggcaggtaccttccacatggcactgctctcagcaaacccccgcggcaggctcgaaccttgctaccctgccgaggaagccagcagtgcactccaacccaaatctgtctgtttcagatcccccctgctacaatgacattgcacaatgagagaagggggcatccagccccacacatcgccctgccctagaagacggcaccaatagagtggaagggtctgtgcagaatctcttaggtgctggataggcacctctcagtttggccagctggaggaggtgccgaggcactgggggccacagtcatcgggattcttgagacacaagcagggccagggtggtggcaacaggcacacagcatccggccgcagagaggccctcagccatggtgagcagtgtttcacaaaggccaattcagggaaatgaaggtctttccaggccacaggcttttttttctctctcttccacttaaaatgacaatcgcttctttgagatcataagagatgcacattcttaccatttctgtcatctacataactgaatagcagaatttcagtggagagctggacagagctatttttctgccactcaactattcatttctaggcattcctgaggcatcttcataaggagagagcttgattttcttctgaagttgaggtaaagaggcacagaggagccaagtgggtctcctgctgactgcgggcagcttgtcatttctcaccgctttaaaccaacccattccctctttcactccagcctccaccaggtggccaccgggattcactttggttcctaggaatcctgactccgtcttccaggcactggaggcatggccctgccctgccttgccagtcacacaccatctcttctgaggtatatcccagaagcaacaaactctatgcactgccaaaatgaggtatccagaggaaggtacgctcagctgagacacagcatccagggagaaaagccatcccacagccgagggaagcaccttatgaattctcctcattgcccaggggctgtctccaagcagggctgcccagaagagcttgctagccttcctctcccacatctcttctattcatgctctggtaaaaagtgatgctcaaaatattcaaatattcattgctcaaaaattagtattaatgatttcaaattagaaaaaaaaaaaaaaaaagcctgacattgtaccaagcagagagatgctctgtctggtttgtgtgtgaggcatgcggctaagtccacaaccgggtctcattattaagtgcttatgtaggtgttcacaaacacacagtgtccctgacttctcagaggagggtgtctctcctgcttcctcaccctgtcctctctggtttcatggagatgcaggagagtgtgtctcctcctcacagtcagcagttgtgggctggcatcactggcaagccagtggctggtgcaagcagccagaaattacaccctacacactggaatgctcatggctggggcccattcctcaccaactccctcattagtagtgagttttcccctataaaaacttaaaggttgtagcatgtccccaggaggcatggaataacgtgtgggccctgctcaaactcaatccatatgaaggccacggctgcccgatgttcccaccgcagggcccatcttcacacaaggcagcgaagcgggcactagggcagatgcccaaggaggccctcatcctccccacataccttgttctcttgaaatatccgccttgtaccagaacttggaagtgtcttgaacaaatttcacgatcacaagtttatcacctggactatctgtaaagcaaaatttaaaaacagtgaccatgatgggcacttttcttcttgcaacctctcatctgctgtgatcccagaagtccaaatcccatgccaagggcaagcaagcgagcgatgttctaaggaaagggaaccctgcctttgaaatgactgagttggaggaggcagtgactgttttataacacaaaacagaacaacaggatgcttggattgagcctttgcaatacattttaagaatacataggaaggtagtgaggaaagagagggtaaggttggtgttgttcaacccatagaccacactgcttcttatacacttgaaatatttcataatgacgttttggatgaattaatttaatttgacaaggaatttgttatttacaaaaagccatgttcccaagtgacatggaaagtagaaccactgcaaatgtctgcactttctacaactggaaggaatccaaggtggccaaacacagaagccaagaagagtgaatgaaaagcctgagccagtgcttggttttggacgaggaaaatggaaaagtaccccaacggctctggatttcctctccaggtgcccagcccagcactagagatatgccagctcagctgcaggtctgaacccttcccttccccagtgaatggacagaggggcccttccaaccagctggaaacacacctacctggcagaggtgaggccgcttctgaagccttggaaaagtcgggaaggacatttgggaaggggatactgatggtgctcccgctgtgcgggctggagaagccactggaggagggagagactgagcccaaagaacgatccccctccgaggcccgcttcttctcagggaggggtggctgcccgggcagggtcacaccctggccctgcaggcctggactgtggtggctgctgtgtccaggcgccaccgtgagaaagttgtgggacaggaagccattgtcggcagcccctgtcgctgtcagcgggatgctgggggtcggtgacgctccatgagaattggccagcaaggcccccaggtcctcctcgggcggaaggccacttcccactggggcggtgccgaagcccaggaaggcctggctgctgggaggcgccagggagtccggtggctctgctagggacagctcatggctgtggaaaggagcctggagctctgacggcgggaagcaggacagcactggggagtccttcctggtaccggagaactcagcgctgaggggacttccggtgggccggccgctccccagcagggaaaccatgggcttggggctgctctccacccactggcgttctgcagaagaggagctgttcaaaagacaagccgaccaagacagcatgtaaggtacaaagagacacctgaagaccagcaagcgtcacccacacgggaagacagggatggggaagtgggtgctgaggccctccaggcagcacaggaggtattttccaaaatatgtacactaaggccctctctgagctcacgctgcctgcctttcaagcccccatttcatgcctggatgctgcagcccgcatgagggcacccaggggagccgccccatgaaggcctccacatgcgcagatgctgctccctcggcccctgcgccttccctcctgcatcttcaccgggtcaaggccctttcgtcctttaagacgcagctcagctgtgcacccactgggaagccttttcctagcccttagccagcacctgtggccacatacacgtgtgccctcgggagtagaaatgccctcccgtcttgtcccacagcactaggcagggatgccacccacattcatcccccgcagccaggccgttggttcactgtgggtcccctcctcctcgcagcatgatccctctgccccatctcctttatctgccagatacaccatcagtcctcaatccatgcttgctagatgaaccagttgattaacggataccacaaagactactggaaattaccaaccacttacgagtacggaaagacagctaaaaccacaccacgtgacacacgtatttcactagcaatggaacattcatgggtacagagtctatgcgtaatgtccttaaatgagggctcctcttttattttaaggagaacagaggtagaatttaaaaagttaaatagggagctacgtgttcatacaacaaagcataaagaaacttattcctactctgagcaagtggaatggtctcacgtatgaatgtcctcaggggtagtatctttgtgaagcagaaataggccatttttccctgttaatacccaccctctcccacccccaggtctttctgtaaaccagaagccctctaagactgatttttcctgtatttcctgtatgtccctatattttctcgtatgtcaccacatacacctgtccccggcggtagcagtgtcgtgcacacagccctggtcccctgccccgccccatcttcaggccagtccctgcctggtctagcttcagcttctctgaagagcaagcccccgctggtcccacatgcctctcagcattctgggtctttaaggggaacttgtgccaagtttaaagatccatcttcttacctctctctcctctgcccagggccgttgctggaaatggtgcaggaagaagcaaaagcctgctgaaaggagggcgtcgaggacgcatcagcccggagcatcgtggatttgggtccgatggggctctctgacatccccacagcgtgagtgagcgtctcagggcagcttcgtggttctgtagcgggaacacaggaagcagagagacctcggttgtaggactggagaagtcataatctctgctgcttttgcatgttccacaagaaacagtgctgactttgaggctttctgtcatccatggccatactgaacatgacatcactacccgtaataggctggaggaggcggccagccctgcacccacaagcatgggtttattctcacccatcactgtttccaaaaataaagcgacctaattcagtcccccacagtgtccagcccattaccacgagctggtcatgtgaggagatgcacattgggccgcctgggctggtcctcccagccccatcccccacaaaggctgatgtcctgtaatgtactctccactccatgatctaggctgcacctcactttagaattggcatggcctttcctctgcaaaccagcaggcgacttctcccaataaagaccataagtgcaggccctgcggcagccgggcggcctaggtgtcctccaccttcctttggtccctaccctccccccagctggtaactgggccatcaacatcgagcactatgagggtgcaaacccatgctgctgctttccaggtcaaaccccgctgcttcaaaggccacaccgtggggtgcagaagccaccctcgcaggtgggccagaacgcaaacctgcttgtgtcccatgcctgagcccaggcacattcctctgacagaatttctgtttggtttcttgcccagcagctgcattatttctggatatttaaaacatcttaccttttatattttttctttttttaaaccaggcttcaagaaatggacaaatctaccatggtcagtaaaataatattattagaaatactggtcagtttgttttctgtttcaaaactaatgaggattgataagagaatattaatgtagaaaaaaactccatattattcatttcctggagagggtattgaaatttagagatttccaaataatgctgttttccctacaactcacaggactatcacctcacatgcttgaaatatgtgttattttaattatactgaaaaaaaggctaccttctttacccttcaaatgaaaaccaataataaaactgaataccagaatcacactttataaaaatgacatttactaagaatactctgaaaggaattatcaacagcatatgtgatttctgaagatgaaatacctagggggttttcattaatccaggtgccaatgagcactggtctgtggattattcagaccagtgaggaattatatccaaaaaaagcaagggaaagccctgaccactcaactaaattacctccacatacaggatgtaatatcctggttttttaaaaaaaattgatctctacagaatttgcactatcaattcacaaatggaatgcacttcactccaatgaggtaaacaagctccatctctaccaagacagaatgaacattctaaaaattatatggtatccccacatatgtgaagtgaagcacttttttggtcacacgtcatttcaatatgaattaaaaattactatttttatttagcacgaattcttttcctaaggaaaccttagagaatttttttttttttggagacggagtctcgctctgtcgcccagactggagtgcagtggcgtgatctcgactcactgcaagctccacctcccgcgttcacgccattctcctgcctcggcctcccgagtagctgggactgcaggcacctgccaccacacccggctaatttctttttgtatttttagtagagacggggtttcatcatgttagcaagcatggctacgatctcctgaactcgtgatctgcccgccttggcctcccaaagtgctgggattacaggtgtgagccaccacgcgtggcctagaattttaaaatatattaatcagcacacaaaatgtctggagttatgcctaaattaacaactatcctaagttatctaatagaccttggtagagaaaaagtgaactttaaatgtttaatttttcatgaaactttaaaaaccacacctttatatattgaggtataactaatatacaaaaaactggatatgcttaaagtaaataattcggtcagtttgtcatatgtaaacgtccatgaaaccatcatcatgattgagataattaacagttacatcatcattccaagagtttcctccagccccttctcctgctcatctggtttatgtcactttgctttagtgtgcatttcctaaaattctacatgaataaaatcattcatataaactctttttttcctctactttcacttaagaaattattttgagattccgccacattgtagaatgtatacatagctcattgcttttcaacggtgagtacttttccattgtatggacatatcacattttctctgtccatttacctgttgatggacacttgggttgttgccactatggggctgctacatataaagctgcaatgagtatttttagacacttttgggtgaatacctagggatggaatggctggaccatatggtaagtgtctatgtaactttttaagaaaatgcaaagctgcttcccagaatacttgcagcatttcacatccccaccatcaatcctgcccctacttggtatggttggcatttcgaattttagccattctagtgctggcgtagtggtataacactgtgtttttaatttgcaactttattaattactaatgatgttgaacatctttttgtatgcttattaataggcatttttatgtgttctctggtaaaatgtttgttcaaatccttttcctttttttcactaggttgtttgctttcttaacactcagttgtaagagttctttatatattttagatgcaagtcccttatcatatatatgatttgcaaatatttcttctgagtctgttgcctgtgcatatattcacttaagaatcttttgaagaacaaaatcttgtaatttaagtccagtttatcaatttgttcttttaggaatagtgtgtttggtgttgtatctaaaatagtatctgcctaatccagtcacaaaacatgtttttctgttttcttccaaaagtgtaatagttttggaagaaactataaacataagcctatgatccattttcagttaatttttacacatggtgtgaggcatatatatcaacaaagtttagttttttaaatatggatattcaatggtaccactaccatttgttgagactatctattcttcattgaattgcttttgtaattttatccaaaatcagccaaatgttaaatccatctaggttatttttcatttcagacactggagtttctctctccagtgaagtttggtttgggtctttttatatgttccacgactctacttaactttttgaacacattaaacatagtaaaaataaatgtcttaatgtccttgtcttaatgttcataatcttaacattagttttgtgtcctcattagttttgttttgctttctctcttaactatattgctattttcaggcttctttgattgcctggtaatttttgattgaatgccagacactgtgattttatgtttttggatgctggatatttttgtattcttataaatattcttgaactttattctgggatgcagttaagttgcttagaaacatttttatctttttgggtcttgctcttcacatttgttaggaaggcctggagtcatgctccatctagtgcaagttatcccccactactgggcaaaacccttctgtatatcactcaatgcccagtgaatcttgatactttcctctcttgctcatgagaacaggcactcttcccagctttgagttagcactgggttagcctctctttccaatcttttcatttggttctttccctggccttcaatgtccctaatgtcctcctacccaacgctcagttgaatacgtatggcggatcctctgcagatctccaacagctctctctctgttcagccttctctccatcctgcaagtcattgtggtcccctggagtttcaactccaaatgcccaactcagagtctcccagattctgcgtgagtttcctctccctgccttacacctggaaactttgtctaggcggtaaactgggacaactgtactgtcaccatgtttgtttcttacttttcagggatcgttgtctttcactgcctgatgcccattggcttggaagccattatttcatatagtttgtccattttttgtttgttcagtcaggataataaatcaagtctctgttactccatcctgacctgaagcatacatctctaatctttcatatttaaagacgaacaattcactgaaattaaagttaacttatcaattattcaataattataaattattgaaaactctataaattaatatccccaagacttaagagtatttaaaatgaaaaagagcaaaaaaaaaatatgctatgagagtatgtttaaaacataactgtggaataataaaaatagctcaacaagccggaggtttgtgtttgaatttaaagtaatttgttttacctttctcagtttaccacctcaccgataaataggattaatactgctacccaccacagagggttcattagtaggctaaaagggaggatgaataatttacacaaatgttcaatgttatggctaaagagaaagaggttaaacagatgtttatccagtgaggtagaagaagccagaatgttagattgttcactgcaggtcgtcaagaaaggtggaaaaacatgcttatcaacaatcttggagacattacaatctgtaaacccttatctatcaaagatggccacatcagctgcatcagctcaaagccagtactagaaagagagagcatgttaattttcagttacagtgcaggagttaaacttccactaaggacaattatgaaagctacacaaaatactaacaacaatagtttgaacccattcagatcgcccaaggcagccagggcttactgggccaaaacctccagggaagggagcaggagatccatggccatttttccttctcagacatggacccgtttggaagcatgtggtataggggccatacacaaactagcagtggtaatcacactgttctggggagaccaagtttggagttcagagctaccaaggcaccagttctggaagtgccaaggtctcagagaaatgaggactgcagagacagagtcaacactctgagcatgtttcccctcaaggcatttctgagtcctaagtggcagaggtacagggcccaatgcccagtaaacaagacaaagccagctgctacgaatctaaaaaagatcagcagggattgtggcagtctcttagtggatgctaagtaaccaaaaacggcagttcaagatgcacctaggaagaggggcctttgcaaacaccacaaggtttcaaggtgagacccttgaagggctacaaactagaaacaagaggaccatgacaggatctgattaggcagcctggaagaaaaattatatcctctctaaagaacatgcctcccccacccagagcctgactttgtctatactctaaaaatacagtatcaaatatttaattgtaaaaaaatgatcatcaatgccaggaaacatgacaaatgaaaaccaagactgccaccaccccacacacagaaaaaacgcccacagctagttcaaaaattgatgttaaaagccacagatactaacataactgaacagaatgtttaagaaagcagaagcaaaaagaatttcaccaaagaactgaagtccattaagaataatcaaatgatgttccctgccctgtgtccaggtgttctgattgttcaattcccacctatgagtgagaacatgcagtgtttggttttctgtccttgtgatagtttgctcaaaatgatggtttccagcttcatccatgtccctacaaaggacatgaactcattcttttttatggctgcatagtattccatggtgtatatgtgccacattttcttaatccagtctattattgatggaaatttgggttggttccaagtctttgctgttgtgaatagttcgcaataagcatacgtgtgcatgtgtctttatagcagcatgatttatagtcctttgggtatatacccagtaatgggatcactgggtcaatagtatttctagttctagatccttgaggaatctccacactgtcttccacaatggttgaactagtttacagtcccaccaacagtgtataagtgttcctatttctccacatcctctccagcacctgttgtttcctgactttttaatgattgccattctgggggcagggggagggatagcattaagagaaatacctaatgtaaatgacgagttaatgggtgcagcacaccaacatggcacatgtatacatatgtaacaaacctgcacattgtgcacatgtaccctagaacttaaagagtgtgtgtgtgtgtgtgtgtgtgtgtgtgtgtgtgtgtgtatacatatatatatagagagagagagagaaagagagaataatcaaatggaaactctagaactcaaaacaaaataaatgaaattaagcattcagttcatgattttatcagcagactaaacacagcaaaagaaattgtgagtgaactgggagaaaaataggaagaaaatatgcagtctgaagcataaagaggaacaagactgagaaatacacaaaagacagtaagacatgagaaatgattcttaaaaattctaacatacctataattggagtccaagaagttgtggagaaattgaatgaggcagaggcaatattggaaaatatacatactgagaatttcctaaaagactcaagaaatcaagccacaagttaaaaaacaaaacaaacaaacaaaaaacctaagaaggattaataaaaagaaaattacacataagcacttaatagtaaaacttctgaaaaatcaaatacaaagtctgaaacacagtgccttgtccattttgggggaaaggacgagacaccaatttccgcactaatgttttcaacatttaatcatgtttccattatagaaaagcccagtactaatgttctgtttgtatgaacatactgttaagacccttgggaatggtgtgtctgctgcacccaactgtaaataccatgaccatctcaaggccaggcctggcaaatgctcagtttgtgtcatgaatacatgtgcacgttttctgctatgactgacctgtaaatccatagagcagatgcagttgtgtgactgaccgcccctcctcccagtatggcccacaggaaatgtcctaaaataagtgtttgctgaatttattatttctttctattaaagctgggatagaaaaacaaagatgcatggagtttaaaaccatccctctgcaccctcacttctattcccagtactaagatgacttatctccatttgtgtttgtccgtatttcttttccattaaaaatgtctttgctggggctgggtgcggcgggtcatgcctgtaatcccagcactttgggaggcgaggcaggcggatcacctgaggttagaagttcaagaccatcctagccaacatggtgaaaccccgtctcttctaaaaatacaaaaattagctgggtgtggtggtgtgtgcctgtaatcccagctactcgggaggctaaggcaagagaatcacttgaacctgggaggcagaggttgcaatgagctgagatcatgccactgcactccagcctgggcgagagagcaaaactctgtctcaaaaaataaaaataaaaataaaaaaataaaatgtcagggggaggggggagggatagcattaagagatatacctaatgctaaatgacaagttaatgggtgcagcacaccaacatggcacatgtacacatgtgtaacctgcacgttgtgcacatgtaccctaaaacttaaagtataataataataaaattaaaaaataaaaataaaaaataaaatgtctttgctgggcaccagttttccactaacatggcctacaccagccggagaacggaagagagaaacaaaagcgaaacagggagtgcctgcgtgtcctgcttgtgtcagccagatgagaccatgtgcaaattactactgcatggaggaacatgtgaggtgcagctcttgagctgcaggaggacccacagggagacttgcttcatctggagggagcttcatctgaaggcttcctggagcaagtggcatttgatgaatgccatcctggaaggatgggtggcatgcattctgacaaaaccacctcatgggttctttgcttattgggcaggggccactcctgccattcactgctgtgtccccagcactgggctggcacctgtaggagctccatgtcattcacattgtgaattaatgaatgaactagcaaaggcttagaggttagagggagaggttcagagcatgacgtggaaatactgctcaggggtctggttcagaggagtaggtggacagttggttgatcagttcctagggtctcatgccaagaagcagcacagaactttggaataaaaaaaagtttattaatcaagtttaatatgcccaccttatggttggttggttgagctttcaaagagtcatataagagaggagcacatacccagcacagcatgcagtacctgtttctatgactgacattgctcttagtggttcccacaaagccacgggggcaatccctggtgcttcacatccctgtttacagagtccccgtgcctcaaggctctagaagaccccatgccatgactcagaagccctcaatgcactcccatggcgcctgggaatttcaccaaatgagaagaggctgaaggaaaataaaatccactttgttcctgttatcacagtgcttgtcccagaaaacagcaagcccagcaattcccatgaaagtggctttgtttatcattcaattagcaccaactctggggcactctggctgtgtagttccctctgtcagaccagttcctgaccgggtgacaggacttaaccctttatttggagaaggggctgctcaaagcatcagattccatgtttatcccaaggacttcagcacagggagacttgggcttcctgggccatttctcctgaaggtccttggtctttgcctgtgctcagagatgcaagtcggctaacagagtgccacacagctcaatgccacagcaattaatccacttattagatgggccttggcattcccagataagttgggtgagtgtcacatcttcaggtcagtgcagtcacttccagtgactgggactgcagacagcaaggaggatgctgacagcagctacactttacacagaacctacaccctgcaggcgctgtgcttggcacctaccatctccacttcccttaggtctgcacagctcctcgagatgtgcccatgcttaacggaagaggagagcgaggcagcgggagcctgggtccctttctaagtgctcctctgcactgtccctgctgagcatctagcaagcacagaacaggagccggcagggctgggggaggtgcaccaaaaatcgtatagtcaaatgcaccagtcaagtgaggatgatctacctactgcaaacccttttgcatgagttcacttcatttctagaaatgtggctcaccataagaacaggcagaattgttgttgttgctcaacttgtacatttgatgttcacggttaaactaccatgaacatttttagcaatgttaaaaatgaggacaggacgtgggctgagctccttgttgtggggcgatcaggtgcctgtatcctcagctctgtacctagaagagcccaggagatggcccggggtggggatgaccggggtgaggagcagatgggatttgcaccgtcttggacaggggcatctgcggaggcattaagcccgctgctctctccagagccctgcgcctgtggcagcctgtctctctgcttcagaggtggagacataagggcaccacagtgagcataatggtccctcaaagcaactacatggagggttttccggtgcaggccaacttctactaaggcaaaagccgtcttcctgaggccatgcacccctcccctatgaagatgtgtttccacaacgtgggaggctccagaggccacacagggatgctgtttagaccgtgtgcacgccagcacagccctgccagccacagccgatcttgggccctgaacagacgctccttttagttccagcatcctgctggctcggcctccttctgcccttaattcccacaatattctcacattttccctttgctgctcagacccagagcaggaggcataataccgttagtgtgtggaaacaacactcatctcactttctggtattccgcctaagcagctggtgtccctggtgccctgcgggggtgaggtggccgggaaggctgctgctgcggggcagccccccgggaccgggctagaacttgggaggcgcgtgcccgtcgttctgggacttcaggaatgtctatgctcctctcctctcggcttccacctccttcatttcctttacccagaacaagggtgacagagggtcacgggcccttttccaaacgatctatttttatgctctcatccaggcttctgtgggaagctggataccactcattctccaacggccactatttacatgacatataagttaacaggaagaggagaaacccacggggctcaggcagggccactggctcgctcttcggaagccttagagcctggccaaaacctgcaacctaaatgtgtaaggagttgtcagacatattaaacattcatgagggatccaaacatcaaagttcatcctcaggaaccataacttacttagcaaaaaatcaggacatgtgacattaaaaacaaaatcagcattttcctgtgttcccaatttcccgtgttcctgataaggcataaaaattattcactcatacatcaattagtaactacaaatcgcctttgaatgttttatatcacctttaatgaaaaataaaataaatttagctgaggtcaatattatagtctcctatccaagtgaagaaacttgagttttgttaactacctaaaaatacagtctcaatctttggcccataaatacacagtcatattcacaataaactttcagaagtaagtgagactatccacctaactaactatttctctctctctctctctctctctctctctctctctctctctctctctctctccattctttcctccctcctagtcacatcccgggattattatgcagttaaataggaagtatctttttccattatttgagagagttctaaaaaaatggaacatcaaatctctcgtatccttcttccattacatttctaggcggggaattggggctgctgcagagaaacagctcagatctccaagttctagcctgagctcttctgccataaaccatggggtgttgggcacattgtcaacccctggggccttcaggatcttcatttacagactcacttcaattgggatcagattagatgatttctagggtttatttagctaggaatttttaaattctaatttagaaaagcaagactttgtattggagtttcctcagtagtgattagttttatttttttgtttgtttgtttttgttttttttttttaaagtccttatcttcactttgggaggccaaggcaggcagatcacttgagatcaggagtttgagaccagcctggccaacattgtgaaacaccgtctctattcaaaatacaaaagttagccagaaatcacttgaacccgggaggtggaggttgcagtgagccaagatcgtgccactgcactccagcctgggcaacagagcgagactccatctcaaaaaaaaaaaaaaaaaaaagtcattatcctataattcttttgttatttgtctatgaacaatcaggccatttaaccaaccttcttgaaagcaaagagaaaatggcaggcagccagatataatgagaattaattagtgaccaccccaacactggaaaagcattttcatggtttccgatgagaatcaaagtcctacagatacaaacaaacaaacaaaaatgatgaaaaacccacaaatggataaataaatactttcttggtgttgaatcttttctttttaaaatcctgatgtcaacataatacaaataatatgaaatttgttctacagcttaaggtcaactgatttcagcaaatatgagaaatgctctcaaaaggataaattgtttctgtctttttaaaggaagcaaggttcttattcccccagtgaagccagaattgctccagccagggctgaaatgggaatcctgtccaccaaaagccgggtgacccttttatgacattctcatcacaattggaattatccccttcaaaagagaccatgccacagtcttccttttaagcaataacacaaaaggaagtagaaaatgtagatgcaatagttcattacagttggagccctattttctcttattctttgaagatgtcccatttatattcaaggttttgatcagactggaaagaaaacacatttaccagtttagttggtgttgtgtagagaattctaatgttgaaacagtgaaaacagcgtttttcttcatagtgagtgtttcccaagcagtttttacacttgggatgcactaagtgaggccagttcctccagggactcacatagtcccttagcaacctacaagggatgagagttgtaaaaaaatgtgctttggtttgagttctcaagaaaacaaatgacttccttccttctagactttaaagaaagatgacactgaagtggagctactgaggctgcctagagaccacatcaagcctgcagacagagccaacacacagctgagaagatcagggtctagggagtcactggaaataaatgtgtgagagagacagagagagagacccacccgctgagtggccaaggagtcctcatgaagccaaatctgaggccacagccacccacagctgctcagtgagtttcgttatttttctcaaattgtgataagacatacataacaaaatttaccatcttagccatttttaagtgtacagtgctgtagcatcaagtacattcactttttcgtacaccaactatctccagaactttataatcttacaaaactataactctttccccattgaaataatttcctatcctccacccaagtccccaccatcccactttctgtatgtatgaattcaatgactctagggacctcatgtaagtggaatcatacagaatttgtcttcttgtgactgacttacttcactgaacacaatgtccctgaagttcttccatgttgtagtgcgtgtcagaacgtccttcctttttaaggctgagtaatattccactgcatgcatagatcacattttgtttatccattcagctgtccctggacactcgatagctttcaccctttgactttgcgaacagttacattttctcctctcttgttcctttagccagtttgagttgggactggttacttgcaacaggaaacagactcagtgacacaatgtccttgcctcaaagctgcttccagtccagtgggagtgcaaacagacaggaatgcaccagcacagggcagtcaggccagggtgagggtatgcaaagcagcaccagaaaagaaaagagccatctgaccctcctcagggaagctttccttatgctgagccaaaacaaaacaaaaacaaaaacccacaaacagaggaagtattgcccttcacaagcagagagagaacctgcataagaggctttgagagccctgggctgattatcatgatggagaatggaggttaccataatgtatacaccacgtccacacaggagtggacagcggtcagagaaagcttcaggcagctcaagatgataccggcgagggtctatgccaatgaagaggctgtacctaagatgcttggttccaagtctttagtccgcagaataattccagtctcataactggacttgtccacaggacaggaagtcttgatgttttctgttttcaggcagaattcccagagaatctggctttcctttagaaacggcacatgggacacagatgacatgtgctgaactttgccacagcccttctaaggaaaggtcactttagcctggtggctcaacagctgaagtcccgaggagtcctggtccaggatcatcattttgtcctacaaccactgtctgagtccatgtgcaccgctatataggaacaaccgaggctgggcaatttattttaaaaagaggtttatttggctcacggttctgaaggctgtagaaaaagcatctgcacctggtgagggcctcaggaagcttccattgatgtgcactctgcacaccctcaccctggcctaaccaccccatgccagtgcattcctgtctacctccactcccactggacttgtgaaaggaagctggcatcacatggtgagaggaaggcgagagagagagagtgagagagtgatagagagagagacagagagagagagagagaggaggggaggtgccaggctctttttgacaatcagttctcgtgtgaactaacagtgagaactcactcgttaccatgaggacagcaccaagcccttcatgaagtatctgcccccatggaggggacaaatatccaaactgtatcaatgactgcaccatggaagtctaaatcacataaggcccagggggagaaacctcccctgtaatctcagaagtctcttaccatgacttgaaaaccttattctatgtggcagatttcaatggacctgaatagaatcaaagacacccttaaaggacctgcctgtctaagaacccctgtggcactcggggcatctgcatcccttatgcccaccagcccatgtgccagggaccacaggcagctaatgggggtttctcatgtagtttcagaaactggaagactgctgcttttgagagaatatcactggtcagactctaaccaggtccctaaccaggcgttgccatcttcacccagtatttctaaagcgtcctgtgagcaatgaggaatgcaacactgggaatcctgtgttaggtaagaattcgaaacctcagcttcacttaaacccttcactcagttaacaaaaagatgtactctcattgcagtaaatataaacagagactcagaatgcattttatctttgttcagaaaacataagttatctttataaattatcactattttactaatagtgactatctgcgcggtgctcagtgggcttacttgaccctcagaacaactcttaaaggtgtgcactctcgtccatctatacctgtgaggaggccgaggcttcagcacttcccctcacctgcacctggagggaaacacacgcaccacccagctggagcaggactcaaacatgattcttgggtttcccacctctagctcattagcacgaacctcattccttttccttttcactctgtccacagctctgtgagttaagaggaatcctggtattccacgagttgggagtattagtcagcttgggctgctataaaaaataccacacagtgactgaaccaacagaaatgtatcccctcccagtctagcagctggaagtccaagatcaaggcattggcagggctggtttctcccgaggcttctctctgcggtgcacagatggccatcttctccctgtgtcctcacatggtcttccctctgtgtgtctgtgtcctgatcgcccccttctacagggacacaagtcatgttggatgagggctcaccctaagggacccactttcaccagtcaccactgtaaaggccctttctccaaacactcacatcctggggttcgggttaaggcatcattcaacataggaatgtgcagggggtggagggagtcacaattcagcctaacacgaattgtgtgtggtttggggagatgcagcccctctataaatggcaggagagtgacataggccctacttcagagttctcagggaatctgccaagttagggcatgaaaggtgtttacagcagggcctggcccctggcaagcactcgaaagatccatcgcgacgaggaagaaatgaaaactgacatgaggcatgtggcttttgaggagaccacacagactttctaatgtgtcccttctgactcttggagcatgggaattctgaccagcctgaggcaggactccaggaggagccaattgtgccagaaaacctgcatctcatggggccctgagccagcccgaggagggagatgatgcggcttcacccgccttccttcttggtcccgattctcctctctttgtgtttttgtttcactaaggtttccgattcataccatgcctaatgggtaggctactcactttgctgatgcaagggtctcattctcaacccactggttttcggtggtaccattctccttcaggctggctctatgttcttcatgggcagcgtctccacggtcatgcaccatgccactggcttctggaccccgaaggtgctatggagcccagctccattccactgagtccaaaactcacgaatacagaggccaccagcactactgaaatgccagcagggtgtgtcggcatttggagggccttccagcaaagctttgaacatgctataattgctccaatataacaagtgatgttccaattaataagataatttacagcaatccacagtctctgccacaggtggttctctctccaagagggctgtcccgggacagaactggacaatgcttgaagctctcatctgtccctctgcccataattactcctgtctcataggaaataaatttaagaaataaccattgtgctctgaggggaaggagggaacaaacacttgggagttcagaaagaccttcgctcaaatagaccaaattgtcctgattttactctacattgttttcttcccccaaagaccatccacttagaatgcacaacacaatataaaagacctccttgtctacagcactcaagcctctctctaaccagcagttcagggagggggacccactgctgaagcttccctcctgcccatcatccaccaaggttttcctgatgatgaacattcactgaggacttcccgaccctcccagctgtcctggaaggaggagtctcattggcattctacaaaaagattaaaggctaaagaactgtaaaagcatcaagcatccctcagaactggtccctcagccccaggaccagggtctgggtacattacatagccttgacctatagaaggaagctgatgcaacagcaaaaccacaaaccaatgggaaagcacatgagagtgaagtagaacgggcaaaaaaaaaaaaaaaaaaaaaaagcaaaggccaggtgcagtggctcacgcctgtaatcccagcactttgggagactgacgcaggcggatcacgaggtcaggaattcaagaccagcctgaccaacatggtgaaaccccgtctctactaaaaatacaaaaattagccgggcgtggtagttcatgcctgtaatcccagctactcaggaggatgaagcaggagaatcgcttgaacccgggaggcggaggttgcagtgagccaagatcgcgccactgcactccagcctgggtgacagagtgagactccgtatcaaacaaacaaacaaacaaacacacacacacacacaatcaaaaaaacaacccagtgaaatgaaaattaacaaacataccctaggaatggaatgttatgattagaaaaagaaaaaagaaaatggtttgtgaaagcctgtatatgacgaacataaaactgaggggagtgcctaaatattctaagttgctgataatatttaccatgagtcgagtgcagtgctcaagctggaaggactggagaccccgcagaatcacagaagccctacccggggcatgaagccctctaaagccctcaagagcagcctgcctccgctccctgattccctcttacggaggccctcggtggccacggaccctgctctatctggcacatggccagtagcacactgctggaaccgtgtcagaggtgaggctgtgtctcattcactgtcacatcaccagggcttcctacataggaggccagcagggaggggtcccctgctgaggattcattgcatggtaggcaccccgtctccagcccacctgcagctctgcacaccctgggccgaccatgcagccagtctagggctggaggtaccgctcctcgaggcctcatgtgcccagtccccagttgctttttctcacggagccacatttctgaaatctgtgcataccttttcacccacagtgcatcctgttttacctggcactgttttccctatcttagtgtcatataaaatgacagcttttctgagaatccacctatcttcgaatcttcaaaagaaacccaaaccaaagaggccagaaagaagtggcacatgcttccggtactgaaagaaaagaactgtcaactgtgaattctatatcctgcagaaataccattcaggaatgaaggaaaaataaagaaatccagagatgaaggaaaatgaagagattttgttgtttgcaaatgtcccagtagggaatggccaaaggaaattttctaaacagaatgaaaatcataagatttggaacttccaaaaggaaagaagaatgttcaaatgagtcaaagtaagggtaaatataacagtccattcttctcatgagtttcttaagtcactttttatagttggagcaactagcagacatcatcacatgtggtactcaccataaacggataagatacttccaacaattgtactttaaaaatggggagggtgaagaaacttaaattgaagtaagatttctatgctacgctccaagtgataaaataatacaagtagccataaataatgacaagttatgtatataccaagagcgaggactaaaaaaactacagggagggatatactcaaaaatactatcaataaataaagacagagtttcccctaaatgataaataaatccacagtaaggcaggaaaagagaaacagaagagcagaagacaggaaggaaaaaatccggaaaaacgtatgcacccggattttctactaagaatttatttgacattgacatccttggtccatctggaactgatgttggcatgtgttataaaagggatccattaaccttttctacctggcaaacctcagctctatttatgaggcagctcctctttcccctcctgacctggctgcctgttttgtctggcaccaaagttccaagcatgtgctggtctgttttgcactttcatctgtttgttggtcaatttatctgtccttgtaccagctcatgtttaccgaattttctatctttgtggtaagtcctcatttctagtagttgtatactggctactgagaatttttactttattatataaattttgaatcagcttatcaagttccacaaaataatctgctggcactctgactggaattaaattaagtacacagatgaaattgggagggtccaacatgtttgtgacattgtcttcctatccacaaacatggctttctctccatttatttttatctttttaaatgtctcttaacagggctaggcaaggtggctcacgcctgtaatcccagcactttaggaggcggaggcaggcagaccgcttgaggtcaggagtttgagaccagcctggccaacatggtgaaaccccatctctactaaaaagacaaaaattagccgtgtgtggtggtgcacatctgtagtcccagctactcaggaggctgaggccagagaatcacttgaacctgggaggcgaaggttgcagtgagccaagatcatgccactgcactctggcttgggcaacaaagtgagactccatctaaataaatgaataaatattttttaaaagtctcttaataaaaactttgaaaatctttgaaaaactttgaaaaatgtccctgttaagaaaaaaatagtgtctttttaaatagtctgcgcataactgtataattcctgtatcccttcaattgtcaccaagatatccttgacttgatttcctccagtcaagtgcagcatgagctacaaaggaaactgggacttttctcgtgatgataaatctagtaggcagcagaagtgatgggaccactgggaaaactatcaagggaaaccagacttggaggagtcagcttggaagcatgatggaccgtgtggttttgtgtatccattactcccatcaacagatgcacaaagaggggttcccaagacccacatcttccagaagcaagccttatctttggtcccatttccttcttacctccacagagcagtaaatgagttccatagcattctagaagcttttctatctgtacttggtcactcaagaaagccaggcatcccactggtgaccctcgtcctcctgccagctgagccctcattcctctatcttccactccacgtttgtaaaaccctgtttaactttaatttacttgggtgacccggtacccacctgccttctccacccagctatccattctacctgaggctaatcaagaatcatatgtccacagagaacactgctcaaggaaggccacaggccactctgctatctcgtggtggaacgagaagttgacattccagtgatttcttagtcctgcgttcttaggttatctcctggtaaaatcacagtgagcaatgggacggagcaagaaggcagagtgtgctgtgtgacggggaccttctggtcccttgactcttactgtaaactcattctgtttacagtccctcctgataggagggagaggccacctgtctcaggtgagcctaatgtaaacaaaatgggcatggtattctcatcagaccacaggacttcgagccatcccagacctgtgtctgacagcagtaagaccaccttccatgcatcacacccaccaggcttcctgtcctgatcctacatcaactaggcagcttgattgccttggatgttattttttttaaagacagggaagtggaaacagaagggtagaggagagaaggtcaaagtgcgcagcagttagaactatgttgatgcatggtcctggctgcaaactgcctttttagaaccatgcggattatcagatcccagctccaaccacgggagctttcactgtgcttttggagaaatgttgccatcagtacaggtgccaatctgaatgtcaacagcttttaaatcacacagctcttgggactgttgtaaaatcctgtttatatgacacatatcaacttttcatataaagaaagtaaaatggaaatcagaattacagctccctttctctgagtgcctactatacaccaggcactctgctaacccacacataggtgttatctgatttaatcctcatacaaacatttccacatgcaaatcatcttatggatgaggaaacagattctgaaaagtgaggttaagaagcttattcaaaggaagccaactcatctgttggactcagaaaactatgttctttccacaagacatccctgcctcccaccagcagggtctgagtcagaacgcagaatgtaatacaattactctgcccctacaggaggacaaggaaccttctgcacaggtttgccctggggattaggaaggcacaggtactctgggagcaacttagagccctgtcactgaggttcccccttagagtgcaggaagccccagcagaagacagcaccaggctccccacgggccaccatggctacaggttggccaagggagaaaatcacccctctctcgaaataggtggaccaaaattcttttaatctcacctccaaagtcagaaaactatgtccgtcctaaccagacaatctctaatacactgacacgcatatggaattcatgaaaaattactaatgtatataaaatacattaaaaggacaggaaacttttgaaaagatagcatcttccatcagctggagagcaatccatcaatcctggaagggatactgggcaagattttcagcctgggaaggagaagctggaccttgagccacttgggcttgtctcagagcggctgcagtgctcgtttcacaataaagagctctgggttttcccctcgctccctcttaatcttccccatccttccagctggaatacacacacacacgctgtgtcggctgcagggccagcagaatcacaggccagccacgcagaggagggagcagatgcccaggaggcccaccctgggcccaggcgccagccctgcccgtgctacccccagtgcctggctgactctcccagggtcccacagagccccagccccagttcagacatttgggagggaagggacagtgaagaaacaaagcccctaggtccagaagctctgttaacataatctgagcaggttctttcagtgaatgcatgggtttttgtttttgtttttttcaatgacatgaactcgtttagaaatactctctttgcttgcttcaaccacagaagagacaacagtaaatctcattttagaacccagcgcctgatcctaacgcttgctttcggcatttagtagaaacaactgtgctgggtgctcagaagtgcagccttctggtcctctgaaggtcctgctgcccgctgcccgggatccctcaagggccctggaactggggtgggggcggtgacagccctggaatggggcaggctcgctttatcagtttcagtaaaggaatgcactgtgctaggaagcagtcctgttccagaaaagctgcacatctgtaaaccaggcttttgttagccctgagtgaatctcagcaaagacaaagcatgactttcttctggaaggactagccctccaggctcaagggctggggcgttttgtcccaaagccttggcgacttgagaactgtcatcaagtgacaaggggactcttggaacaatcagccctcctcccaagtcctgcccaggattcctggcccagtgacctctgcatcccacctcatacccctccccacccccctccactggagcccaggagatcaagtttcagcaagggcaactggatccgggccagaggcgccaggagcacagaagacaccaggcgtgtagggactgagcaggaagaagcaatgagtcccaatgtacagcttacctggcacccaggaccctggtcagtccatggaagggcctgggaggatgtgggccagacagagggaactccttgggctgtgtccccagcagccctacgtggtgagcagagtcccgagtccctgtcccagcggtggcgtcccccacccacccaggcagggctctgtgttccggcctgtcccgagggagtcgtgcagggggcggggcggccacctccaaagaggcccattcagagggcggccgagagagctcaggcccgggaaagaatcccgggattgttgagctgctgctggctgtcgcgggcggcctgcccagtcagtgcctccagacggccctggccccgccttgctcactgctgcggtttgcttccttttcatttcttttcactttttcctcccccaactttaatttcttgcaacctccctgctgaaacccaaccaggcttagtttcagcctcaggccagccatcacccaaggcacaagcggcaggacctgcccaccatgcccccaaacctgcccctccaaaatcaaacccccattcccctgggaccccacactcacagcagagagaggcttccagcaactagccagagaggaagtggaagcctgaacagtctctaacaacaaggatgtccctagtcagtcctctgccccccaccccggcaggagcctacacccatgtccctttcctctggatggggccatctgcctctcatctggcctggccaccaggctggaagcctttcactcctcaaggcagcccaggggaccttccaatgcaaatcccaccctgtcactgcactgctcaaaccctgcaggttttcttccgggccccaatgggctataacatcctgcccaaaccctgtcctagagcctgattctggatccctcagcctgttctgcctggctggcacctactgtaggctgttggcagcctctacgcactgtgtcccctttcttccatgttctttgctcatatgcttctctcatctaaaaggccaaactcctaagccaactgctgaaaaactcctatacattctacaaagcccttttcaagtgaccccacatttttttcagcatttggaacaccatctccctcagtcaagtcaaagtgctctgttcccgtgacccgaaatctgactataacccagtccacatggcagaacataggggcctgtcatgtgtctgggccttagagacacggtacattactcagggttttcacaaggggaagcacagaacagacactcactcctggcttctcttgtctcttgtgtctggcaaaatcccactccctcttcaaatgctggtgtgtcaccccttcccctagaaagctctccctggaagagcaggtccccgttcctcctgggctgcctcctttcttacagcccctgtgcacgcctgtgcttccagcacagcttgctgcccagcctgagccgagccattggccggtccagcccctgcacgaccctggcacactcatcaacctgtgaagagtgggcaggtcaatgccctaccccaagagggacacggcttgcctgggaccctcagggccaccgctccgcacatgggccaggaagatccctgggaccttcctcccaaaggtctgagtaggcatttcctccctggttgtttatgtgttgcagagcagcagctcctgcaaatgatgctgtcggaaatgcctgaccacggacagagcaggctcagcggaagcggatggactggcctttcccgtgcctgtcactccccaagcagagaggaaggcggcacggggcggcaccagcatggggcagccaggcccaggaagggtgactgtgaccaggatggcactcccaagggtgggtcccattccctccgtggaactgtgggctcagtgactcggagcaaacccacagggatgggcagcagggaggaggaggcagggcatgctgcttctgtgcccgtgtcacagccatgactgggacaatcctgagtgtgaatctacagatttaagcatcttctggagatctgtttatctttcctctcttgcttctttctcctcagctgcagtgccagggactaaagtgatttcaaaggtgggctccaggtggcagcaagtccactgaggaaaaaacatttaaaaattcttcccggacagtctgctccccccacccaaacacccagagatccccggggacgacaggacctggactgtccacatgttgactctgctacagccaggaccacccactgcaccttagcaaaatcaagcaggggtgcaaatcagacacctggaagaggacagcccaccccaccagccggcaatgccaggtctcctctcagaaacacaggtgctggtctcacgcagctcccactctgcgggctcaggccctttgcaggcatgatgcactcagctccctggagctgagagactgtctctctccttccacttacccatcagaaaacaaaacaaacttttatccagatccttctctgtgttagatgccaggagtgtgatgaagactctgctctggaaatgtcctgaggctgagggagggagggtgacaccaaatcccaacccaggtcccactgggaagtcacatccttcaaatgcaggtgagagcgaggcagcagaaacaaaaggacggagggaaggtgaagcaaggagggagaggaggaacagagggagagaaggggcaacaggagtttccctttcggaggaagacacaagcagacttggttgccagagggaggtgagaaaaggggcattaaaccaaggagaagggaggagctggggcgcccagagaagacacacgggaagggatgagcaagtttaaaggtctcgcagcctccatagggggcacgtccttcctgagacacgacctgatcagctggatggaattctcccttaacaccctcccaccagcccgcactgcctgtccaccagcctcacgggtcctacaggggctgcatcccatcacctcccacatctctgtcccaccggactcgggcgaaccttatgtgtgcacacaataagaggaaccctggaccagccctactcccagcgatcaggtgatctgcaggtacctttgaggactgggcacatgacttagcaaaggaacttcagatgctttatgtgaaagctgcctcaaagacggtgccactcctgcaaactgtgagtctctctactacatgcaaggcagttctcgaaggcctgggaaggatagtcagggtgacccacaggttctgttttcagcaacaggctctgccccaataaaacaaaactaagagggatactagaatgcctccgagggaccaggcactgcagactgagatcctcagctttattcgaatgtacttgtttgttcctgagaattacgtgctggccagcaccccagggcgagctctactctggggttcttgagactcaagtggagtgctcacttgggcattgcggagaaggaattaaaaacaaacacaaaacacaaaccctccacaacctcagcgacactgggacttcacagtaacccaatctcatgctcctctggaaaaatcaaattccagtgagctgctcacaccatccctctgccaggtgacacatggagacctgacctctgacgcccatcgcacacttggttggccctgaagcatcagaaaagtttactttcattccaaatgatggaattctcacttgcctggctttcaggattttttgtaaacttgttcatttgctctttctctacatgtgtgcatatataagtgcatggcctgtaagaagtgctcagaaagtggcaaatgcctcaatctaggcagagccataaatacctgcacacataacacacatatgtaccatataacatgtctacatatgtgtgtcactaaaatgtgatagaatttaaacagacaacaaggtggttcctggcctaagtaggacagcctggccaatgcctatctgttgaggaggtacactaatctggggggcaccttggtaatgccctcaaaggctctgatggggcaggcccgggccagtaacaaatgtcaagaagcagactacatattccttcttcagccctctcagtgactcaagacatctgacccttctgcaagtctcacaatcccagaccctcccaagtgtgtcaaaaagaatgggtgcattttggccaggaatcacagcctgaagggacagtggtaacaggtgcttcagagaaaatgcccaggcattttacctcttgacgcccagtgctcttgggacaccactgtgaggcaggctgctgtctagaggggatggaactgtggggaggtggattacaaggtgagggccttcggaggaaagtaaaaatgcaagggataccaggtaaatgcttccagcagggaaacatccttgcacattttatatgctggggcttcataagcattttcttccaagccattcccagttctaagaggcatcctgctgggctgaactgccttttcctgttcaaagcagcgaggaggagacaagcccaggctcaggcccgagctgtggattccggattccacaccagccacaggctgcttcagaagggaccccagcccgcgagctgccccagggccaggaccgcctcccttcctcaatcccgggatggagcacaattctcatagacaatggggctcagaaaatgcttgaataaggaagtgcattttgaatttaaaaaatgaaattttaagacaaatttttgttacactaccgtattcacaggctgaaattttcatttttaagagacttcccccaacaccatgcatggcacacatattcttattttacttagatttaaaagatgctttcagaggttatgcaaactgttcaagatcacagagctacagacgggcaggaccagagccacatctgtcaccaagccccagggccagcatcaaatcctgttagcagcacttcagaataacttctacatgctgagggtcaagaacagtccaccaggagaggagggggtaatggaatgagctgataaataaatttagaaaagcagattcctctaaacccaaagtgagcaaacgagaacattcagcatggtagagaagtctgcaggctgacatggggacacttccaagctggcctgctccgcggatgaggtgtcagcacagaaagccaacaccttttttttttttagcttcatcaccctcaaatgaattcatgttctcatctcaaaagacccctaaaggcacattcacaggccagcactttaggctgacctccacgaacccagcactgatgtttacttttaaatataatttagaagcagtcaacttttctttttcatgttgttcatctggggcaggggttggaggaggctgcgatgtttgctaatccacaccagttttttggggtcaccatgcaccagtgtgcattctttggcactaattggaatgcaaagtacatcacaggcatgtatccaggcatgtctattcctatgcacacttacatatgcctacgtacctgaatataaacccatggagaaatccatataggaatgcatgtgcttttgaggctctagaaaatccaaagtaaacaagggcctctataaatgtcacacatattcacattcagtacatgcctttgtccctattataaacattctcattcagagctcataaaaattcaacagaaaagggagtcgagtacaggaaagaaagaagaagattggtaaaagcattgtatctgtcaatttttgaaggatgacagctttttcaataaaaataaagcattgtgtcaaaataatctctctgtctctgtcttcctcttgtcctcttctcacgctgtgtctctctatcagtccctggggctctgaaactatttcaataagaaagtgcattctgaattaaaaaactaaattttaagacaaatttttgttacactagcatattcataggctgaaatcttcatttttaagactgcccccaataccatgcatggcacacacattcttattttgcttagatttaaatgatgcttccagaggttatgcaaactgttcaagatcatagagctacagagggtaaggaccagtgccactggtactgcccttttcttcctccctgtggcaaacatcatgaccctttgaaacctaccaaatccaggaagtccgcacagcaccaaccaaacccctgtgtcccctcttgtgagccaatgaggaccacttcacatgctaccactcctgatcagtctcatgcactggcacttggatggaggcaatcctcccagcccttcacaaaacctccaatcgacagcagagaagaggctgcatgcttggaagccaggcccctaaaatgcctacaccctactctccagaagaactgaacacaaaatagaagttgcaaaatatataaaggcatcctcttgaagtaaactaacattaactgctaatctttttcactgaagcctaaagtccccaaaccccctctgaataccacttgtaaagctgttataggataaggatgctctggaactacctaggggcgatggtctcatgactccgtaaatctactgaatgctggtgcaatgttcaccttcaaatagatgcttttatgttatgtgtttatatttttaaaaaattatgaaatagtttggaagctgagatgtatcagaaccacgactcttttttttttttttttttttgacagagtctcactctgttgtcaggctgcagtacagtggtgcgatctcggctcatgcaacctccgcctcctgggttcaaacagtatttaaatcctgcctcagcctcccgagtagctggaactacaggcatgcgccaccatgcccagctaattcttgcatttttagtagagacagggtttcaccatgttggccaggatggtctctatctcttgacctcatgatccgcctgccttggcctcctaaggtgctgggattacaggcatgagccactgcgcctggcgagaaccacgactttttaaaggaaaccttttctcatgtctttattattcatttgttttgaaaatatcatcaagattaaggatcagctaagaaacagaataatttacatcttacatttcataattttatctatttttgcttataggggagacttgagattaaacgactcccattgttacatttttacaaatatttttgttttcaagaaaagcatgtccatttgaggctcccatgtggaatttctgagaagcctaaggatactgtcctccaacacatggctcctggggcataatgtggccatgtggcaatacattcaacagacggacgatggcgagggctgccactgacgctcccgcttgagggccccaaatgggtgaagcctggttgggcccgtcctcataaagctggaggcattacatcagtgcctacagctgctctgccatctcctgctcctgtccccagtccttcatgctaatcacaacctcttttaaatgacaacacatccctaggagaattaaacagtatttaaattcatatttaaatatgcataatgtgagcagatattgaaatacccatcattttcctggagtaggtgctggcatttaaaacatgagcacactgggcacaagcacatctctgggaaaagcaggattcccagggctcagccacccagggccagatgcccaggggccttctccgtcccccgactcatgctctgaacccagacttacagttgtcactggtctccccagctcagggaaccgcccttcatatggatgctctgttctcctaacagcatcagtgtccactatttgctgagtgttgatcaggtctgggccaggagccagagctacatgttctggtccaatcttctcaagaaccatgtgcagtaggaatgactactgttgtacaggacatgaaactagggctcagagaggtccctagaactgcctgagctcacccagataggaagtctcagagccactatatgtgtgcatccagcatttgaccagagagagaagaaatgtcaggagaggacccaccagacaccactctgccgtgtccttttaggcctccctatctgctgagagatgcttcggacagcagtttccaacagctgagtgttgttatcacagagcttacttgagcctggcaatgggactagaatccaaatgctgaatgcggaaaatctttccaaatatttgaatgtcaaaatgcagaaagatctctttggtcacttcagcctctattcttcatgactagttagctaacaccaagcagagttaaaaaaaaaaaaaaaaaaggcagtgaatttctactgtttggtgtgtcagggaagcttggggccgatggaggggttgattcataacgtttgctaaatcctgtggtgtaaacaatcccgccctggcagatcccaagctgccaatgtgctgtcagctggctcacaaaattcctcacacttcagcaatcagctctcggtaccagcaggttctggcaagccccagctttgggcattcatcccccttggcttctgttagtcacattatttggaaaagactcctttaattcacccatctattaataaatctagagatgttttggtttgctttttgtgtattctgtttattgtttattgaagaatcgcttgtttgtgagaagggtgggtgaaggatgcctgtggcagaagctggccccagctggctcccaggccacttggcacggaagccttatggctaaactaagtgcccataataccctgttttccatgatgtgattattacacattgcatgcctgtatcaaaacatctcatgtactccatacacacctatactatgtacccataaaaataaaaaatagaaaataaaaaattataaactaagtgcccaaaggacctggagagaaacacagagaagcgtgcgggctgcatttggtcaccctattgcgttagcctggatacagatgggtctatcttgtgacagactctccttgaccaaaccttagccaggctcctccaagccctcttctccactaggcctcaacattggccttccacgtccaaccgtggcaagctcagttccagcaagaatcctgcttttcatcccccacacttgatatctaatcccccttgacacgtcatcaagctcctcatccctcgccatttgtgtctaagtccctggcctgtctgtagcagaaaccgtgttaggccagtttagcaagaacccccctacccttgatgtcccttcttaatgactttccatccaccagatccttttgctctattcctcggtcataaatctccagctgtctttgctgcatttggggctgagcccagcactttctcctgttgcaataatcctgaataaaatctgtccttacagcctttaactaactgggctatttctcttggacacctatcctggtggttgtctggaaaagaacttaacacatggggcttatgctgactaaggaggtatcaagttatgttttagtaatgcgatctgcagaggaattttatggagatagtgttatactaactgcatactaattaacaagaagccagaacctaatttaaacaataatgacaaaagcaatacaattagaaagagcagtcaggctccaattccactgtgttaaggtcagctgattgcaccacctgaatcctacacaaatgttctgatttcctcctatctcttctgaaaccatttggtctgttccagcccactgtccatcccaccgtgttcttcatgcagcagccacagtgatgtgtgaaaatgcaaatctgagcagtcacctccccatcctgaggttcagtaatgacctcacattgcatgtggatgccacaccaccaccttctgggaactacagagaacggctcctggcctggctccaccttcccgacctcttactccaccactcttctgccaatctcctgttgcctttttggctactccattccccttctactcttgcccctcccaaccattagcagacatgaatctcttctctgtgtctacaattttgccatgtaaaaagtgtgacatatatggaatcatacactatacagacttcaggttttgacttttctcactcaacctaatgttctagagacccatccgggttgttgtgtgtatgaataattcacttatttttattgctgagaagtgttccatggtattgaggtactacaatttgtttaaccactggcctgttgaaggacatctacagtttggggctattaaagtaaaaagagttcctgtacaggttttatgtgaacataagtctatttctttgggataaatgcccaggaatgcaatcactgagtcacatggcagatgtaggtttttcatttttaagaaattgccaaaattgttttccacagcagctgtaccattttaacaatccctccagcaacgtataaggggtctagtttttccacatgctcaccagtattggatgttgtcactattttttattttagccattctgataggtgtgatttaaatttatattttgctaatggctaatgatgttgagcatcttttcacgtgctcataagccacctctacgtcctcttcagtgacatgtctctttttttctttgaaccattttctaattttttttcctactgaataaaaatccatttatttaatttagtcagtggcttttctttttaatttcaacttttattttaaattcaggggatactgaatttgcttaggacaatggcctacagctgcatccatgttgttgcaaaggacatgatttggttctttttttacgtctgcggagtacttcgatggtgtatatgtcccacattttctttatccaattcactgttgatgggcacctaggttgagtccaggtctttgctattgtgaattgtgctgtgataaacatacaagtgcatgcgtctttttggtagaatgattttttttcttttgggtgtatatccggtaatgggactgctgggtcaaatggcagttctgttttcagttctttgagaaatctttaaactactttccacagtggcttaactaattcacattccctccaacagtgtatacatgttctttttctctgcagctttgccagcatctgttgtttttcgactttttaataatagtttggctcattttctaagtgaattgtttgttctttactgctgagtattgagagattatatacattctagatgatattcctttttttggacatgtggtttgcaaaccttttctcctactctgcagtttgtcttttttatcctcttcacaggttctttccatagcaaaaatgtttaatttttataaagtctaatttgtcaacttttccttttatggttcatgcttttgtcctaacctcataactctttgcctagtgatcccaaagattttctcccattttaaaaaatactatgttttacattttacatttaagtccatcatccattttaagttaatttttgtataaagtgtgagcctttggtggctgttcattgttttgcctgtgggtgcccaggtgcccccgcatcatttgttgaaaggctgaccttccccgacttgcttctgtacctttgtcaaaaaaatcagctgggcatatctgtgtaggcctgtttctgggttctctactctgtttcatgaacctaagtgtctgttcctccatccacaccacagtcttgatgactgtagctatacaataagtcttgaaattaggtaacctcattccttccacttaattctttctcaaagttgttttggctattctggttccttagcctttccacataaattttagaattatgttgtctatatctacaaaaaaatcttgctgagattttgataggaattgtggtaaaactgtctgtcaatctggaaagaagtgacagctctactaggttgagttttccatccatgaaaacagtatgtctccccacttattgaaatattctgtggtttccttcatcagcattgtgcagttttcagcacagaagtcttgtgcatggtttgctaggtttacatctaaccatttaatttttttgagctattataagtggcatatatatatatatatatatatatgtatacatatgcgatcatatgccacctctatgtccttttcataaatatatgtatacatatgtgtatatgtgtgtatatatatacatacgaatatatgtgtgtgtgcatatacatatatatatatatatatatatatttttttttttttttttttttttttttgagacggagtctagctcgtcgccaggctggaatgcagtggtgcaatcacagctcactgtaacctccacctcctgggttcaagtgattctcctgcctcagcctcctgaatagccgggattacaggcacgcactgccacgcccaactaatttttgtattttgagtacagacagagtttcaccatgttggccaggatggtctcgatctcttgacctcgtgatctgcccacccctgcctcccaaagtgctgggattacaggcgtgagctactccgccgggctgtgacttatatttttaatttcagcttctacaggtgcattgctagcgtactgaaatagaactagtttttgtgtgtcgaactagaatcctgcaaagtggctgaatttgttctaacagtttcactttttgttgttgttttgttgttccctgggattttcttttttttcttttttttttttttgagacagagtctcacactgtcgcccaggctggagtgcagtggtgcaatctcagctcactgcaagctccgcctcttccctgggattttctgtttggacaatcatgtcagcagcagactcaagattccctggggctttctacgtagatgatcatgtcaccagcaaaaagggacagttttatttctttcctctcatctgttgtcttaatttccttttcttgtattatgtctctgtagaacttccagaactatgttgaaaaagagtgctgtcagctgtggggctttttagatgctttttgtaaggttgaaggagtacctgtcttctattttgctggaagttttgagtcatgaatgatgtgaattttgccaaactctttttattctttttttggattgactgatatagtcgtgagctttttctttagcctgttagtatagtgtattacatgaatgaattttcaaatactaaaccagccttgcatctcagaatatgtcccatttggctacagtgtgtcaatctttttatatattgctgtgttctatttgtttatgttttgttaaggagttttgtatctgaatctgcgagggatattggtctgtagttttctttttctgttctttttgcctggttttggtatcagggtaatactagcttcacaaaatgaattaggacatgatcccccctcttctgttttctggaaggtattgcgtagaatcagtgttaattcttctttacatgtttggtagaattatccagtgaaacctgaagatttcttttttgggagattataaattactaggtcaatttccttatagttacagggtattcaagtagtctatttcctattgggtgagttgtgacagttcatgctcattaaggaactggtctatttaacctaagttttaaaaactatgcatgtagagtagtttgtgtattccttcattattcttttggtgtctgcagggtctttagtgatggtgcctgtttccttcctaacaatagtaatctatgtcctccatttttttgttagtcttgctagaggtttgtcaattttattgatcttttcaaagaaccacttctttcatttattttctctattacttctctgtatctttttaaatttctgcttagatttttattatctccttccttctgcttgccttgggtctagtttgttctcctttttctaggttatggaggtaagagcataaactattcatttcagaattttcttcttgcccaaaatttcctctcagtgcggctgtattaaagcagtggataaagccatgtctcacaatttttgatattttatcctcattttcattcagttcagtatgtttttggatttccctcgagacctcttctttgacccatagattatttataagtgtgctgttcagtttccaagtgttgaaggtgttcctgttgcccttctgttactgatttctagtgagtccattgtggttggagaacatgttctgcatggttcagttacttttagtcctctgaagattgtttcctggcccatagatattataaataaggcctaccgggtcccttggccctgaagtccatggctagctggcctatttctccccatctttcagagctttcttatatttgtcttatacttactgtccaaggttttaagttgtacttagcaggagaaatagagaaaagtatgtctaattcaccctccgggaagtgaagcctctccctaatggtattttaaagcaaatactgtcatttatatgcacatcagtatctaggcctaaatgatacgcagttaagcattactgcagatgcctaaagcctactacttcaaaactgcacagtggctgtgaatggcaggtactatagtctgcatttttagataaggaggtggaggttcataggggttacctaaatgtacaaattacatggttattccatgactgtgagactttccatgtgctttttagttgtgacattaggtcacttctaggttagacaagacaaagtgaaacatcagccctgtataatctgcccatggctgtggagtcggctgatggagctgaaactctgactttgccacttactagctactcaacttcttcgtgtcaatttccttgcctgtaaaatgggggtaacagtaagagtgacccatagaatgtgactgtgaaatggaaggaaatcataaagatcaggggacacattctgtatgggcgagctacctctgttattactgtgcccttggaggagtctcacaactccacttgactttgcagagtgggtggggcctcctggcaagggcactggctcaccacactgtctgatgaaagcatccactaagtcagcactgtgttatctctgtgctccttgtgggctaatgtgaagttgaccctccctggggactgctgaaataaaaatctagaaggctcacattaatattgttatcatgtcacctttttatatttaaaggcaaagccctgacttcttctgtgtgaatatgtacatgcagatagtactcaggacaagttgaagccactggaatctaacacatgctggtgtgcagagccatcctcatccacacatagtgcagcgctcatccacgcacaggacatggagctcatctccaggctgggacaatcgggccagcataagacagccaggccactgggtaccccacgctgagcacccaggcttcctgcagcctcctagacccttctggagtttagacggggctccacattctcttatgctcaatacagtgatcttagaggcctccctcaggagctgttaatgagtttgcaggctgtttctagtattttatttcctcaggcttattacccaccttccactgtttgtcatctacctatttcaaacaaacccggttttggtgttgcaggagaagacaggattccaggccagagggctagatgccagcccaaacccactgaacactttcaagctaggagccaagtacagtcacctccatgaggaggaggggttacatggggtggaagggacatccctctttctgcatctattgaaatgataaaaaatatagaacagatgcatggctacctatgtgtgagtccatcatgctaatgcatattggaacatacacacttctcatgtaatgctcacataatgtagacattaaaatgcagcttattttaaatttcagtagcacttactgagaaatacaggcagtataactgctatatgctacatatgaagagagcaatttatggtcctgaaaccataaagggaattttaggagaaggatgtctttctattacatagtccacaggcttggtttactatggagaaagagagagaatggagctagctgtcatgatcacaacactcctgggtaaggggtagatgaaaatacaagttaatgaaagtctcagtctcaggtaacgtgcctaataaccattaacagcagccttcactagggcaaaaaagcagcagcgtaatgaacgaaactcccagagaagagtgattttgaaatgtgcacgagctttaggtttacattctctctccacctgcctgagctcggccttgtcctggactctcaggcaagtcctcaagtccacccagaagaagtgcacagtaactcgccctaaacaccgcccactaacactctctcgcctgagccagctatgcagacagacggacgcgatcaggccatggacagagcccctgagttcctgcagagatccagggacagtgattaggcacccactaataacagacaggaggggccacaaggtacgtgtgagaaggcagctggggtggcagagctggggcgcccgtgcggcacaatccccacagagaacgtgaagtgtggggtgggcattctcgtttcttcaaaagcaccaatgctaagctgcccgacagtcaccactgatggtcccatcaactgcatattacaggagggttccccacaggatgccaggcagcgatgcaaggccaggttgccaccacacagtggatttcacggccacatccctacatctttcccagcaagatccatcctcatccaaggcttctgagatacgacacaaatggaaacatttctgcatacgagttcttctctgtaaaaatggcgaccccgcgatgcagcgcctgagtgccgcgcgcctgtgacccgcgggtagatttcttaccacgtcctcctttgtgctgactggctgggctgctcagcgggggctcaggtgggctgaacggaggatggcgcagcgctgttttcactggaaaagaaagcagagcaaggggctgttgtcaccctccttgggcatggagcagcacatgcagctagtgttacttcattcttaccatacggtgtctctggagacacaggaaatgctggagttgaacacatggactccttgctacttaaaattctgccatcgataatatcgaggtcctggggatagccaggggtcatcgtctgaaattggcacagggagtagaatgtgagaacagggagtcaagtgaaggcccctccaaacagttgtggttgtggctcccccaggctggcccactgagcaaacccctcctctgacagtaggacaaggaggctgaggtctggatccactgcacaaaaccagcccgcctctcctagccatggaaaactggaaaacactttcaccttcaacagtaaaggaaacggaaggtatcttacggcccatccttctaatacaatatacagctaataagtgaagtagacagagtttgtaatggtacaggtaaatgagtatctcaatattaagcgaaaaagctggataaaacagtccttacccatggtattaatatattcacagatgcataaaaacacatagtattttaaatacatagcacagaaaaaaggccgggtggaaatattctaaatattaacagtggtttcctttgtgagtcaagactatgaatagcttttttttcttgtgaattctgtagcttccaactttgccaacttgaaaagaaatcccacccaagtctaaaataattaatcgttttggatacaccgacctgctttacatccattctgactagaagccttacctaggcctcttggaagagcaagaagctctcatctgtggccctcatctgtgggtcacctcctagggaggtctcggagggaggactgaggaccctgtgtgagtgtgatgaccctgaaggaaggctgtgtgtgccactggctgctgctgtcgggctatggagaatggctaaggccaggcctataagagccctacctcgaacccacacaacccacccacatgctgtgctccttgtgcccattctacagattagaacatagaggctcgagtgccctgagtgaggtggcctcaccagcatagctatctctggggtgcattacccaggccagctgactgcacactgtgctctcccagccacaccgcttgccaggtacagaggagccacgaccatatttgtgaaaccaggacggaaggtgggtgcggaggataatgtgggctgtattcagggacaaggcctggtcattgcccattcactcggggttccaggacaagaaagggagtggaatgggcccagaaactgggacctggctgtggcacatacctctttgacgtccgctggtgaggggaatggcggcaggtttggggcatagtccacaccagcctttccccatgcacatttggagaagggcagctgccccccagcatcgttgtcgtactgccccaggctcagcttcctgagtctcccgcccaggggctgttcagcagaggagcctgttaaaagggagacaagcaggctgcagggcgcttcctcaaggcggagtgaggcgccccttccttaaatcttgcctgctgcttctcaaaggtgctgtatgctgcatcctggtcaccactgctctgggaagatgctgtggttgctgaaggcagctgatgggaaacccagggcattctcagactctcagggatgaacaaggccacagccttggaaatgtgcagcttccccaggccagcatgctccttccagaacaggccacttggagataggaccaagcacccagactcactctcagtgctgggaaaggacagtgcccggatggaatgctgggtgggactgacgatgacccagctgggaaggaggcccccacatgccacccctggtgtcctgtcaggaccagagtgccctgaggaccacacacctgcggtgaccttgggcagagcatggcccgactatgataatttgaatcttagcaatgagaaattctggagagggaaaaaacctattatttcaagcatcaacaataaatattcaccatcccaatctttccttgccagaaacaccacaggcggttattcctgacacagatccctggggtccccactcttgaccaaattctgttctttttgtgttggtgaaaatgggggtcgggctgggatctaattttctaaaacctcttcccagggattcttatcatttggcagttaggaaaaacctgctgccggctattaaaagaggaatgtttctattgatgacatagtctgaatatgcaaacccaacaacactgtcccctacagtttagatttaaactataaatacatagtccctgtaagtgtagagtgcagagtagcatttcactgaaagatggagtttgattcataaacatgagtggcccacataaggctcctcttagaatgactttgttccaaattggttgatggccaccctccaaaatacatcatgatagtgacatacagtcgtgctgagtccatgatatgccactgacacctcctacatccagagacttcagaagctcacaggaatgcaaaggtcggcatgataaagagaaggttccacagagagcgacaagacatcaacccaccatgcctgcctgagaggagcagcaggaccgctgtaaggtttcttgtttctgtctgcagcatgggggggctccactgcccgaccctaccagctactagatgccattcaggtgaggcttaaggaggctcctgggctgagccaggctgtacaccaccctccctgtcccatgggacatctgctcagcaccacacaacagcgaccaagcaagggagatccaaacacaggtccttccaagcaaccttccacctcttccttccatcctctcttcggttcccagcagctccctccacagatccagggaaagaaggaggaagaagtgtgcgttaggacctgggatttggggtctcacgtgtatccctcaccagctgcaggacatcctcagcccccatttctttatgggtaaaatgagcataatgcttgctctcttttccctcccacaagggggaggattaaatgaaatgaaatggcatatctgagagtcctactcacacagcagcccctcactacagcatcctcatccccatggtgcagtggtcctcatcctcacactcaccaccctccacaggacgcaagtgctgcaggccagggaggggaccaccctcactccagtgctcttcaacacacacatgcatttgcagccattccaagaatgagtttaaagagggctagcagaggtgtgaggtcacaaagttgggctggccccacgcaccacctggtactcagctcagacgtggagtttgttcctgaagcagtcaaggtggcaggcgatagccctgggtgttagtgacggaaaggaagtgtcatggccacagacaagtgactgagagcctggtccccttcctggaaaaaggagccatgcagctggcctcaagggaaatcattccaccagggaggacctatctttggagagcaccaggagctccgctgccctgtactgacattacagtccactcactgcctagaacttcagaggtcacttctagagaggtaattttcaaaggggagggaatagtacttctgttcaacatgcaagataatatgtggtgttttatcaaaaatgacatggcagtatcattccaacatgcagtgttgcatgaagaacacagaaaaaatggctatgcaaatcaccgatttgagcattgtacattgtatacatttatcaaaatatcacactgtgccccataaatatgtacaattattatgtctcaactaaaaatagtaataataataaaactgtggacagtgtggtcaagtgttctctttgatctggagaaggaggatgggaagtgcatgttaacgcactctgatctcaggcctgaggttggaaactcactggcttcagaaactgaggtcccattagggttagctgacaacagccagcacagccttgcagctgcactcgaaggcacaaccaggtcgtaacagggtccgaaaaggaatttccaggactaaaacataagtctcaatgcaggacgcttagacttcttctaacctttcaacttggaagtttccttcaacatgtctcctttagagcagctagggaatacaatctgtgcatgagctgacacagagccaacagtgggctccgttctgggcctcccacaccagaggaggctctgaaacacaggcattctgtgagctggccccagaaatgttcctgttgaacacatggatttgaaactgttcctcaattctctctctccccaaagaattacaacgaaaaacaatgttcttcattcaaaaagagtctcaaaaaaaaatcaatcttcatttaaaaaaagtctcaaaaaaaatcaatcttcatttaaaaaaagtctcaaaaaaaatgttcttactgtcccacctccggtgcttgtgctcaaatctgtgtggcaccatgtctggttaagcagaactacatgcctctccctctggatggatcaatacttctcagtatcctgccactgggaccaccaggagtaagatggtttccacaatggagggaactcagcgacggagagcagctgtgggtctgaggccagaaagaggctctgcaagcgcaggaagaatgggggagtcaaggcacctgcaaaagcagggccaccgggccctggattccaggatgtggcctgtacagaaagtgtggcttcagccctgcagggtcctgctttccattcccaaaagggaaaagacacaggcacacaaggtcagcaaggctcaggcctctgtggggtgtggagatcccttcctctcggactgcaaaccttggaaatgagaagtttgaaacgccaggaaaaaacaggacaaaatgagacagggtttaagatactgcaaaaccactacgtgctaggatgcacccacatctgcccaggaggtagttacaaaagaaagaaaaacaggagaccaacgtttatccagcaacagtgacagtctaagcctgggcaggtgctctcatagagaaaagcccattatcactccattaaggcggcctgctacgtcttttttgcagacaaggagaatggaggctcaggtctgagtactcatcctacaccacacagcatgtcagcagagagcaatgatttgtcaccacatgtatctgactttaaaatccacaactgccaactctattcctctgtggtcactcttccttacccactggtgcctttccttcccttccatcccttcccaccccaaaaagcctacacggggcagacaggggccccatgagccctgggaggcactgcccacttccactgcctgtggtgacagaggggcccctgggaacaagatggctaccctcatcctgctgaggaaggggcactcttcctcccggacatgtcctgatggggcagccagcaaaggcttcacaaattcttctgtctctcgtgtgaatttcagatttaacaatggtttattcttcccagtcttaggaaatctgccaagtgtctaagtaaatacatggggtccagcagagaacctggtgggggtgcatttccaaagggtctgagtgcacagcagtctagagaaaaggaaggagggacagttttcaagttcttcccatctgagagtccttggctacggggaaggtcagagaagaagagagagggcagcttgctcaaggcgttgctaccgggctggcgggagctgctgttgaacccatgtcctgtcaccagcagtagatgctcactcagaggccagcccaggggccacttggcaggggtggactctgcctctctgctcacaggggacgagtcctcaaagccatctccagaatgaaataagaacaacacaaagctggcttaggggatcctacagataatgcagcaaaggctggggcttggcacacagttgcaggcagtaagtgttataatgggccacactcaaaatgggctgttcatgttgtcattaaaagtcaagtttatggaacttgaagtggacaaacacgctccaacattaagtgacaaaagacagtgggcaaagatgcatgtgtagtgtggtttcatttttattttaaaaactaagaaaatgtcctaaaatgctcataagagcttctctctgggttgtgtaattctaggcaccattcatattttttcggaaatgtttctatctttcagggttttcgccagtaatatgtattactttttaaaattagggaaacaacacacagattaccttcgagaggaacaaagcttcttttattttgtagtactctgtgctgctgtactgaatttccctaaatcccgttctaattttgcattagtattagttcctgtattctcccaaactcacgtgtttgatccttacacttttccttctctctgataaatctcccatgtctgatagccatatgaaaattaatgtgggaggtagttttctggaccaatatgctcagaggagatgtggaagtgacattctcatttatagcgagcagggcttatgcttcccagaggttacaatgcaaggcgtcctgcagcaggggtctctctctcccttctttaattattcaacagaggggatctcggtgctcctttaattgttcaacagagacccaaggcaggcccactagctgtcttcttcaggcaagacaacttgaacgtgagactccacgctaggtccaaggtagatgcccaggaagcccagtagtggaacagaatccagtcaaggctccggtgccacatccaagcccaggacgttccaccaggcgctgcctccctttaacccgtgcacaacgtctagggcagagatggcaatggaagccaggccacggcacctatgtctgctgtgtgcaagaaagaaccaaggaaggccctagggcacgggtgcaacagcgagcaggaactaagctcagagtggggttacaaaacgggctcctgtccgtgaagaatggaccacgctaggagtgctccctggagactggagctgcccctcccacacaccccgcacctctctcacaggaacacacccacatactcacatgcacacagtcaaactctcatgtgctcccagtctccggcactttttcacacccacacacttgcagacacatgtatgaacactcactctcacgtggtctcttacacacattttctcataacactcatgcagactcagccactcatgcatttgcacacacactcttacacccacgtcacacacacctgcatacttcacactcttagtctctcacacactcttacactcacacacccttgcactaacactctcacccacattcacacaacagtcacaagcagacacacacactcatgctctcacactttctcatatacttacactatactcactggcactcacacacgtgcagtctctcacagtgtttttcatgatacacacattgtcacactcacattcagtctcagtcttgtacactcacagacagcctcacacagtctcacactcattctcacactcacactcacgcacagtctcacacgctcactcacacccaccctgtgctccaacacggccccacagctgcatgtgctgctcacaaacggatggtccgtgatggtggagggtcaggttctgcattctgaatactggccccacctcatcaccctgtatctgcaaacctcacacctgtgtcaaacaagcccttctccccacctgggagctgcctgtcaggaagccagggcgctggctgttcctggaggtccgtcctttccatcctggccccttctccaggacgaggccacccatcagcatctccactgtagaggggttggttcctggctcccttccaggggcagatgcagccaaaggcaccctcttctcactgagagctgcccctccactcaaggcccccagatcctcatcccatctactgctctgactagcccagcccctgggtccacaggtgactccatggcagtggtgacttgcgctgggtctcgagtgtgcacacagagcccacagcccatgtgctacaccaaagttacaccagggacttccagaaccactcttttcatgtggctacaggtggggcagaggtgggagaagcaaagcacttttgcttcacactctgatgtctgggtgacctatgagaggccacagcttggggacatttcctcaggcggttcatttgctagctctggtacgctgcctaccaggatcaatgctcacctctccagagaaggtctgcataaacagcaagctccgtacctctgcactgccagctcagagagctcttggattgctttctgaggacagaggcagtagcagccagctgtcccaggtggggacaaggatcaggtcttattcagctccaaagtctgtccaagctgagacaccctgcgggttcagtacttctttgctaagtcggtgagctctgaaggggtgaagaggtgaggggtgaacaggtgagcccaggccacaggttaggagccctggcgctgaggcactgacttctgaattaaacccaaaggaggccctagcacttggtaaaacactctctctctaccccaaatctctcttccaaagtgactgatttatggttttctttagtatgatgttctatcattgcagaagattagaaaaacacatagaaacatatggaagcaaaccaagctccctggaacctgtgaagagccacatatctcaatgaagacacacatgacttttacatttctttttcctcactgaggcttaattcctgagcactccccgagggaatcatttaattgtttgagtccatcaattacttcttacacacttcacatcaatgtgaaatgaccagcacctgaagcagtctcttcctgtcccctagcctccctcctaccacagcccagcacccctcctcctccaccctcctcagctgccctggtcttgcttgggaccacaaggggcctcaccctacaaccatcctatccttgagcttctggtaaaactgcaggggccagcagtgtagcctcaggtctcactccgcaacctgcagccctcccactcacacctgcagaaaggggaggtatggccttcaccaagaatattacattatatgcatcaaaaggaaacaaacaaacaaacacagaggacaaaacacacacacacacacacacacacacacacacacacacacaaattccaaggtacgacaaagaactggccgtaatgcaatgagattgggcagtttgaacaatgaaatcatgaattgaataattatattgttaaggcctattctccaaacactactacaaaactgtccatgcctatatatttttctgttcagttaagaagtcaaatccaggaaaagagaagaaaaaggagacctcatgggagcaggagagagctgccaccacacagatggctgtcacctctggaaggagctgataaggggacaagagggaatttgccagcactggagagcacctgcagggctctgggcgatccgccctcccacccccagctccccaacgtaccccttctcagaaaaaccaaggagaaagggaacaaaacccaagctcccacacagggatgttcacgggcaaagggcagctcccaaagccctggggtggggcaggggggcacctgcatctggctgcacccatggcacacacaccctgatctctcacacctgtgcccaccctgctcccagcctgaggcccaggtgctggggaagagctgcccttacttccctgccagttcccagccaggaaaaaaaaaaaaaaatcctgcatcctctccttacaaaggtcatgagtactcagtgcagaaatctcaggccccttgaaacccccagtgaacacagaccccggtgatctgcaggtgatgtgcagcttcacccactccatgcagctggggtctctgtggagggagggacaggcagtggctttttctttacacagtcttgtgcccctcttgtcgcggtgacacgctcattgtccaccaaaacatgacatggtaacatggtctccaaaggtcacatgactggacgctgcccatctctttgggcagtccccacaccaggcatttagctgtcttcgcccaagcctccttccctccagacactgggtgctacccacccagagcctcgggaaccacgtgaccttgagtataaaatgggacacatgccccaaagtcccctacactgccactcccaaagaccagcatgtttcctcatttagcagtctcactgttattcacgggtggagccggcgtcaaggacagataaggaaacgtgctgagggctgcccagccagcaagttgcgcagggtcacctgagactccgccacgcccagcgggatctgggattcaccacagggtgcaaaaggacaccgagcctgcgaggcaggaggacgctcagtcattccggccccacaggaggagctggggatggtggggcctcagccccaggtgcatcctatgacgtaccttatccaaagccaccacaacagggtgggggacggtcctgacagggaatcctcacgtgctctgaggaaagagcaggaaagccagtccttgactgggggcacccaggggcctcgtgagaaggggatgcatcgccgtcagagccctggagaatcagggattcaggccaagacactgggtgctgtactaaacacatgtgggactgaactcagcccagcctgggggtcagcactgttgccatcaattcacccctgagcagtctgaagtgcaggagagggcttctcagatcgcttagccagaaaatgttttttaaattttgtttaaaacacccacaaagctcttcggcaactttccaccttgtccaaatacactgaactcccaattatgtaaactaattgagagtgtaaaataacacatcctgataggtaagtcagtacttatgttgaccctgagctgtgattctgtgattcagactgctcttggagactgatctttgccagcgcacggcctggcagatcccaggccctgaggctctgctgggaagtgggatgagggaggggaaggaagatgggtcaagtgttcaggagcggacacccaccatgctgcccactcacacacttcatgtcactgcattctctccactgtggggtcacatagcccactctgccctggtgaaataaagccagcacccaggtggaaggcagcccatggggtcgcctgcctctgcctctgataaccaatacgtgactgttggctgtcctctaaattccacagcagggtcacaaatcttagaaccaccctgcggcacgttccagcctcaatgagccaagggccagctctcctggaggctgggacacgcacctaagttgagaactgcaaatatacaacagtggttctcaaaggccattgtccaccttttatcactaaaatcctaaagctcgggcctcacctgtgaagtcagaacctccagcggtgagacctaggtgtcagtatttttaaaaactccctagtgtttccaacacacaaccaagctcaagaatcacagcaggtctcaaccctgaattagcactgcattatttggggagcatttttaaagcaagtctgacatccaggccccaccagggccaactcaatctgccaccctctggaggtagaagcaggtacccacatttttagcgtctgcatttttaaagctccccaggtgactccaacatgcaagacaaagtgtccaacctctgttctaaaagagacggaatccgctccctgagcaaatcttcaggatgcaatattgactaagacagtagaccttaggtgctcttacacaaaagtaactaggtaaagtggtggatatgtccattggtttgactgtagtgatcctctccctatgtatagatataacaaacaaaatatcatgttaaacaccttaaataaatacgatgataaataagttaattaaaacatagaaaaaacaggggccgggcacagtggctcacgcctgtaatcccaccactttgagagactgaggagggtggatcttttgagcccaggagttccagaccagcctgggcaacatgatgaaacccagtctctacagaaaaatacaaaaaaaaaaaaaaatgatccaggcatggtggcacatgcctgtcgtcctaactactctggaggctgaggtgagaggatcaattgagcccaggaggtcaaggatgcagtgagctgtgatcacaccaactacactgcagcctgggtgacagagtgagatcctatctcaaatgataaattaattaattaacttaaaaaataagaacaggtgaaaactcatgacatgctagaacattacctattttaaaacatgccttctttcattttctatctgggcactagaaggtaaagtccccataagctactgatttatcttgatgtgatcttctaggaataaagcgcgacatcacacaggtgtgcctgataggttctggaagctcccttgcattcctaggagtgaaaacaaataacaggcaaagactgcttcacggtgagcttgaggcctccagacttcagctcattcacacacacacactaatcttttcgagacagtgtgtaaaaggaggcagggtggcatgacaaggatgccccaacactcctcccagctgaaatgctcccagaaatggttttaggagtcttctcccaaaactgaaacaggactgattgaccagccccttccacgtggagggcatagccttaaagagccgcacaacttgcagttttttacagcgtaatgtgttaggaaatcattagccagggttctgacggacatatcaagaccaacccagggaagagccttcccctcccaggcccaccctccctcagtcgtgctgtcttcatgtctaaccctgattctaagagaacgggtaggcgccggcaaaactgcaacagaaggcggaaggggggaatcccattttttagattgcaaaattgaaaattctttccactgggaaacactgaagtccatggctaggtggtggcatttcttctaaaaaggcatatttaaaagggaaatgatacgtccacacaacgaagccctccaacatgagaaatgccagcaataccccatgttttgtaagtcaactgtaaccttacgtgcagatgtgaaaagctgcaaaccacagaagggggacccccgcctgcctcacacactgccccgccccaaatacctcatcaatggggcttctgtacaggcttcaatgcctgcctgttcacatgcattggttttctttttggatcaccccccatcacgtgaccttactggcctcttccactaacacttcatctttttttttttgacggagtctcactctgttgcctaggctggagtgaaatggtatgatcttggctcactgaaacctctgtctccccagttccagtgattctcctgcctcagcctcccgagtagctgggactacaggcacgtgccaccatgcccggctaatttttgtattttttagtagagatgaggtttcatcatattggccaggctagtcttgaactcctgacctcgtgatccacccaccgtggcctctcaaagtgttgggattacaggcatgagccaccgcgcctggccaacatttcctcttttaatcactgtggcgtttattatcccatgcctcagtacggatacaaaagctgtccaccttcagggccacatgggctgcgctgaacataagtgtggccacaggtccaccaggctgatgaactgtggggagcgacgcagccggtgacttctggcagaagccgtgggagccggcagtgctctcgggagtgtcggcagccttgggtgcacagagagggctcacccctcatcccaggtcctggcatgaggcccatgtcaagccacaatgcagtggacatgtggcatgattggaaaaagaccatgttgctttatgtccctgagactgtggatttgtcgtaactgctccaccctgacagagggagagaattctaccaccacctacctaggattccataaattagcagttcccctgagccagcactcaggccgttagggtcacacagatcagcccactcccagtgcagcttaggcagagcttctggggacaaatgaaacaccccagagacctggtgataccaaatgactttcaagcatcagtggggaagttccccagcaagttacagaggtgccacaggacctagcaacccctctcctgggtaacgccccaaacaactgaaagcaggtgttcagacaaacacaggcacacccatgatcacagcatcaccattcaccgaggccaaaggtgggaacaacccaagtctccatcgagagaggaatgaataaacaaactgtgctctatcccagctgtggaatattactctgccaggagcagtactgaagttcccacatgggctgtaacacgtccggctcgaaaacatcacacaccacgtcacaggagccagccacaaaaagcacatactttgtgatgccatttatgtaaaatgtccacagtaggcacatccccagggacaggaggggatgagtgagtgccaggggtttggcagggaggtgtggacaggaagtgacttcagggggtataaggtttccctttgggatgacgacaaatttctgaaactagatagtcatgatggttgcacagcaatgcaaatgtccttactaccactgaacagtacacttaaaaatgattaaaatgctaaattttatgttacatgtatttcaccacaataaaaaattaatgagtattttttaaacctgagggatgatttctgttttctactgtgggccggaccaaagattttcatctcaaaattcatatgactttattgtgaattactttctttttatttttcctttgacatgagtgttagggtgttaaatttagttttcagtatgtgcttaaggaggttatattcgctatgactttcatctcagaagagtaaagatggcgctagaaggtatctgttatagaaacgatacttcattttgggcctgaaccagtgaaggtcccttgatgtagctatcacgggcagtgtggactgagcagaaggtgggctggaatccacacctcaaagtcccagaaggcccagatagcaccttctcctctgtggccctagcctctcagcagtgtcttcagagcgcccaccaaggtggtagggtgggaaaccaaggccccctgctttgcagagtgagagtatctggggcaaatggaaagcttcatcaactctaaaatttcaaagttggttttatgcaataaaaagaaagtaattgcaatggcagtttccccaagcagactggagtttctcattctaaaacgttttccgaattggacacccacagagctccctgcagtgcagtgggctgactcggttattaaatgtgcactcacatacacatgacctgttcatacccacggccctaaagcatcggggtctgaaggtggagaggagctgtgtctagtcctgacccctgggcaggagtctcttttcagagttctcaaggcacataaatatcccatctctctcagaaacctccagagactgaagctcacagatggagaaaaagccttgttttgccagtggtagcaaacaaagagcaagagtccctcacggacgcatgtccagcgcccggggccctggctccttggctcccagacctcctctatcctggttctctgatgtgagtaccaggaagtccctttataagacctgggtcctaggacctcactcagctccctggagggggtggtggccaagggaagcatctcagaataaaggtgaccctgggctgactgagaccatccagagacagcccccaaaaggcagaggtgctgccatcagccctggtctcttgctgacgcctgagtccttggagggctccaggagtgtctatgcctggtgctgcggtcactcctccatcctccacctcagatgcgcacgctgctgtcttcccccatgctctgagggcccggcactggcaggatgatgcccataactgggcactgctcagttataacacacagtacggaaataacgacacctggacttttagaaagtaccatggatcccctgtgtccctagcacggatctgaaacccccatacccagatcactaatagccaaattcaaggccccttcattcttccaatgtccagctgctacgggcgcaggcgctggggcccacttgcttacttccctccctccctcctgagattcttcctctgcagagttggaggccaatgccaccccatggaacccccatcctgcctaaatgctatcctccattgtctctgggaccctaatagagctcccaggctcagtgcaccttctcagtgccttctcttctggtaagacagtaaccatgccaaaaaaaaaaaaaaaaaacaagcaagggcccagcccaagaccccaaggctcgcctctgccctcagggaagagccacactccttggcccccatcctggccctccatggtggggcctatctgcatctccagcctcactccccagcactgaacttccctggcacactatgctttctcccggtctgcctctcctccagaccatctgcctggtaaggatccctctgcctcacaaggcctggctgagaggctctggctgagcacccccagcacgttccccaactctggagttgaaatgaggtgggactgtctgcctgtctccactttgtgaggctgtgagccttctgccacggaatcagagcttgcagataagctgctttctgaatcctaaagcgctcttccagctttcacatttggttcctttggttggggtttagcacacaatttaaatcaacgggctctccatggtcaattattaaaagcttacagtttccattgctctgaactttctttaggatgcacaggttatcagccatgggttagcactaacagagcagatgccgagtctgggagggacattaaatgcctggtgggaatgccacagcactatctgcaagcagaacagggcctgccaggttgctgtcatcacagggtggaggttgatgtaacatgaataaaatattttgacaacatgaagcaaagagccctcaaggtatgaaaaaaaaccacagaactggctttttgccacccacggaatcatgaatttcacaggttgagtcatttcttttgttactgggatatcatcagttgaaatattctcccacttaaaagggtatgatacaaaaaacccaccacgtgcaggctgaaaccaggctgagacccagagtggggcggggacaatgagcctggcagcagcacccaggggctcttccacaaaacaccagtggcagcagaagtcagaccagagtgagggagcagggcctcatggctggcaggcacttgtggggagtaaaatgtccccaaaccaactccctgaatctcacccattctacaagaaggatacaaaactgtgctcactggcacacagagcacccaggtctcagccaccagagctttgtgataccccacctctggagggcctctctctgatcttgtaggtgggcagggctactctacactgtccagcgataaatctcccctcagtgcccattcagcagagtagttcaggtctcaaaaggatcatttgcagttccgcctgtcccagacccctgtatttgcaaacatatgtcgaactcttcctgcatgccagggaaaaaaaataatgagcacttccctcaacaggtttactggctggtgtaagagtgtgagtttagtggaattaggacatagccatggggtgcagagtcagagagacgagagctctgttacgtgtcctggtgaaatgaaggtacctaaaacagtgtaggcactcagagtaacagttcttactattaccaacatcatcaacatcaccatcactaacaccaccataaacatcatcactatcatcacagtcatcaccgtcatcatcactatcaccaaagcatcatcaccaccatcagcatcatcaccatcatcacagtcataaccatcatcactgtcatcatcaccatcaccattaccaccatcaacatcatcacagtcatcaccatcaccatcaccaccatcaacatcaccattaccaccattaacatcatcaccaccatcaacatcaccaccatcatcagagtcatttaccatcaccatcaccaacatcatcacagtcatcaccatcatcagggtcatcaccatcaccatcaacatcatcaccaccatcaccgtcatcatccaccatcaccaccatcaatatcacagtcatcaccatcatcatcatcatcatcatcaccatcatcactgtcatcatcaccatcatcatcatcagtcatcaccatcataagggtcatcaccatcaacatcaacatcatcaccaccatcaacatcaccatcattacaatcaacaccaccaccatatccatcaccaccatcaatatcatcacagtcattaccatcatcaccatcaccatcatcatcaccatcaccatcactgtgatcatcaccaccatcagcagcagcaccactattattattatggtgctggtatgaaagactttctcaggaaatacttagccttcacatataattttcatctcataaataatgcaggatgcacagaagtcccccggaggagcacagggcaatgctattcccaactctctaccacaagtggtggtctttctcataatgaggacataatctgcaaatagtgaaagattctggtaacttcaggatgctgaggtctctgtgacaaaccttcatccacagtcagaattaagaaagttgtgtagcagtttgtgtccagggatgagatggaaggcaggccagcaagaaggggctcatgtagacatagtgctctcagaacttccagtctatggtttccccttgtgagcgagactcaaggtagtctccagtcagtcaggcaatgccacactatctatggggctgaacctcatgcacacagatgtggaaatgatgccccttgcagggttaggtgatggtaccattctgggcatgtcatgagccttttggacgtgccagaatccttcctattcacacatggatctaagctgaaagaggagggctccagctcaacagccctggtctcctttggctggctgaggagacggatatggattgagggatctaggacaccttcaaagtgcaggcactccagcagcatccccaaccttctgacgatgtcccagggactcggaactagctgctttgctaccacacttgtacgcgtgtccctgctaggatctagtaatttttgttttctgccgcttgccaaagtagccatttcctattgagaaatgtcaatactgaaatttaaattttaaaatcaaaagagttccagtgttttctatacctgctagtgagggaagaaacaattccttccttgcttagctgcagtgcctgagagctacagaagtaagcaataatttttttttttttttttttttttgggccagagtgcttgctctgtcacccaggctggagtgcagtgcacggtctcagttcactgcaatctctgcctcctgggttcaagtgattctcctgcctcagcctcccaagaagctggaattacaggcatgcaccaccatgcctgaccaatttttgtaactttgtagagacagggttttgccatgttggccaggctggtcttgaactcctgacctcaggtgatctgcctgcctcggcccagtaagcatcttttaatgggatttctatcaggtcagaaagtcttggactgagatccaaaagcctgccatgcaggctgttcagagaccacctctacactgtgcaggcttttgacactaaatgaagtgcaagtctcaaggcttgctccatctcccagcttggtgcttacctagcacaagaggcacgtcctggaagaggaagcggagctcccaggaagggcatggctcactctgccctgtttccaatgctgcggctaacccttcagtgtccattcatcactgctcatggacagttgctcatgtgtggcagggttcctacaagaaggtcacttcccaattttaaaaagctctggggagactggtaaccagttttgcttatacctaatcttctgacatctttttagttctgaagctatgaaaaaaatggaccaatggccccagatgcctgtcaaatatgaatagattaataaatactttaaatttgtattgtcaatacccaaatatgcactgaattttactggtctgttgttgagatatgaaagtccttagacttcaaaatgataattaaataacttttataataaaacgcattaaagagtatctaaaatcaaaatcaaaatgtgttattgggctgggcgcggtggctcatgcctgtaatcccagcactttgggaggccaaggtgggcagatcgtgaggtcgggagttcaagaccaccttggccaatatggtgaaaccccatctctactaaaaatacaaaaattaaccaggcatggaggtgcacgcctgtagtcccagctactcgggaggctgagccaagagaatcatttgaacccaggaggcggaggttgcagtgagccaagattgtgccactgcactccagcctgggcgacagagcaagactccatctcaaaaaaaaaaaaaaagtgttctcaaagtaacgagtttggctgggagcaacggctcatgcctgtaatcccagcactttgggaagccgaggggggcggatcacaaggtcaggagatcgagaccttcttggctaacatggtgaaactccatctctactaaaaatacaaaaaaattagccgggcgtgatggcgggcgcctgtagtcccagctactgggttgaggcaggagaatggtgcgaacccgggaggtggagcttgcagtaagctgagatcacgccattgcactccagcttgggcgacagagtgagactctgtctcaaaaaaataaataaaaaaataaagtaatgagtttaccaagtaatttaaaaacagccaaactgagggtggataatatgatgtggctttcgaaaattccaggccttataactgtttctttgcagcaagaacagggaatcactaaggattgaattcaatcaattggaagacatattaacctcaagagactactatatgttaacctaagccaagagactactatatgttaacctaagtatgtggagtcctcttctccacatacactcagatgcctccagcctcctccaaacctacatgagattgttatccaggagaaaagacttctgattttaatgtttccaagtaacttcttttaagaaggtttggtgaagtaagtcaggtatgatactgcagatagttttttcccattagagcctttttagtaaactcagaatttcccaaatatatttgtttaatgcatcgacctggacctattgttcagggactgctaccctgctgtggtgttgtggttgctatacggctgtattgtaaagtccaataatctactcatgggggactctccaggctccttccaactcccagcacatgacatacaaagagggagttactcaggcaagctggaatgacagctgtttgctcagtcacacacctagtacatgaaaggtggatgtgaacgagcgtttcttcacaccttccccgggccaggcactgggatagggtttccttctcacagatggagtgaagagaaattcacagagacgctgccctttacccacttgcatcactcaggcaacccacagcacactcagacctgaagccaggaccaacatctgcagggtgtgtgctccttcgcccaggccaccccagacctgagtcgggactgcagtcctcacctgtgtgactccaaagaggatggagacactgagtccacacctcagggcactgacttttgctctactatgcaggtcccatgtgaacctgggcaggccacataatctactgacacctccatcaacacgactgtaaggcagagactggtgcctgcagccggggtgcttaggacgatgacatgggccagcacacctaaaccaagaaccacgccagcataaatggtagcatctctcatccgtgttaccagcacatggtgggaatcacatgcacggcgtcacacagccatgtcccttgtcctttacctctctggtcttcacttttagaggcaagtccctctaaggagccagcagcccccagatggcaaaacaccccaacgtgccaatgtgggaggccctggcaccacacggatgccacactttctggcccaaggttatcctttgggtcctggtccttgcatggcactgccagggctcccagaacacagctctgtctctccaccttctgtagcctcccagtgcccgcaggcacagccgctacagcctggccgtcctctcctggcgtgcacctctgtgcaggagcttccagaccacatgatctcacccacacagtcccctacctgagacaaccctgctccgtcccaatgcccctctctgcctgctgagtgtttccctggccgacctgaccacctccagctctctggtcccctcagccttcatgctttcccaacagaaagaacactgtatagtaacctggtcccaacatgcaacttgccccattacatcgatgcagcttgaagatagtgctgctgtaacccaggcagatgtcactgcctgtccaccactctcagccctggttcctcccaggcctcaaggctgcacagaaaggcactgtgctggtttccaaaccaccagcctcacgggaaaaggacatgtgcagtcctggcctccctgcagttagcatgaccccggcctggttttggggcatccccagaggccccgcaccgggtcccatggctttgggtcccaccacagctctcagtcccctcacccctgggcctgttcccccaagcccctcccatcactgagctgctctccacagtagaaccccttgtggaccccaggcctctgcccagccactgccttccataaccagtctccccacaccaccacggccaactctgacaggtgtatttgtaatcagaacattttataccacgactgcttaatcaattccttgtgccaaagctgtctgagggctcagtagtcttcttcatccccaaccttcagccccactgaagtacctggcattcttccacaaagccctgacctataccgcagggacagaagtaagtatgctttctttgtaaatccaccaacattcacgaaggaagaatggtttcactgttaagcccattctgcaatggaggcatgaccggccctttccagcagagagcatgctgtccctgcccctgcactgacgttaacagcaagtcttctgcctggttcttcccatcctccaaatctcctaccaagggaccacaccagcatgacagcatttggatcctaggccaaaattcacaagagttgaaactgcaagggaaatgtccctcccttgtggatttcgccaaaagctaacctactaggctgatttctcatcacacattagcctcccgtggagcacctcccgtggagcacctcccatggagacccagctcaccttgccgcccggtggccctgctggggccctctcctgtgtcaggcagcctgctgcttgcccggagcccacctcccacgctgtctggagacacagagccattggcctggctaccgagggcgttcatgtgggtagggatgggctcgaaggtgggatccagctccaggatcagcctgttgagctgctcgatggactggtcgatgtccagggtgggcgagcctggggaggggcctgtgctcagctctgggccggctccattcacaacctggtctcctggaaacctgggtttgaacgctttgctgggagagggctgctgtgtgtcagggggatgtggcccactgcctacacccctctggacagccaccctactgctggtccctcgggtgggggtgagtggcactctgggctgggcctggacgaggccaggattgtctgcagggcagcggctcaccagccgggcctccccatctggggcgaagctatactggtgagctacaaccatctgctgctggcgcacccaggtctgtgtggagtagctgctctgcccataggcctgcatctgggcggacactgagggctttctcagcaggggctggggctgcttgggctctcgactcccaaaagtccgctcccgctcataggggccgtccatgccaaggcccaggtccggaacgagggtgccctgcggatcttcaccaacgttgctgccaaaaccgtcagataggagtgagttctggctgctcttgtggcaggtgaagggacccaggtgggccgactgaggcccttccgaggaggacagggtcccaaggctgtccacactgtgcaggtcgtggtggggcatctcgtcatccagaatgtctgtctcccgatccttcagagcagcgtctccattcacgtgaacctgggctggcaccacgtggcgggtcccactgtacttgcttcgagcatcagtcatttccttgagggagcttccaggatcttccaggccaaagccactgagcagctggtccaactctgccttctcctgggcactcaggcccctcctggttcctggggccaggcgctcttccgtcttatccgtcctggcagaggctgtagagtggccggagtcactgctgacagacaaggtgtggtcactgtggtctgggctgttggtggccgggattgcctgggggccacctgggatgccaggatccgaggagcttttcttcctcaccttcgcgtaaaggctgccatcgacagggccctgcgtgtgtagcactgcgggggagaaaaccggagagaggctttcagtcagggatgaaagtgagcctcacaccctctgaatgggcgtgtgcatctgtctaaacaaataaatggattcaaaatatgacttacaataaacaaggacaaagattcctctaacatcacaaagttctatatatactctggaggatgccaatgaaaaggcattcaaataaacatcttcaggtgctagaatcacttctacctttccatgcaaaacaaattgtcattttgaactctgggattcttcaccttttgaatcatcttgcctttagggctcatggttaatttcatcatgattgtgaacattgagctcggcttggatcataaatccccaagaatggactgttcatcttagacaagaagagcttccgttcatagacctgtctaacatttgttgagcatcagctaggtgctgggtagcaaactcctactaaattgaatgtcttggtgaaacccgtctctattaaaaatacaaaaattagctgggcgtggtggcgcatgcctgtagtcccagctactcgggaggctgagtcaggagaatcacttgaacctgggaggcagaggttgcagtgagccgagatcatgccactgcactcactccagcctgggcaagagagcaagactccgtctcaaaaaaaaaagaaaagaaaaaaactgaatgtctgctcaaatgtcaatacgaaattcaatgaaaagagaaagtgcaggaattgatttgggtcttcctgtttggcacagcaactttgggccacgtaggtgccgggtgaatgtctcaggatcacagacacttgaggctgacctgcatgcgctgatttccatacatggaatgtcaggaaaatgaaactttgaactaaagtgtgggcaggaagggctgaagcatcagctgctattattaatcacggccatggctctggcattcggggactcccaagcctcaatctgctgactggccaattgccgcgaccacacatagcaggtccttaccaagagcctcctaaaataagcgggagtttgtagtcagcacatgcctcaccccatgggcctcccgcactttcttctacttcctcgactgtgaaattgcaagcattccacagccagggagctgctggtggtgggaagcccacgctgcgtgggcacctggaatttgagagacgtgagccactacctaacagcagtcactgagcctggcccaggagccctctggagggacctgccctgagcatgtgcctcacagccccgggctccaggttgatgcaccaccatggtcagcagctgctggcctttttgaaaacactgggacaacgtgttgggacagagtcccaaggggtcctggggtgtggtgctgaaaacgcgcccacgccaggctttcttcttgtttcaacagtgcccaagggaaagcacgcagagaagtggggagtggggagagtggacacaggggtatgggcccgtctgcagtggccctgactcccatcctaaagtcaagcctaggggaggaagggtctgggagtagaaatgctacataaaatgctgaaaataaaccaaggcttcaaggcagggaaagtgatgacagaacatatgccatgggattaattcaaggtaacagtctcagtgacagctactgttttctgagtaccttttattgacagggcaggagcatcgtgcattttctctaattctcacagtatgacctatgttgttattccttgtttatctataaggaactgaggatcaaagagaataaataacttgcccaaggtcaggcagctgctaggaggtggaggtgggcctagaacccaggtgcactggccctgaaacctgtgtgctcctgctggcccactgcccacctgcccagagagcaccaggagggcacacacctggaggctctgtcagtggccctgcccacaaagaggtggcattgaactcacattgctctgaccagggatcagtgagtgaccaggcttcagactaggcagagactaaaaaacctatttcgcccagctctgtgcaaattaaacaaagggaaagactggaaagactggactaaactataaggcatgtgcaaatatcacctctacaatttcaaaaatggaaaatgcaatgcatttgttaatgccatcactaggtgactgtgaagtagagtggtcccttgaagaagctctggcatcagatggacactggttcaaatcccagctccatcctgagtccacccttagggttctaccaactggtgcattcaccttgaccttcagcttccccgctataaaatgagggtgtgggtagatggttctatgtaaaggttgacctgagaattaaatggcatagcacacgggtgagtgtctttataggccctgagtaaacatcaatttaatttggtttctgtttagatttcctgttaccaggaaaatttaacaaatgaaagaacctggtaaatccttcctgctgttttcagcgtgtgagaaggaggtgctgataaacggcttctgctccgtgagaatgacagaaactactcctcctccccacgatggaaggtgttgtatggccatcagcccagtccctcccacgcctggcgggcagccaggacacacactgcagggccactcagcccagagcatgagcctacccattacggtcacagatttcacgctgctaagtctatatgacttcccacactcttctccctaaatctgagttaaaataaattggcacaatgacttaaaaaaaagcccaataatgagttgtaaaacaattcttctaatctaaattaaaatgctgtcaaaaagtgcttattaatcagtctgaggtggaatccttcagctagctccctgccccgtatgctaagaacagtacctgattagaaggccctgtaccaaatggtaaggcacaggatagtccctctcctggggggagggtatgaataatcctattttattagtagtagaaatcttaaaataataatagatgcattaaaaacaacaacttttccattaccattgactaaacactccatctacgtcaggcccattctgagcactcagagcagggtctcatcgaatcctgacagcccaggtggcgttcaaccaccttcctattaatacatgaaagtacagccatgggacagagagagtccaatccaactgtgtccagtgccaaagaccaggctggactcttgctaaacttcctgctacatacataggtagttttctacatcagaaaatgcccaataaatgttaaacgtacaggaaaagaatatgaaacatatcaagtgaattccaagataggactggtcaagcttctgaatcactctgtaggagcacagatcttcctaaaggtgcagagctctgggtaggccatcccaggagctccacagacaaccccctgcacctacacctccgtggtcttcagtgggggcaggagagtcagcctcagggggagggaaggagaaggggcctctggaacacaccgttcctatcctgttttctcataaagggctatcattttgcaaaaggaagagcttgaacttcagtcggacaaaggagacggccgtttccctttatctttgaagatgggatccccattccaccatttactctgtgtgtgttcctggtcatgacattcaggctgttcagtttcctggttttacgtttacaaaatggaatgcttcctatctttcaagggaatgaaagatacaaagatgccatccatttttctcttaaagttatgagaactagagaatatggacataaagtacccagctcataggctccaagtaagagtactcataattactattaaaggctcttcccatagtggacagggccttgcatccgctccctgggctcatctctttaccgcctgccctgttcctagcagtccactgcaggcatgcacctgccctgtggccttggcttttgtctttctctgcatctcagctccctcacctcctcaacaggtgctgccctaccaccctttcctcactgagtttttgtccacagcacatacttgcattcagaagaactgcacctttacccactggaactcaggctcactgagggcagggagtttgctttattttgctctcccttgcatttctagcattagtgaacagcctctgacacccggtgaatattgagtgacaggctaaaagtttgagctttttcacacatgacaaaatgtggggagctattttggaaagctcagctgccttagcaggcaaaacaagcaaacgaagaacaatcaccaaccaaaaccaaacacacacacagcccacaaggatctgaaggtagaagagccgtgcagcgcttggccacctgcaacccaggtgtccccactctctgggcctcttcccaggcagcacagccaggtccagccatccgtgagaggcgggagcagggcagccatcactactgacctggctggtctccaactgataatgaacacaactggaaaaataactgaagtcacccaatctaagggttctaaattccaaagaaaacaaaagtcatgacctaaaggttagcccatttgcccatgaagcaggaagcatgggccagagatccagggaacatttgaacattatctggccacagtgtgcttggaaccaggggcacaaagattaatgagacagagccctggcaaacagcagctgcaagcaaatggcaccatgctatctgccatttccagtctcctttatcctcctgccacctgtgaggctggcgtttcgttgctcaaacccacacagctccaagtggcagggctgggtaaatatctgtcttctgacctctgtatcgtctatcttctcacctatgaaactgctacctctacactgggcacataggaaagagcctcatctaaacactttctgccattgctatgctttctaagactcaatgcaaaagctgcaggataagagcaataaaaagagaatcatgactagaaaagacacctaacagaggtgtggaagcagggtcactgcatggctgactgccagtctcgccaatgagaaaccaaacaggagcccgcaccctgctgtttgcagcccccaaaggcgctgatccatcattaaagaataccctccttaactgatgagagaatgctactgataatatggttctggtttggaaaagtgatgtagaaagaccacagaaatgacatagccaactaaactcccatttgtggttcctggacatgggttgtgggtggggttcctggtgccctgatgagctcctaggagcaggcagggtgaggagcccccaccagatgagggaggctgcagggctttaagtctccactctgtctctggcacctgatgtgctattagggctgacactgctgtgaggaggtggtggggtaaggacagagttctaaaaggtggggtcctgccactcgtctgctccttccatctttttatatcattaaataacatattttaacattttgcttccatctcaaagggagcatggggaagtctgaatcaaccctcattctgcaaattcagaacctaatcttagagtgggaggaagtaacttgcagggatgccatagctcttcagctgcggatgcaggaggagaacctttccacatctcagtccagggtaaatcatcccattcggtgtcccctttcccttgcgttgccaccagacccagccaacgagcatcaaggacctcccctcccaagggaggctgtccactgtctggcaacgatttcctggtggccagatcttagttaaaaatccaacaaacataaatacagccctgaatgactttcactgcatgacataccagtgaggtttatcgcctggaaaaggaccagaaggaagaaaatacagagcatacattcttgtctccttggaggacttgcagcaacagacttcctcacccaccttccctgcaggggatccttctctttccaacccaaccctgctactgaaacgtggctttcccacaaggaggtaagagggttaagaggcactcagaaagtatttcaaaagtcacccaaaaaatggagaagaccaaaaaaatatatgaaaacatcccttccatcccggttgaaaacagattaggcaatgcccaactgtgctccccggcatgctaacaatcagatagccaaagggacagctgatctcacacttcagcaccctccatcatcaatcactcagcaaccaaaaatattcatcactgatgtgtaatccactgaactgtccactggccctgcttccaacagaagttggtttgaagcaaaggaaggacaaatctgatagatttatgaagcgacgtggaacctttcctttttctaggtattgatgctaagaatctcatgttctatttttgtgacaggtgtgcttaaaaagtaactttttcatttcaaaagaactaacagtatcctccctgcaattttttagtttcaaaggagaaactagaaaattcttctccatgaaagttggttagaattgactaagcacttgctatgattgctagtcataaacggggacttaaaagcaatactcagcccagtcctgatgatgtgctggagaatggacaagcccccttggggaacagagagagaaacaagagatggaaagggtggtgggcacatttcacggcatccgaatagacagatcaacagaggcaagggaaagacggagcagtgtgtgagaagaaaggcatccactgatgctgaagcagccaccctcaggtgagccaggtgaggctgcaggaattggcatcttcatcacctgacaaacagagagaattctggaaacacccctctcttacaactcagctgacctcctaaagacaaggccaccgtgcaagctcctcccatgcgcccagcacactgttaggccccagggatcctactcaattcccaaagcaatcctgtgaagcaggaaacgggaagtccattttacagatgagaaatcagaggctgagagagcctgcactaacattaacgattttttttacaagcctactgaatagaatatctgaaatttaaaccaacctccctccactccaaaaaaagataaaattctaatcctagtcaatcactttttatatttcacagatcaactatctagatcaagacacacacacacacacacacacacacacaaactcatatacacctcactcactcttcagagactattaagtgctttgtgctttcctccctaactcctaaaattattcattatcaggaacagacccttgtggtgtcacagccgctgcagtgatggtcacagtttttgttccgtttcttaaagctagtgcatttctatcctcacagttagtggatcgggtgctgttcctagcatggagtcttcagttctcccacacacccatggtaccagcagccccatcggggtcaggagccatggatatgccagaggtcctgcctgtgcctggaccaccacagggaacaggtagcttctccagacacagccaggaaccatcctgtccctaggtcaccctcaaatgactcacttggggccgtccagctgaatcaattcaccatatccaaacagtcccaataagtggaggcttattggaatgatgtctgcagctgcaagtgcccatggtgggctctgacaaccacagcccagggaaaatgctgaagacagagaggcttcggtttcaaaaacgagtgctcatctgcaggcagtctcctggaggggtctcaaggactatgccgagtgaacactgccagactcaaagggctcgactgtacgactccacataggtgacattctggggtggagacactgtgtctggacacaaatgggtgtggtcggggccaggagaagagtggggctgcaaagggtgtgagggatggtttgggcaatagaaatatttgcgtcttgatagtggtgggagtgtcatggcataatgtttgtcaaactcagactactatatactaaacagagcaaattttactgcatgtaaattgcatctcagttaaaacaaccgttgtgagatcaagacaaaaatgagactcacagcagactagaccccaacctgaggtggctcctcttgatctcctcccttccttccctcttcctctttttccccctcctccctttcctcctccttctcctcctccctttcctcttcttctccctcctcccctccctccttctccttctcccccatgccctcctccccctcttcaaaggccttccctcctcttcctaaattccatgagacaatggaaaccctctctccttgggataacgatcatagtccctttgcgcctcattgtcacataaagcgtcttttgacatttccattggagtgattcatgtgcacaccttccctccccttctagaggttctggcataatccaggcttgagtcctggcttgatcatagctgtgtgacttcagatgaatcactccgcctttctgtgcctcactgtccttgtctgcagagaagcaacctggagaagggggtgtttgctgatatcagctcccaggaccactgggattcaacacaaaaggcatggcacacagcaggcattgggcaaaccctcctttctgtgctttccccctctctggtcaagtgaagaattcccagaactcacaagtgattcatgtgtggaccctctgggtgcagagctgagggacagaggagtgctccatgaacatctaatcagtgagtacacagaacgcaggtccactgacctcccgtctcgagaattacactgaggaactgttctctaatataaagctatggtgaaagatgggtttaaaaaaacgtattcagaagttccctaagtcattttttgatatgactgaaattgtcccaggcaccaactttgctaaccatccacccagtgcgactttatggccaagctgcccagctcaggatcttaccagctgtaaaacagttttcccatcccatactttgtttgtttcctcggtgactgacagcaatgatggcaaaagcagcagtaataagctaactgggcaaccactgtcttccaagcacttcgtacctattgtctcattaggctcaaaccaaacccagaaggggtatggattctcctctgcttaacccacaaggttagggggattgcaagggaccgaagcatgtccaagtttcatggggggagggctaagggttttctggcagattgtgtcatgcacacccagggttcccatcactgcatcacatgacctcccctcagcagtgagagaacatttctcctggatttgctaggtcaactgacacatgagccatggcaccggcgctggacttgtgagttttccagcagaccattcagttgatgggtctggtgctgcacaatgtggaacagccagtgggggtttcagtgctggtgaggacaggtgctaagggactgcctggatttcaggctccggcgcatggaagagtccatcaccaagccaggagggctgaaaactaggctgtggcccagagcacaaggcagggttgaatggggttaacaatgaagcaaggggcattctcacatttgcgaggaggggaggtacgggtagcccgggcagtgtcccaagggtacctgatccctggaggcctggtaggggctgcagacaccgaaagaccttcccagtcaggaagcgatatctgagccaagaggttccttctcaaggggcgttgtattatcttacccatagcatatgcaaaaatcactctcgttttttccatgtggacatttataattagagcatgtataacctctcactcaaacaaggtctgctttaattttattacaatagaattctgactctttgctaattaatgatttttggagtttttattaaatcattttctattccacagaaaattcaagagctaagaaatgaggactacacttgggtctttgagaacactgcttttaatctactaaatcagatactctatgattttgatatatttcaagacgcgatgaaatgtgcccttttcctctttttttatttttgtttttacaaaaaataaaagacggtaataaactctactctgtagggacaactctttctctccttaggcagaataactccattctaaggcattgctcccttggtgcatcagtctcaccttgagagttaactccttcccaagcccccaaacccaaatcaccctctgagctgccaggaggggaggtgcccagcaggaaagaggctgcagcggcagcaccaggacaccttgctgagactgccggagggcgctggaaaatccctccctctgaagtaaagctgagctgcttgctcacgctttctaaaaatgaggcagactgtaaattcttagagaaatatagagcagaaaaaaaattaacaaaagcaagaaccagagcagaaccttccacacagaaacgcctgcccagccacacactgcctctctgggaagggaaggcatcccactgcagagcaggagcgactcaggagctgggccagattccaagcgctcccgcggtctcctgggtgaggctctggaatgtggcgataaaggagcactgtgctccgagtggggctgtggcaggcgtgtcacagacgccgccaaggtgcccccacagccgtactgacagcagggcaggccagggcggctccccgggcagacctctcacaccagcacgccggtgcaggctcagcattcagcaggcgcctatctcaggcctctgactgggcagctcagttcccttttgggcactcctaactgaaaacacaggggcccaagcccagaggaaaagaggaggtcctgttggccttatctgaggccacccacgccggctggccacagaggcggccagagagcttgcaaacagcatgtcagaccatcactgactcttccccaaaaagaagtcagtaagttaagactcctccagcttgcaaaccaataaaggcattcctggacaagtcctgagcgacattccttcttgcccggttaaagcatccgttctgctgattattccactccataacgccctctcctcctggctagtaccagctcttttcctctggaagtcttggcaagttggtaaatctcagcaggcacacagctcagtttcaggtctttgtagcattacagaagccacacacatgcacacacacactcaccacacaggcacagacacacatacacatatgcacgcgcgcgcacacacacacacacacaaatgctctctgcttaccttccttcaaaacagcccagcggctctctcagtctgcacctctgagcccagttttccttgacacaggctttcacagcaggacagtggcatgccagaggagggcgggggcgtgccacctccctcccaggcacctggcctcccactagtgtagaaggtaaaagatctccttggctatgtagggactttgattccgccaaaaaggccagggcaatgtaaataagagggtggggtttggtgcactcaggttgagtgaaatttgaactccagaggctgaaaggtggagaaagaagctcctcctgggagtccctcaccaggtttctgccttcactcctgagtgttctgaactgacgtccaggagccagcaccaacccatgcagcttacaaagcacagtttcagcctccttttgctttcttcaaagtaaccaggcggaaaatctttgccacacatgctccatctcctgggagctgtctctctgtcttttgtgcgggatgtggctaagagtacagcgtgaatgttcactgcacacagcatattttgtgtggttagcccagacctccacgttctgtgttcagtgtagcagatccttttcatctcagcctcattacattcaacgtaggtgggcttcagacagtggcttactctttgctttggctcaacatgggccacaataccaaccacacacttttactctttaaatgaacagaatatgacacagcaaacaagcaaaagcccgttctgatgccttcaggttcccacagcacaatggaaacccttttaaaaatcaccaatcagccatccaggggagacaggacatacctgggctataagtgcacgcagagggtaacaaatcttttaaatcacccgagatggccacattggcatatgtcgcttacaggaggttaaggtaaaactcagcgcacccttgggagaaacaatctcttttatgatgagacataatgcacttattgtgcaaaaagttctatcaaatttggtattctttaaagggtattggctaacccaccttcctatcaagagaaccgaaattattgttaccattctgcaaatgatgtgatcactgcaataaaggcagtgactaatttatcacaaaatactttgctttaaagaatacacatcaaacgaaaagagattagaagtagtgaatacaacgcaatgaatgtccgagtctctcctgagcaccggggtctttccaaactgtagctaactgtatgtctagatatggctagggggtcccagcctcctacaggatacaaatcttaaaatcagaccactgcatcacaaaactgtgcaagaaaagcaacggccaaggtacctttatccatttctaatggaaagaggcagcaggattagttgtatgttcaaaaggagtgtttcctttcatgttgttctgggttgggcttgatttgggtggggttggggtttttgttgttttgtttttcggtggctgagggcaaattttcttcatgtggatgacagctttgtaaacgggctgccataagcctttgtgaatatatggcaacaggcacccactggtcttcagatcttgtttacgtagctggcagccactgagcaggcaggctcagaacgctctcattttctacaggttccctgctaatgggtcttgattatatggagcctgtgcaggctgttagtattaacctttcttgaaacaacgtggtcttttgaagctttgctgatgtttggccagaaggcagttctgtggctcagagtgttttgaaagcccccaagccttttcaccctgaagggttgtaattctgtgcaggaggctggccagtccacccttagtatgtgcgggggattggttccaagacaccagcaccccccagtcccccaccaccccctgtgagtatactaaatctgtacatactcaaatcctgcagtcgacctcgaggaacctgagtataggaaaagtggactctccatatacacagatttctcatcctaaatacaccgtattttcaatctgtgtgttggctgaaaaaaatctgcatataagtggactcacacagttcaattatcgttcaagggaccactgtgcagctaatgaagaaaagacttgttgagtttcccgaatatctctgaaaatagcaagcgggacaggaggttggcagtatgtttagtgccactcctatttgggactccctaaaggcagaagaaaattccagaatgggaaaccaattagaaggatgagaaaagatgtggaaatttcaaaaagtagtgggaaagattagaggtataagaatatcctagggccaaaacacagacaagaatgttcacaggcaacgttattcatactagacaaaaagtgttacgagcccaaatgcacaccagctaacaaatgaataggcagagtgtggtgtgtccacacagtggcacaccacagccatgaaaggatggagcgtaacaggaatgcagctggaacacaggctgagtgaaagaagcgaatcacagaaggccactcattgcacgactccagtgagtgagatgtccggaatgggaaacagagagaaggaaagtagcttcgtggttgccaggggctgaggaaaggaggaactgggagtgaccactaatgagtacagggcttcttttggggtgatgaagatgttctggaattagataatggcgacagttccacaaccttgtgaacgtactaaaaatcaatgcatcgtatactttaaaatgattagaatggtaaatttatgtgctatgaatctgatctcaacaaataaaaagtaagaacattctcaggctagaaaccacatggtaacaagggcatatttagaaagcaacggcaaccagcccgaggctcgcacatgcactcaggttttatacaaagcgtctggggacagaggcaggctctgaccccaggtagacaggggatttctgcaagggagcctggggcacacaacattcaaggagagagaagacactctcttctgtgcactggtcaccggaatgaaaccgacactgtgatcacatgctgcaccctctagtgcagggttccaggccaaaagaaagctgtccacctagacagatcagggtgtggcttctgaggaggccattacctggactgcaggtcagaaagtgacacgcagggcctcctgtgaagttcctcctcataaggagagacacatgaaagtgacatctaaattcagatagcttctggtagaaagttctgatttgaaaacatgacaccaccaactttcaacaaatgcaggtccctccagcccgtgaccacccattctccccccactgtctccaccgtttgctcctctcccaactttctttccaaggactcatcctcctgagctgacatccctacctgtccaccacactgagcctgtgtgatccctgctccaatgtcaggcccctccccacccacatgggcagacaggcccgtcccagggggtctctggaggggcagctgtgtgcctagaggccgggaaggggcagcctgtgcctcctgcactccacttcagaacactttcacccaaaactcatttctctctggaaactggtacccctggctacagcgttctccagccctgcgggctgccattgcccctcacttcccagcccatcccccaaacgtccatgcctcccttggtccaggttcaaacactctcatcaccggcatttctgtggcttctcctgggaaaccatcaacattttattgaggccctggccttgactctttggactttagataactttctttggtttgactttagaatttctcatgacataccctcaacttccaccaaactttgaaagccttgagctcttcaggagtggtggccaggactctcctttctctagcagccgctacagctccctggctcctgctcttctctgcatgtatccagcccttccctcagcacagtggagtcacagccaatgtatgtttaactccagcaccaaatttaagacatcgagggcaacacagatccatggtgcttcctctcctagcccatctagacccacaaggcctgctgtctccctcgcctgtggcccacgtccatgcccctgctgatgtgcatgcctctgaaatcacagaggccgtaacagtgtggcgtccacacatcactgggcacaccacactgctcacccaacaaccacctgttgccaggggaagctcctccaagctgtcccagctctcaacacctccactccccagactgttgtccactcccaacagacaacctcgcctgccttgtacaggtcaagtgacgccacagccagtgaactcactcccagtctgctctctacccttctctgcatcctggctcctgcaccaggcaccctgctttggacacactcatggtgctctcagtctcctgcctctgtcaatccagtccctgcctgaactgagctcagcacatcagcagaaggagattcacagccggcgaccaagcccccactcttggcttcaccaactagccctctgacccctcagtgtggtaaagattagatatgttaatgcaagctgcatgctcggaaggttgtgcagctcgtgagcagcactcagcaagggtgagctctgacaacaacaaccattagccattccagccctgtcctggcctctgcacggagctgtgccatccaattcagctctgtatctgcagcatccagcactgccgatgctcagagaggcagggaggagatggagactgcatcctggatcctacagagcctgcctgacaagcacacgtggcctctggttttctttcatgagcttcccagaaggtgacactctgccttcactccccaggtgacctattggaatcctccgatttatgattaacaagagagcaatatattacatgtacaggaataaagaatgaactcccaatactacgagaaagatggtttcctcgcagcctcttcccaccctcaggaaagcacccatagtgcccatcactcggtggctcccccgccgcttttccttctgcctcatcctagtcaggggcccagcagcatcccagactcactgctacgagttcaggggcaatgtatggctactgctgccaccaaaggacggctgttgagatcttggcagaattcccacaatcaatcaacaccaaatcttgctattgctctaaccgtttggcctaatttcagtgagaatatatcccaggtcataaattagctcacattcacactgacaaaaataaatactattgaattttcatagtataatttcccatagactgtcaacaccatgaatcctaaattaattcaactttccatagtgaagtctgaaagactactatgtcaaagggtgtattttccttgttaagaaatcatcactatgcacttataaagaaacactaaacacatctctggctcttgctatgtggaagaaaacttcctgggagcagttgtaccctccacctaggccctatcaactggagggggtccccccacatccacaacaggcaggtgcaggcggagcgcacacaggacatttgctggggacgccctcctcctgtccacagaaacctgttttcccagctcctggggtcaatggctttccctgcacttcgcatcagtctctcgggccctagggatttaaatctgggctcccagctccagagcaactgtcactgggtgtccaccctcgacaggccttgaccttggctccctctctgtgacatgctctaataacactcctggctcacatagcaaagtggtcaccctgtctcttaccccgatccatggacctccatgccaggtctccccgacagacagccaggcaggctctaggtatatggctgtgctgaggcaacgagccgaggcggtctcagctttgctcagcctggcatgcgtccccatccagcacagtgtccacagggggaaaggagtgctgtgaaaaccagctttcatccccaaagtaggtcagaattgctcctatcggcaagataaactgagcaagtctgaagatccattaaagctcgcttttcttacataacagcacaagctgccattatatcaaccctgtttttcaagaaatagctggatgttttacataaaatatccctgcaatctgtgctatgttaaaaaatttaagtaaggaacacacccactagtctctgacacctatgccttctacctcacatgccctgccctccatggcatcttagataacagtaacagaatacaacaactgcatcccctctgtccttggacttacagagagagtaagtgacaatttatatgcaactgaatgcatgtttaacatcaagtagcttgcttgtcaacatttaaacacaactttaactatctaaagtcccagaatcaactgtacagggccagagtgcccaactttcaatagcagaacttgatcttcaaacaaatctttatgcagaaacccaatataaaaacagaaaaagatcaaggtggggctggggctgtggagggttcttacaggagtggatggagagagactggggctgctccttaagaaccaacttggaatcctggagccacaggcatagagtttgaaagctgttgaccccaagagtgttgttactcctaaggtcaacgccagcaccaagaacgtcactctaaaaggcagaagaatcatttgcttaaagggagcgtgcatgtggatggtggtctcctagcccagatggccgaatggggccagagatgcaggccatgagggtgcacctccatgtaagggtccctgtccccataaggacaaaggacccaagtcaaagagattgtcccagctgcaccttttgtatgaacacctcccttttccactaagtcatccgcaacctttccctcccctaggaggccctggcagctccatcttgtagcactttccaaagaaagaagtagatgagacagtcttgcatgcataatctaaaacgcctccccagacattccttcaaggctgaaagagaagagccagagcacgcacaagttctactcttccagccaagggctgaggaagatggtgaggatgaccctgtgggccgggcacacagaagcatgttcatgtgaggaagagactctgcttttcttcagtcccagcctcgttctctctcacattttggttctgtatatcaaatacttaaagtcagcaggtgctctctttccccgacttggcacaagtgcaattgcaggctcttatagacaggcacaatgaagttgcagccctgcctcttccaggcaatggagagaaaggttctacgcacggaagacacagatggaaactcagcaggtttgatcgcctgccattcaggccccctactcctaccaggagatggacataagagcacatctgggaataggggcttgactgagatgtgacttagaaaggggtggcagcaagggccttgtaagaagaataaggaccaaaccctcattacaccagggtctacacacacacatacacacacacacactgctgctcacgctaggtgtgagaagcttcgtggctcagggtcccagggagactgtggggatggagccctcttccaggttcatgtctcagggaatccaccaacagaagaacagtcaaggttgtagtccccataggtgggaattagagtccaaagatctgcagctttggggaaggaatgtagggcaggggcatgaatcattgcatgcatgttggttaagtgggcagggtcaccaaagagcaatggagatactgatcacaaacagcagaggaaagtgaaaagagattaagaagcacagctcctctggactctaagaagacatagtaggccaggcgtggtggctcacacctgtaatcccagcactttgggaggcccaggtgggcagatctcctgagttgaagagatcgagactagcctggccaacatagtgaaaaccccatctctactaaaaatacaaaaattagctgggcatggtggcaggcacctgtagtcccagctactcgggaggctgaggcagggacaactgcttgaacccgggaggtggaggttgcagtgagccaagattgggcagctgcactccagcctgggtctcagagcgagatttcctctcaaagaaagaaaaaaaagaaaaagaagaagaaagaagaagaaggggagagggagagggaggagaagagaagaagaaggagaagcagaaacagaagaagcagaagcagaagaagcagcagaggaagaagaagaagaaggaagaagaagaagaagaagaagaagaagaagaagaagaagaagaagaagaagaagaagaagaagaagaagaagaagaagaagaggaagaggaagaggaagcggaagcagaagaagaagaagaagaagaagaagaagaagaagaagaagaagaagcagaagaagcagcagaagcagaagaagcagaagaagaagaagaagaagaagagggagaagacacagtaactacagaaatacaaacaagccatccaccttgtagacccgtctgcatgcacaggacaccccgtccagtgggatatcgggggtacccttcctcccaggaagcagaggaggcccaaggtttgtgtgccgactgggggttgggaggaccctgaggacccaggacaaatccagccaactctcagcacctctttctctgtcccagggggtgatgctacttaactattaaggccactcttgtgggctgatttctgcaaacttgtacaggacaacatacaacttgagccaattcctctgattcctgtcggattcgaaaagtaacgaacacttaatgagatggcggctcagggactggaacaactcttttgactgcccccaatgccaccctcctcttctgatggagtgtatcaattttttgaaagtaacacccacatgacttgatcctggttttaacagagggtacgcctctcgcacttgagacaggaggaagccggcgcccccaggccactctctcaggtgacattgaggaagatttgctgtttggtctgcgatcacgcctgcaagggggtcctttggtgtttgtgggttgaaggcttgctgcctcaattcacaatcaagagatgcagagggaggaaatctcaggctcagaacaggactacccgcccatctggcccgtttctgtctcatacaacttcagttgcctgatgacagctgcttttcactggagctatctaagcaagcaatgcttagaaaagcctggtttggggacaagacctaaagaaatattcttctgcctggtgcagagtcaaatgtcatagggtggctgaataccatgcaaagagccctggagcagctctcaatgctgggggacagcactccacgttgccaacaaggaccgaggctgcagacacaaggcactgtgtatacccaagcactcagcaaaaagcagagccaagactgaaggatctgtcaggtgccatcggccccctcctccactaaagttgtcaaagtttacttcaatttccaaatcttaaaacccaacaatgtctggggaggaaagttttcaaatccattttcaaagtggcaatacttgaatggtctcagcttgatctggcacttccgggccagctctgcacactgcagccagcacttcctgacccaacatgtcctcgtggtagcccattcctggagctcggaacagtactctgagaacgcggtatggccacttcaggactgtgtcttattgcgaaggctgcagacaaatgtgaatctcctctgtctgcctgctctagcagccccatgggagccccaaagcgtggattctgggaatgttcatcaaggtatccacttaaagtggcagagcccaggcctggcaatgccacggccctcgtcctgcacactcttggattggtaagtttgagctgcactcaaaaagtcctaggtcaaggcaagaaaccaaggacaagagtgacagagcaggccttcatctccaaccctcagacattcttgaagcttccctgctgctcaacccttcctctaaatctgtcatagagtctcactcatctacctcctaaatatctaaaggcccctactctccatcgccagagccacatccaagtccaggcctccgtcagttcttagctggggagtccagaagcccattctctactctccttcctctccagactctgcctcccagagggcgtcctccagcctctttgttatctttctgtatcctccagtcatgtggcacctgggatcctcactgtcacccagcaaagaagccaggctcaggaaaggaagctgacattcccccgatctcacgatccaccacacacagcacctcttacttcctcctgcacacaccagccaggcggaacacacttccaccccgtgaatatgtgctgctcgcctatgccccatgcccagggctaggcataccctgtctgccttccctacctgcaagggctgtcctcttcgtgaatctccttggattgtacaggcaaagtggttgtttctcttcaattctttcctaattcctggtacccaattatggtacacggtgcaccctgtggcaacaactgatgtatatctgtgtcttcccaattagagggtctgctgtgtttcttcctgcgcccaccccagcatcagagccatggcaattcccaagaaaatatgagatgcgtgaatatgacaaatggtgtgtatgataacaaaaatctcagagttggagggaggtatctttagagtcatccaattacaacaggccactttacagactgggaaagtgaaagggaatgaggcttatgagagcaagtagaaagcaccccaatggggagtgtggccactgacaccgacgctccagagatgtccagcgaggaaaatgagatgttctccatagggctcagcaacatgggggtccagagctttgcagagcctccctgaagagtactgtggggacaatcctggtggtgacaatacaaatccagggacacatatgctgctgtgggcattcccttagaccatcacagcaagtctgatcctgaaagagcaggtacatcctgctagggtaagaaatccccccacccacagccctcttgtgtgacgaggaggtggggcacccagtgagactcagcccagtctcactgagtctcaaagtctcaaagaggaaagtcaagggtatgagccctgtcccgcacggtctcgagcacaagacacactctgagccacagctgccatcgccgacagtgtacgccagaaggctaccagggtccctggccagttactagcttttgatttctctttggatctgctctctttatctctaaaatgggctcacaggctctctcgaggattaaaacaccatagtgaggcttccggcaggcagccacactgtgtgccgcgagatattcttccctctcctcagggacagcaactaccccagggaacactgacacgactgccgtcccccgcagccaccacctgccaggaccacagacccacggggagaccaggaccatgtgctcctctctgtgctgaagacagggcgtttgtaatcacttgcccacattggaacggattcaaggccggctcctttctgagtatagaagcagaatgttgcgctcacacatcaaagccagcgctcccctaacaggcccagattgaaggcagctgcagagggctccattccaggacggcaaccactgctagagataaatgcggcttaagtcaacatttttggggttttttaaccaggcggcggggggatagaaaaggcaggggcaggggtggaaaagagagtgccgcaatacatcattttcccagctaaaagagaatgtttcagaggctgccaaaccttccttaactcctcaaagcactggacagctctgaagactaaagccctggtgggaatgcggctgggactcagcctttcacccgccaggcggcgtccagtccagggacctgagccaggcactgctgaccgcaggcaagagcgaagactgcctggagtaatagctcaccaatgcagcacaccggcctccatgccaaagaggggctgaggagggctgcagagtggaagagaggagggaaattcaacaaggatgagttttctatccaaaggtgactactctttctggggaacaccttctcaaaaggacccaagcctggggattctgcagaactttgatggcagaggtggtgatggcagcctcgtgtctcacagggagaacttggaaaccctgcaggagtgcagcaataagatcaaacgcactttggaagcccctctaagggaatccagtgtgctcagtgagaaggacatgggaagaaagtttaaagatgtgcacagatgctaaaggaggtgggttaagtgaaaaactcaggctataaaacaatgcacaggctgatcctactatgagaaattacatgatatttagaaatcatgccaaaaatacaccaatgacgagtgcttcatctctagacagtaagatggcggtaattattccttctttttgataatttacatcttcaaaaaatattgatacaagcttaaatgtatgtaaaagaaagaaagaaaagcataaaactcattccattgaatcaggtaccccagacacgccagacagcacgtggggatggagggtcaggaggaggggatgcagatttgaggaaaggctccgtgcttgtctgtaactcaggagctggaattctcaagaatactcaggcagtggttcaagggaaggttgctgagatccagttttgggagaggactcagattccgtgtggcgggttctgggctaagcatccggataccagtcctgagctcgctctgagtcctcccctgtcactccacctccctgggggtgctcatgggcttcagatatcatcgaggctgcaagggatgaaccaggcactgggaggaggctgcactctcacccactatatccctgaggagtctgggcatgactctgcccataaagggggtctctgctgctttatgaagcctggaagcagtaatgacaaagctgtgaatctggctgcaaagtgtacctggctgccttggcgccctatccgactcctcaccctcctgtctgggaaccactctttcccgggtgtccttcccactctgccctgtccttctcagtttctttccagaactcctatgcacccactcccaactggctccatcttttgcatggcaatgccagaccttctctactcgcccctagacccaactctcggtgacacagagtcccgagtgcatgcccagaccatcacctgcatggctccaccacctccaaccacacaatccatagcagtctcccacctgctcacaccactggctcagaagatgctgcatgaaaaatacaccaatgggaattgtgatttgtaatgtcagggccttagatatttaaagttcaaattgcttctctaatcattcattcaagaaacacgcattgagtatctgctatggactgaatatttgtgtcccctaagattcatatgtcaaaacctaatccccagagtgatggtattaggaggcaggacctttggcggtgctcagagcataagggtggaacccctataagtgggattgatgccctcagaaaggaggctccaaggagctccctctcctcaccaccacgtggagacacaagaaggcaggagttggcaaccagatgacagccctcaccagaatccgccaggctggctgcctgatcttggacttcccagcctctcaaagtaggagaaatacacgcttgttgtttaagacacccaggttatggtcatctgtcaaggcagcgtgaatgggctgagagggcctcaaagtaaagaagtatctccctctgcatcttcaggagacactgcggtggctgagagtctttaagactgaattctgtctatttcacccagtgataacggcaagtcctccacatgtatggatctatacacacacgctcacacacataattccacagattctccgtaaagtttcatgtaacccctaaaggatggtgaacactcaactgattttctgtctatatgttttctacataaaatcaacgtaggtccttcaccacctgtgagtgacatgctgcaggcgcccagctttcagttccctggttgtgacatgggaaggataaagcctgccccgcaggcaggtcacaggcttagctgggagccagcttggggacaagagcggggcacccaatgagggactgagcacagagctgccctccagagcatgctcctcacaggagctggggctcctccacactgtccaccggacttcactgctcccctcttacggcattggcacagagaacacccacctgtgttttagaacccctgcctccctcatggtcaataaccctccaggctcgcccctcccttggcaagcaaggaacctcccagcatcacgagaatgacctttccacaactcgcctccctgttctccatgagactcggcacagccactgattcatcacctcaggacagagcgctgctcactggctcccatgcagcaagggacctctctggtaaaatccactcgcctcagcctggaatttaggatgctaagtcagctgtcctcagagtccccatccagctctccaaattagcccctttccccatcttgccttgcgatgattatttacacacttcaccagccaccgcttcacccttctctcctccagtggaaaacatcaccatgtgatggacagaatatagctatgcagatgcaaacagacgttactggaaaaagagctctgtgatcaaaaagtttgataactgttgtttgataaatcttatgaaattattctcacagctttaagattccagtgtgcactgtgatcttttgaaagacaatgtatcattttgcaagagttttcagctacatttcttttaacgtgctggttatctggaaggactggtgtgctgaataattcacaccagcaaagaacactctgtttactttacaggccagagcaaagctctccccgtccacaacttgcccactagccccagatatcatctgtgttttaatgtccttaccatcaacattccatctgtgggtctccacctctggtctaggtgtatttgggttgcaacaattccttgagttgaaattccatcccacaaggcctatgaaggagcaagcttttccccaggacaacagagaggagccatgtgctgccctgggacacacaattggtgtcctttctcactaaccacagacacccccttcctggagtcatgggaagctcagcgatccacaaagatgaggcgctactgcagttctttccacaacacttgcttttagctattttacatctggatgtaactaatctgacaaaaagtgttttaatttctttcccaaagcaagtctgattctcaatcggtggttgaaaaagacaagggatcagcatgacatgctaggaaaagcctcaattcccctcctttgaaatcagcctccagttgtgtcttgtggagattccagcacacagctgccccttccttcctttcctccttcacgctcctagctatgacccaatgtgcatattacacaggtgaacagaggacatgtttgggtgagacggtttcacgaaaacagagatttaaatgatacagccataaatcaggaacactagactaacaagcaaacagaaattaaaacaagatgtctgttgcatgtggggccgtacaacagtagctagtttggctgtggccagcgcttggcatccccatatgcaaaacggaagggacggaagaagggggaacggtccctggcattatacatacacacaagttcaggccaaggagctcctggatataacttcactgacagctcatccacccgttacagcttcacaaaaagccctgacccaaactcaccatgccttattctcacgaagaccctcaaaactcacaactgtgtcacacgaaggtgtgattctggacctctgagaaaacaggggaaattttttcttcttagcagactgcaaaatacttcagatatttgagtgggctgtcttccctgtgccctttgcctccataactgcacacaagatgaacacacgcaccttctccatctgcactgaggttctcgtacgagtcccagcgtatcagtgggtctgttgtgttgtagtccacaatcacaccgtggtcgttgtacaagtgttcggaccctgcacagagcacaggcagcaacattagtcccagtgaaacccatcacctccatccaaccgactccaccataaggacaggtgagcagcctgacttgagcaggagagagaagcctctccatcctccaccctcctgccaggagccacaacactaatcagagactgtggaggattttccacaactagaaccatagttaaagccacgagggggaagggataagtaagcactgatctttcgtccactgtgaaccaggcttggacacttctgcaaaacgagtcttcagaccacctcactgatgaggacacagaggcccggtaagctgtctctgagcctcagagtccacagatttgaatccaggctccaggctctcagatccacactcctcccttcaagtctttttaggaataccaaggggatttttaacacacaagccatgtatttaaaggtttttgcctaaatctatgacaatgaacatagaaaaagcatgattatttccacagctattaaaaagggaaacaaaactcccatgcatgtggatcttggtgatggatctggacaattcaccttgatgataaagggactggtttcttttgaaatatattttttagggaaaaaaattgtttcgcacataatacttgcagcctactatacttctaattctctttttaaaatgctggttactttggggttaatgatgaaatcatgatggaaatttaaaaattccttgaaatgaatgataatagtgacacaagttatcaaaacctctgggatacagcaaagcaagtgttaagaggaaagtttatagcactaaatgcctacatcaaaaagtctgaaagatcacatattgacaacctcatgtcacacctcaaggaactagagaagcaagaataaactaaacacaaagctagtagaagaaaatgaaaaacaaaaatcagtgcagaactaaatgaaattgaaacaaaatacaaaagatcaatgaaacaaaaagctggtattttgaaaagataaacaaaactgatagaccattagctagattaaccaagaagagagaagattcaaataaattcaattagaaatgaaacgaaacattacaaccagcacgaaagatcattcaagactattatgaacacctttatgtatataaactacaaaactgagaggaaattggtcaattcctggacacagacaaccctcctcgattaaatcaggaagaaatagaaaccctgaacagactagtaaaaagcagtgaaaatgaatcaataatttttttaatgccaataaaaaagagcccagggccagatggattcacagctgaattctaccatccattcaaagaagaactggtgccaatcctactgaacaattccaaaagactgagaaagaggaattgtccctaactaactcattctatgaagccagtatcaccctgataccaaaactaggaaagaatataacaaacaaacaaacaaaaaagaaaatcacagacaaatatccctgatgaacatagatgcaaaaatcttcaacaaaatactagctaactgaatctaacagcacattaaacagataatacaccatgatcaagtggatttcatcccaggaagcaggggtgatttaacatatagaagtcaataaatgtgatacaccatacaaacagaattaaaaacaaaaaccatatgtcatttcagtagatgtgaaaaaggcattcgataaaatctagcatccctttatgataaaaacactcaacaaactaggcatagaagggacttacctcaaaataataaaagccatgtatgacaaacccatagccaatgtcatactgaatggggaaaggttgaaagcattccccctgagaagtgtaacaagacaaggatgcctaccttcaccacttctattcaacatagtactggaatagtactgccagagcaatcagctaagagaaagaaataaagggcacctaaatcggaaaagaggaattaaaactgttgctatttgccaatgatatgatcatatacctagaaaacaataaaaactcctccaaaagacttctagatttgataaacgaattcagtaaagtatcaggtttcaaaatcaatgtacacatatctgtagcactgctgtacaccaacaatgaccaaactgacaatcaaattaagaactcaattctttttacgacagctgaaaaaaaaaaaaaaaaaaaactagaaatatacttaatcaaaacgtgaaagatccatacgaggagaactacaaaacactgatgaaagaaatcagaaatgacacaaacaagtggaaacacatcccatgctcatggattggaagaatcaatatactgaaaacaaccatactgtccaaagcaatctacagattcaatgcaattcctatcaaaatactaatatcattcttcacgaaattggaaaaaaaaaatcctaaaattcatatggaaccaaaaaggggcccaaatggccaaagcaatcctaaaaacaaaacaaaacaaaaatctggaggcatcgcactattggacttcaaactatactaaaaggctatagttaccaaaacatcatggtataaaagtagacacacagatcaatggaacagaatagagaatccagaaatacaactgactacaactgattgatcttcaacaaagcatataaaaacataaactggggaaagaataccctatttaacaaatggtgctgggaaaactggctagccacatgtagaagaataagactggatccccatttctcaccttatattataaaaatcaactcaagatggatccaagatttaaatctaagacctgaaaccataaaaagtctagaagacaacctaggaaaaactcttctggacatttgcctaggcaaataatccatgactaagaccccaaaagcaaatgcaacagaacaaaaataagtaaatgggaccgaattaaactaaaaatcttctgtaccacaaaagaaataatcatcagagtaaacagaacccacagagtgagacagaatatttgcaaactatgcatctgacaaagagctaatatccaaaatcttcaaggaactcgaacaaatcctcaaaaaaaaaaaacaaataatcccatcaaaaagtgggcaaatgatatgaacagacatttttcaaaagatatacaaatggccaacaaacacatgaaaaaatgctaaacatcactaacccccagagaaatgcaaattaaaaccacaatgcaataccaccttactcctacaagaatggccagtcatgcccaaggctctcctggctgagtggttgtgagcaagtcacgccacttctggggcttactgacacaagtgggccttcttgttccactatccaatatcctacatttaaataaaattaatcacagaaatctccaaatatgcacaaaggcaggagactagtactacagccccagcgtagccatcatgcacctttcaccagtgtcagcaaggaccacccagtattccaccaagctacccaccttgaatcttctcaggcgtggcagagaagactaattcaaccttcccatagtcaggaaaacggtcatctgaaaaaaacaatgtattttaacacatttgtggagacaattaaccggaaaagtatggactgactttgtcctttattccaaccagtacagcaccactcccaaatctgcaataaagacaccccatgatacagaaagtataggcagtttcattggttatccataatttttttcccccagggatcaatgatcattttctcctactttgggaacaattttgtcagtaggctgaattttggaaagagggtaaaggggatagtgaaagaatcaaccaaggaggttcaaccgcagctgcccacaagcacagggccgccagctccgcgcctcacctttgctggcattgtccagatcctccttcccaaacaccagcccgtagccctgcacagccccagtgtgaaactgcaggcggaaaatgacgtcacgggtggccgagcggtatttcttgtggtagcatttcacctgggttagagagacaaaacaaaacaaagtagctgcagcgggggacacacgttcccggcaaggaacacactccgcggaggccggcacagcagggcctcccctctggactctggctgggagttcacgctttggagtggaacttcagccctggggcacaggcgcctgcagacagctggggtgcaggcagaggcaccacactgctgctgctgggtgcggggctccactggaggcttcaatgtgttccctgtgctgctcctgtggaaccgcagctctgaacaccactatcgctagtcctcagagaggccacacctaaaccctttcagaccacgtgaatgtgccctgttttggaacacatccgaaaaatagaattccatggtctcttttttctagactttaacaactgattgtgatagcttttctttgatctcaatgctccatgttgcaacttaaagctttttgttttccaaaaagcagcagccggtcattactgtgtgtactatcctaaatgattatgtgcatgctgtaatttagagacagagatacaaagaaggaggaagggagagagggagacagagagggtgttggcatttagacaagtgttcagaatcaccctgatgtgatctgaactcaagctggggttcatgaggtccccagggtgcagctcaagcaccctaaatgattgtgccaatgagccaaagggtagagcaagcccctccttgcagatgcttggcatgtggggaacggtgggcagagcaggagcctgagtgtcctgacctgcctgtataactaggtcccccctgcttcttgtgaccgtgcgcagcactggcatcattggaagggttctcaggccacagctgggggagctgcagggacagggatacccctcactcagagatcaggggcaggaccaccaggtagtggcactttcccaaatccccagaaggccgaaggccctggacaggctggattctgctctcagaccaaatcgtgcacaggcaggtacctccccaaccccgaggctgtggggtagtgactaccagagacagccacgttcccataaaagagacttttcttggagaaagatggctttaaaatatcacatgcctcacaacagtaaatgagaagccaccgcagcaggtatgatccggaccagcatgcgggagaattctgcagggagggtcttccctaaccagatgaacatccaccagaggaacaaaaagcccagaaacccagcccaggaggcagggagctgtgactccaggcagacccagaagatgtttacctttgtgctatctacaaggaaagggacgggtaaataaaccaaaaaaatataattaagactgtggaaggatgttccctgttgacaaacatgactgggtctcccttgtacggcctggcgctggccagcggtgctgtaaacatggggctcagactcaggcctggcctccaggggcccaggaaccagggcgtttgcaagtagaaaactggcattgtgaagaaatgttgcctcaatttgctttccaacagccaatggcacgttggccacaaatctaccacctctgtccgagactgacttctcagcaagactcaatcaaaggctgcccttgcagggatccttccaggatgttctgagagtatctgggcccctcctttgagctccccatgccccacactcactacactgaccacccatcaaatgcttcaacctggggcatattgtagagatccccagagggaggtccttctggccaagggtaaatccacacatgcacccccattgatagagatgatagcacccacctttccctgtctgccttcaaatgtgcctgtctgcctccactagtgccttgcaaatggggagtgaaaagtggttagggaagggaaaaggaaaagagatgccccaattcaagccagtcttgctctcaaattttataaatatttaagggaaccagagatttaaaaaaataaaaacaacaacacgatgtcagctgatagctcacgcagcctgtgctgccatgggcgccaacatttgcccacaggagtcaggaaactcctcaggaggcagctgtgggctcagtcctggcaggcagggagtgtcctgggtgaaaacagagggagctgtgggctccagtacgggccacataaggggcacagtggaatatccccaaccgcagctcaccgtgcccctcccgtcagtaccgccccgcccagcgcagggcctccttccaggccaggtcctgccctccctcttcaggaatccaggatgctcccccaggtccccccactgctcctcatagcagctacacacaaacacactgctcctcccgcagcaatcccagctccctccacataccagaagggaggagaaggcaggccacggtgcccaggaggtacagagtggcaggagatgggaatcggcctgtcccaaacaggttcctctccaggccccatatgattctcctgtaagattcctatttttcacagcacaagctttcaaatactcctaaggctccacagtgaaagaaagagcggtctatcccactggcagagaacaactgctgcctgaaatcacgtggccctcccttcaggggtttctctgtgtattttaatgctaactttgtttgctggcttgagatcctaacggcctcatcatacacaatccctgtttcatattaaacctctttcctcttgattaatggaggtaaacaccaccctccccagtcctcctgaccaaatcatgaactgactccagcttcttctgaaagacacggaaaaccacaggattttccctaactcggggctcccagcaaccaccatcaacacagcaggtcagatcttgagacaaaatccactcaccaaccaggagccctccatagtgtgcaataattatgcattatctacatcaacaaatctttttaggagcaatggcaagagatcagaattatgcttgtaatacttaacagaaagaacaatcaacatggtacttggtacgagggcccccaaatgcctccctttaagatataatagtaatgcaaacatttcgtaaagattagactgattcaagtctataattttcccttcatccctccggctttaactttatttacctgggtctccccagagtgtttctagaatatgttgatcctttgccttcagattttagaatatctgcatttaaaataacaactcaaagatgtgcagtcacaattttgtagcatagaaaaatgaaataagaaatagcaagcaccacaacaaaggctgcgcacagcctgtcaccatgctatcatagagccaaccacaaaagtacgtgggtgtgatgttgacatcacaaatcgctgggagcactcagatcttgagaaagttgcagcctctttagactttaaattctctgactgcaaaatgagtattatgatattgacctggctatgttgttataaagattaaattagcactacatattaatataattcattatccaataatgatatgctatatttatatgaatatattatttaaagggcataagcttctagagagagggcacttggtactcaaaaacatatagggtgaatgatgatctcaatgggaaggcctgtaagcactcttgctttcttttagtctgatgaggcaattcagaaaccatcgccaaaatttattttctaatagtggtataaaaatatgcctgtgcccggccgggcgcggtggctcacgcctgtaatcccagcactttgggaggccgaggcaggcggatcacaaggtcaggagatcgacaccatcctggctaacatggtgaaaccccgtctttactaaaaaaatacaaaaagccggtcatgggggcaggcgcctgtagtcccagctactcgggaggctgaggcaggagaatggcatgaacccaggaggtggagcttgcggtgagccaagattgcaccactgtactccagcctgggtgacagagagacactcagtctcaaaaaataaaaataaaaataaaaataaaaatatgcctgtgcccttgactggactggacaagttgctggtgaccaggaacggagccctgccttgacctcatttgctcctggagtacaccaagtcgaaggcagacacatggaattctcaaagaagttatccctcaatccagtgtttaaagacactgatgacttgcttaactttaggccacataagtgtatttttatttcaaactctccatcaacaagagaaaaagcaccatgtaccaagagagtcaaggcttaaggtatcagccccaggaatgccagtccccaattcagaagtcagccctcaggttcctatcatcccccaatgccagccgttgctgggcagctcctattcagctctgcttcccctaaatttactaagcaaaagagcagaaccctcaaagcatccctaacagaaaagagtaacattctcactcaatgctccactggtggcccaggcaactgtctacgcaggcctcaaggaatctgtgaactcagagaatgagttacaaccgcatatttggagggtaaaaagttagatagctaagccccataggtcaaagacttaagtcaggcagggccaacactaaccatgatttcttcacttggagctgaaaatgacttcagatgttcgcaatattgtaattcatgacctaaagcaattgaaaggtgggtaaatattggctgcaaacgaaaacacaaccaagtccactatgctgagatgacagcatggattaagacccagcccagtctaaaagggagaggaaaaggcaatcacaaaataatgctgtgatgcgtccaacagagatctgtagaaacctctcctggggcagagtctcaggagaacactttcattttccctggccttatgtaagtgccctcggtaagaaacaaccagcaacagcactatttgtttgtgaaaacttcttgagcaggcaacacctttgtttacaagtcgggtcactggagcgaggttctagagccagcaaccatgaacacaaaattcaagtggccgtggatttgtccaagcaggggcagcaagatgaagcatgtgtttacaaactgtggacctgagagccgagaccagggagggagcaagccggatcaggcccctggagccctgccagactcctgatgagcccgctgcccgcatgaattcctgaacagggttacataacgcctcggctgccctccccatggcactgtctgacaatgccatatttactaaacctcttgaggttctgcccttttgaaaggagcagacttaagaatctgaccttttgggaaaagcacactgcaaagatgggatgggtcaggtgtgcagctgggaggggccaagcagggatgggctggctgtgtcgaggcgaaggcagacggtgggtcaaggtcagctttgctgttgcctgcagcagctccatctgctagtaactgagtccagggagtggcaagtggggctctgttttcccaagtcactttctgcagttagacttgactctggcccttccttctctgtgaacttgaccactgtgatctttgccagtaagtcccagtgcagaggccctcatgaggaaagccaggcagatgtccctgcaggcaaggcagacaccagaaccacggaggggaaaactcaaagaggacaagaggccttttgaaggaggaggattaaggatggctaccccgcctgggaagccactttccgccttcaaaagtacacagacagcctcagaaaacacccagactgagggcaccaagccatctgcagtcttcagggtgtaaatctatgcacatgctttctgctcgttaggatcctctccaagccatgactgttgccaaaagaaataaaaccacctgcatatctgaactttacacagaaaaggccctgtaacttcttcccccactacagccttctcaacttaaggattgctcagtgaacctgcagcagggcacgtcacgcaggcacagggaaaaactgaaggaagggcaaagtgaaggcggcgtgggcatcctgtgctgagcatggcagagtgggtcactggaaggtcggaagaggctggagaggaggaatccggtgctgctcctgccctgcacaccctcagaacacccagaagaagcatgaacgggaggaggggatggctcccgctcctctctagggatgctttgccaataatgagaaacgtgcaaccgcatttttttcttcctgtgttgttcccttaggtcgttttcagagggagtcaacagcactgagatttctgggctttggcaaaagatgcactcccgactctgatgggagtgctggcagtgacaccctgggtttctactctccaggtcgaccacagatgtgagctctgctgtgaagccactccttctctgacacgctggaaatcatctctcccacctaacctttagctcttgccgccgcgcaccttctgccatgctcagttccacctgccctagctatctgcatgctcatctccctgaaggacccagactcccgggagcaggagccctgcactgcccactcacgtgtccaccgcatcttctcatgcaggccgcacgctgaacgtgctcaggataaaggctggtgacaaaccacagccacagggactgggccgtcaatggcacctgactgcgctagtaatcttactaaactttctaggagaggtttatttaataaacagacttgttacaggctgaatggtgtccttccaaaatccataagttgaaggtctcagcacttcagcatagggctgtgtttggagatggggtcttcacaaaggtaaattaaaatgaggtcattaggctgggcccgaatgaatgataactggtgtccttgtaagaagagatgaggacatagacacacagagggaagcccaggtgaggacacagggagaagacagccacctccaggtcaaggagagaggcctcaggagaaaccaccctgcccacacctggatctcaggctcccagcctccaggactgtgggagaatcacctctgttgtttaagctgagaccaaagggtgaagcctgagttgagaggtcagggccagggtgggtggacagtgctagatcagcagggcttggggacagaatggcgggatcagctggggcagcaagaggcggctggcgggttccagtggcctgagggacacagagtctgaatgccaagcaggttagagccagcaacaggtagaagaccaggaggagatggcaggctggagaacgccagcccagggtggcctggaggccattgggaacactcccaagggctgcaggtgggacactgaggaaaggaggccaccgcctccttcacccactcacggcccctctctgccctgccccaccctgttcctgggcctgcctcatttatcaagtgccaaacccacacctccaccacaccccttccaagtcccacccacaccgcccactcaaagcctcattccaactgctacaacagagatgcatgtaatgtctactcagaccacacgcttgggctgcggtgcccactacagggtgggacaggataagacgcagcaccatggggagagggcctatggggtgggtggggtgctgggggctcttccagagggaagaggcagtggctgccccaaagactaagccacagtctggtccgatagaggaaagtgacctggtgatgccgcagggtcacatcgatgcagtttcatcctctgccaggcgctgtcctgggagacttatgtgactgagtacatttaatccttacaaacctgcactaggcagaggtctaacacttcccaaaacaaaatatgcaaatatgtaagccctacaaaatctggtttcaaccttccaagacaacgactttccttgcaagacagacatccttacaacagcatcagcctttgtgggtgcctcaagcctgggatgcttcatctgtttgtataataacaccccttccaacctggagccaactcacaggacacgtccatctgagtcctcctgtgacctctcccaccccgtctcatcaaggcctctgtaggctacacggtatcagtaggttccctcctgccagaaagcccatgtccccaacgggatcctctagggcaaaaacttcactcatgggcctagagcaagcatagcaactccaaaagcacaaaacattaaaaaaaaagactactggatgaatgacagtaggaagaaggggccacagaaaataatgaggaggaaggagggagggagcagagaggaggaaaaggaagaagggcaagaggaggagggagaagtttgtaaaggcagggtgggagagaagagaggggagaagagaaggaaggaggaggaggtagctgggaagagaggagaggagccaggcacttcccaggagactgcccccgcccgcctggtctcaggaagaccctgcagctaccagcccataaacagcccaggggagagggccccgcctggtctcaggaagaccctgcagctaccagcccataaacagcccaggggagagggccgtcccatgctcttggtgggcggtaggggggaagacacatcttagcctgagggtcaccctctatgactgagttgttcagctgcctcccatgagtcatcttaaagggacggagccgtggggcaataactactcatcactgaagacctggttcagggagcaccctgcccttgagatgctgcctcccagggcaggtagaacactacgcaaacaagatgagggcgggtgcaaatcctaccagcatcgcccccagcctctcttggcctattcttttttttttacctctgagacggagtctcgctctgtcgcccaggctggagtgcagtagcgcaattttggctcactgcaagctccgcctcctgggttcatgccattctcctgcctcagcctcctgagtaggtgggactacaggcacgcgccaccttgcccagcttattttttgtatttttagtagagatggggtttcaccgtgtcagccaggatggtctcgatctcctgacctcgtgatccgcccacctcagcctcccaaagtgctgggattacaggcgtgagccactgcgcccagcccggcctcctctttaaagctggaacactagacccagttccagagtgggtggaggagtaaagtgctgaacatagccggtgctcaatacagactcaggcccttcgtccaacgatcccaggaagtgtcctgggagaaggagcctccagggtgaagcctcctaggaaacaagcccagggctgccttctggaccacaggatgtgaggaacaccagagcggatgtttctctcccctcctggtcctccctctcacttccagccacagggatgctgcaccatcgctgcagcacagcactgctgaggacagacttccagcccaggtcctcctccttaggacagtagaacagagagctgaggaaacgggcctataaaaacgtatgacgcaccccaaacctcagctttcttgcctatgaaacaggaggcaagatgtttataaagtgcttactcaatgccttgaaaagggctgggcccagctgttgttccagacctgccttccaggcctgaagaacccctcaattaggtggtgagcatgtgaaacaggacagacctggaggccccagagggaccccgcaggcgtggatgggtttagactgtctccaccttcaatcctctccaccttcgatcctcgctgatttgatttttgtaagaattcaggaccagcaaggtagggagttcaccatccactaagctaagatttcaaaatctaggggttacagggaaattaatgaaaatcctcaaaaactttgtatagggtatttataatacaatgaaaagctatttctcgagtcaccctactgccttatagaagtgggtcttccaaggccatgaaatctttacattctatgattctatgcatgctgaaagtcatacatatgccttaaaagcttaccttatttcagataaaaaattttcctaaaattattttaaatgtatgaattgtttgtattcaagaaagataaaaggcaaaaatgtaatggctaatctcctccaagaaccaacacacataagaatcaaaattatctggagaaatcattgttttgatcattaatcaagctgtaattgcaccagctgtatttcacactttggctattaatgatacataaatattctatttctgcacccacactctgggaggcctgtgatcatgtgaagaatgcaaattatagtcagaacacaggggttctcagaagtgagtggccgagttaggacattaatttccaggttgtatatctcgaggggctctagaatgaaagagaatcaagaatgaagatttgttccgtccctttaattaaaatagttttattcagaaagttaactaaatgccttaaggcagtggtcaccaatctttttggcaccagggactggtttcacagaagatgatttttccatggactggtggaggatggtttcaggatgaaactgttccacctcagatcatcattctcctaaggagtgtgcaacctagatcgctcgcatacacagttcacaatagggttcgcactcttataagaatctcatggcgccgctgatctgacgggaggctcaggtggtcatgctcgctcgctggcccggttcctaacaggccacagaccgataaggtccacggcccaggcgtgggggaccccagtgttaaggtaaaagctacttttccttcttcctacagggtactttttttgggggtgagggttactgttttaacacagaatcatgatttcaagtcatcaccactgggagagtggggacaccaacccatctgcggccacagcgggcactcaccatgacatctcccttcagaagctgggccggctcgatgacgatgcagatcctgctggggttttctgggccaacgttgctttgggatgaagaagaaggtagatcattatgcaacttcatgattttgtgggaagaatacatgtagagaaaagcaaccctacaacccaaaactcagaaattacacagaatgcccaatcagcccagaatctaattcctgagaatctaaatgaatctaaaaaggtaaagaaagctcccaggccatggagggtcctcatagcatcatcatggtcagtgactgacttgaagtgactaaggtccaactccagaggcccgagcttggagacgaccatgcaggcttagaggaaggggcccagggtgtgcacagccacagtttcagttacaaactgagggtgcaattccagagtgacatcagtgcacagagggcccagagcaaacccagaaatgtgacaacagctctttgtgagtaatgagaatatttgtttcctttactgacttttcataaaatgcctgtccacatacaaaaagacaaagaaaactcaggaatgtgtacaaatttgggggatgtgtggctacgtattgtttaaaatgcaaaggaggctagacatggctcacgcctgtaatcccagcactttgggaagccaaggcaggcagatcacttgaggtcaggagtttgagaccagcctggctaacatagtgaaaccccgtctctacaaaaatatgaaatttagctgggcatgatggcaggtgcctgtaatcccagctactcgggaggctgaagcaggagaatcgcttgaacctaggaagtggaggttgcagtgagtggagatcgtgccagagcgagatgctctctcaaaaaaaataaataaataaaaatggaaaacaaaatggaaaggagcgagaaagaaaaaccatagtagtgagatcctatcgtaggactctctccagtaggctcacagttaaccttccctattcttgggttccacattcatggactcaactgactggggacagaaaatattgtgggaaataaataaaaaacaaaaatgcaaccataaaaaataatagaagttaaaaaacaatacattgtaacaactattttcacagcctttacattgaattaggtattgttatgtaatctagagatgatttaaagtatacaggagaatgctcatgggttatatgaaaatacaatgccagtttttttgttgttgttgttttctttttttttcagaccgagtctcgctctgtcgccaggctggagtgccatggcacaatctcggctcactgcaacctctgcctctcaggttcaagcaattctcctgcctcagcctcccaagcagctgggactacaggcacacgccaccatgcccagctaatttttgtatttttagtagagacgggatttcaccatattggccaggatggtctcaatctcttgaccttgtgatcagcccacctccacctcccaaagtgctgggattacaggtgtgagccaccaagcctggccttttttttttttttttttttttttgactctcgctctgtcacctagcctggagtgcagtggtgtgatctcggctcactgcaacctccacctcccaggttcaagtgaattctcctgcctccacctcgagtggctgggtttacagatgcacgaccccaagactggctaatttttgtatttttagtagagacggggtttcaccatgatggccaggggctcggtggctcacatctgtaatcctggcactttgggaggccgagacgggtagatcacttgaggtcaggagttcaagacaatgccgttttataaaacacacttgaacatcctcggatttggtaatcaaagggggtcctggaatcaataccccttgaaaaccaaggggccaccatactccaaaaagcaaatggcccactctcccctcaaaattccagcccccacgtcctttaatggagccaactagtgtgacagcccaaagacacttgtgcagggcaggagggagggccaaggcgtgatgctggagcacgggccacgagaggattttccccactggactcttctttggcttcttggcattctctgacctgaaccctcccacactcttcctgcgggacaggcagctgagggtcagctgcagttccctgagccgtccaggtcccacaacagcagcagcagcagcagcagcactcactagatcccggaggtgtacacaggctgcatggcttggtagagcttcagaaagggccggcacactgaaagaaaggcacaactgtctgtagaggcatgaccggtacagaacgaacaggaatttggcaatcagaaagacagaaagcgacgaggagaccaggagactgcacctgcggcctttgaggtctgggaaagcagtgcatggagccacagggttgctgcaggaaaaggccggacccggtcctagaagcctgcagagcaacacagtttgacctttatccaaagggtgccaaaggctcctgaagtgaagccaagctgcttcaaaaccaactagcagcttggcaaggtcactctggccataatgaccagggggacctgaaggcacagatgtacttcagagacaatagaaacctctgagcaagcacctgcatgcgactggcgaggaagggcaagggtcctgaatcccagccatgtgctgtgtgtgcctgcataggactgggaaggagaggacagggccctgaccctcagccatgtgccatttgctcctgcatgggacaagggaggagggatagggccctgctgaccctcggccatatactctgtgcacctttggggaactggggatgtggagacagggccgtgatccccagtcgtgtgctgtgctcatctaagtgggacaggaaggagggctcagggccctcaccctcagctacatgctgtgtgctttcctgtggggtcattttaaaggaggaggaggagatgggttcatgagatgcgtcaggggagactgggtcacattcatgcctcttactgggcttcttccatggcttgtgacctcaaggccaactgcacagctgacccactagggctgcagcccagaacaatgcttgtctgccctagtcactgtgcatatacacaggggtatttctgatcccccttgctggccgccagtccctcccctgattaaataacttggcccaaccacataaacatggggctctgaccactgaagggggacccagtcaatcgccagggaggcagaggagcagatcctgggccctctcggaaggaaagccgaggcttatctaaattgaggggcccaggaccagctccaagtctgggccagccaatcgcaggtgccacgtcataggggacactcacctccacctgtgtcgaagttgggggtgccgtggaggatgacaaaatgcaggaacaggggagaggcattcattttcaccgatccggacaggagcccactgaggaactgaacatacctgcaaaacggacagctgggttacacttcccagaagtgtcttcagcctctgctgagaagggaactcaaggagaaacacatcctggctgagtctggggctctgggagagaatcggtccactgctcacagccaggggttctcagcatggtgctgcgcttacaggtctgagggcttcccaccagcgcaccaggcaccaagcaccagacaccaaggcacaaccggcctcttggcttgagcatcccacacctgaaaggcctctgtgcctgtccactgaacctatcgccaggcaaagccaggccacaggccacaggccatcacaatccccactggtgagcagcaggaagcagaggcctggcacaccggtgggcgtgtgctctgtcactagcattgcacctatggcagggtcacatgacccaggcccagaaccactcactgcacctgctgctttctgctcatactcgagagccctaagaaaaggctggagtccatactcccctcctatcccgcagccttccacgccacatctgataagaggctctccttcctgctgtccccctcttcaaggcccagctccaaaggcgaaggccatgtgggccatcagcctttctgagttctaggagtcggcctcatgcttccaacactgactgcacacaacttccatgagcatttggtggtcaagagggaagcttctacactaggagcatctgactgctggggtcctcatgaggcatgacgtggcagcagtgaccacaggatgagccggaggcttaccaagctctctgacgcttccctggcctgtcctgcctgttggtgccctgcctggcgtggcccctgccctgaggtccctcaccatggccacttcacccacataacctccactgtagcctcaacaccttgcatggaatctgtgtttccatatctgtctccaccaaagtactgtactctttgcaagaaaaacccaaacaatcaaaaactccgcaatatttaacaatctgtgcatctctctactgccatggcagactgaggcaggaagtggcaggtgactgtgttgccagcacctacaaccatcctaccctaagccagaaacggccatcatggaccttgtgttaagacaaaagtctctcacttacgctggcaattcacacccagtcccttattcaagcagttaaatttgtatacaaacaaactaaacaagagaagatttctgttaaacattaacaaaaaaggaaagccctacttatagtccacccactaggaaaatgttagaaaagcgagtttgcttcagttcagttacaattcgtagtgagaaacagggcatgtcagtatttccatcttcctggcagcaaacttctcttctgctctctcagaacagggcaaaacctcacaagagtcgcagaggacagatgctcagcctggagacgtggggaccctgtgaggctgatgaccagacttcagtggacctccaggcagctcccacacgcctctcctgcagggtactttctaccctggcaacaagacttctcaccctcagttgtacgtaggcagaggaatgcatgaattgtatatgtttaatcatgcaaattttacgcattgtggatttcatgggtcctttggctccctggttttgagtaaaagtgaggaaccacaaatgcccggattgagaggcctgagtcacctcctctggagcagttccgccctccttccagcacggggcagccctggtcactgggaaatcagcttcctcagctcgtccagtttgtcagtggcaccctgagtcccacactgcctggccatgtgctgcagtgaccacgcggctaagacggacctgttccctgggggtgttctcagtgccccatgtgcacctggaccaggcatctaggtgaagtcgatgtttgttttatgacttcctgcaaacatggaagactctggagcgctgggcctgaggggctcctgttcatggcagcataaggggtccaagtagctaagcccagagttagcgccaaggtcctatgaggggcaaacagccatcctccgggaaaccatggcctctccctgacccaggtcttgtaccatactgtggtcacacagcttcatttctgctgatgtggcctggccgaaattgttgcccctgacaccagacgaagcacgagaagtatttccttcagatgaggagggccaagctgacagcagaagaactttgttttgccacgagctcccaaagaaggccaaagtccagggccacaagcccagtagtggtcagaggggaagggaaggaggctgtcactgcctgggacccaggactccagagtcttctccccaaaaccagttctcaacagtcatcacctcccaggtcagtctacaaagggctgctcaggtggtagcttaaccaatcaaaaagtaacctcttggaatataattctcatctgtcctttatagaaaacaactttttatgcatcatattttcaggtaaattaaagacataaaatgctaaggtaaatgtaattttttttcttccttcacatgctttcttaataaggtaagattaacaacaacaacaaaaaaaaaccaacatattgttcaaaatcccaaataaaagcatgcctttaaaaaacattttttaaaaaatagcaatgccttataaaaacaacaaagttcactgcaactataagctgtagtgaatgctatgagattgcagacagatagccaacgtaggtaatagcactgagtttgtgagtgacttcttagagaaccaccatcagtaccaaagaacagaacattcaggtatggatgaaaataagggaggccaggcgcagtggctcccgcctataatcccagcactctgggaggctgaggtgggaggatcacctgaggtcaggagtttgagaccagcctagccaacatgctgaaatcctgtctctacaaaaaattaattaattaattttaaaaattagctgggcatggtggcatgcgcctgtaatcccagctacacaggaagctgaggcatgagaattgcttgaaccaggaggcagaggttgcagtgagcctagactgcaccactgcactccagcctgagtgacagagcaagaccctgtctcaaagtaaaaaaagaaaagaaggggaaatgaacataataggacagaattgcacaattagttcatccagctgactatggaaaggatcaactttaacttcgtatacacagtatttatctgtggcattaaaggtagatataaatgaatcaattgtagggtatcagatgccctctaaagaccatcccaacagccttatccaaaataaaatgttcctacttagtcaacacagttttcagagctggaaagattagaaaccagatactttataaaaacagctccattattttcccattgctatcttttctttctttttaggaaataactccctggagatgatgttttccatgctgcttctcaaaccagtgagtacattttaaaaactaaaggattgtttttaaacttgtaagcaaacgaacataaaagcagcttgaaattttcagttgtcccttgcattattcacagccacttctaacagcaaaaacttccatttggaatctccataaatctccctaaacatttgagttgcactagacgttagcttaaatctgtctgaaatggtgggtgcataaaaatcagcattcaaatgttactttttccaagcaacaggaaccatcgtcacaggacatctttcccaacagcttactcattctacattcccagcactcacagagtcagccatggctgcaggggcagcaccaaccggccaggaaaggtgagctgggccacctgttggtgtcagccaagcctgggctgtttcttaacgttctgctgagcattcccttccctctcatgtaatgggaagaataatgagacctacacattggaattgctgcaaagatgagtcagttgcatggacataagggtcagagtagaccacaacacatctgccacagcctctgctctcctgaggtatgctgccagagtgtaggtggctttgcccacagagttggaggctcagaggggatgtccaggcccaggcaaagtgtgtggctccctgaggaatggtcaccctttttccgcaggctgtgggcagcaaggaggatgtgcagggaggggccacaggggcatgaagtaaaatagcctttgcaaaaattttaacagtgagagaagtatgacagtgaaagagatctaatgtaaccaacccccatcttgcctttaacctcctagctgcccttggctattcctgggcttggaccaaactaactttaggagaaagtaaagtttatagtttaaatgataatagcccaaaactaaaccacttttgtaaaactaatgcaagaccaccacattggtaggatgaaagcggcttgaattctgccaaggtatagacttaaaagattactctggggatcacaagatttgcaacttcctcaattactgctagagataacatcaccattgtagaacctaagattggccttttgagatgtctattcaggcttttgcatttctgacaactgacagctctacctgacctgccaactgttctctggccccacccagaagtggactcagaggcaaaagggtcactttcccctatgattgcacccccaaccactcagcagcaccccattccctagccacccccttctccccaaaatatctttgaaaaaccctagcctccaaattttccagggggctgatttgggtagtaataaaactctggtctcctgttcagccagctctgcatgaattaaactctttctctactgcaattcccctgtcttggtaaatcggctatatctgggcattgaataatgaacccatttgtcggttacagagactatctgaggagcctcatcctttagagaatgtggaaaactactctccttgtatctttaaagtattctttcaggcacctgaggtactgtgtcaaaaatgacagaaatatgaaaaatcaaataatgccatttttacaggcagttagacaggcatgagcagggcagcagagggctctttccgcacgcactaggagaatgtggggtaatggttcggcaattatcacattgcctctctgaaagtgatacactggcagctggtgccaggaggaggccgtttcctgatggtccacgcctattgcactgttaattgaatgcaggctccagggagacacaacttcttgggcacgtgcattaacagaaaaaatggcagagtatgaccttctcagggtacatcaccagaaaagggaagaaaccctcagataggcatgcgtacaacttcctaaacatactgcatgtgctcacttcccaagcaaaaggagggcactatgcattcgggcagccccctctgagggaagaatcacgggaaaggggcacaagacatgggaagtgggccagcctataaagtctaggaccaaggttaaacaccacacttgaccttcatgtgcccgcttgggtctcttctaagcgtactttcctttctttcttgttctaaagccttttaaaataaacttccactctggctctgaaacttgtctctgtctctttttctgccttatatccctcagtcaaattctttcttctgagcaggcaagaattgaggttcctgcagacccttatggattcactgctggtaactcggataccttccaccagtaacactatataggataatttctaggacatcctgatttctgtatgccaagacatttgtttggtctgtcttccctttacctcaaagggacacccaaatgtgcatagacaacatgactgatggtcttaggtgactcccacatggggcctcccagggtcaccttggcaggcaacactcaggagagatcagctccccaaagaaacaactggctacctgtcactttccccattaactccgtgatggggccaagaaacatgtgctgctgtctcaactatctcagaaagaaaggaaaggcagaaaagaaaagagatgtcagaaacgttaataattttaatattatttccatgatgctgataataaaccaaaactatacccggatttttggggcgttaggaggagacagggtctagctctgtcatccaggctggcatgcagtggggcaattacagctcactgtaacctccaactcctgggctcaagggatcctcccacctcagcttccagagtagctgggactacaggtgtgtgccatcacatccagctaattttttttttttttttctgatagagatggggtcttcctgtgttgctaaggcaggtctcaaactcctggactcaagggattgtccggcctcagcctcccaaagaatcgggattacaggttagagtcactgtgccacacccagtatttctttttaactacttctcaaagaggaaggcttccaagtttagggaaggaagttcaggggtgcctcaataacacaatggtggtcatgagcaccaacaggaggccacactggggtgtcaacaagctgcttctcatgatttgctgaagacaaggaaggtataaaaacagaaaacttacatgggcacatgtgagttttacgggtcagctccatgggccaactgctccatggcgtttcagtgtaacaaagattgacctcccatcagagttgctgttgagacttctgagcttcccagtcacaaattccttgctaattaattattctcaagagtgattattacgagtttgactttaaaatgatttcttgagctcagtcctaaagcagcctgcagcgcacccatcccactccccaggccattcaggacaacagagaagcctcccatcacagagcctattcccatacaagctgtcctcacacgttcttctggtctcaaactttcctccagatttatcttatgcattcattcgtttacatgctcgattaccatttggtgagcatcttttcatgcaggctctggtcaaaataaaaagaaaagagcaaggagtaaggggcatttccctaatctcaggagcagagggattaaccttggaatgtaaaattgaatccagcaagcattaaaaaatgcaaatgttctggcttcaaatgtgcaatgacgggaaggatgcatgaaaaccctgggcatgggaatgtgagaagagcagggcatggtggctcacacgtgcaatcccagcattttgggaagccacagcagaaggattattcaagctcaggggttcaagaccagcctgggcaacacagtgagacactgtctccacaaaaattttaaaattagctgagcatggtgatgtgcgcctatagtctcagctactcaagaggctgaggtggaaggattgcttgagcccaggaggttgaggctgctgtgagccaagattgcaccactgcactacagcctgggtgacagagcaacactctgtttcaaaaaaagaaaaaagaaaagaaaaaaaaaatgaagagatatcttccccctttttccatattcttttaatgttataaacaagctgctggtgccgtaagaaataagaacaaaaaaaagaaaagacgacagctggacttcctgtgtgccaagcattctgcatgggttactccctatttacacctcattttccatgcaggaggtcatatgaatgtcacgattttggaaactgttcaacaaagaaataacatttaatggttccaaaaaaaaacaaaaaaaaaacccaagtgactgtttaactaaaatattttagaaaatgctaggttttctgcacacaacttgcattgcatgtgggccctgttgctgaccacagtcctacaccctagcccatgttcctccaacacacccggtttcaagagaaacagagccatgccattggaaatagcaagacaaaaggaaaaggtgcctctggtgatgcttgaaatccctttctgcccgtctacccccatgtctgctgacatagccctcagttgcactggagaaaatagatacaaggcatcaaaacttgcatacacaaggtcgggtgtgcaactacctgtctccaaaacggaacaccatttggcaatcaccttggcaattctcctacaaattccctgctgtgggctttgaaatatgccatggagctacctggttggctctaagtgtcaccatctgtggaggaagtaagtgcacctggatggggagccagctgtgggtccttctcactgcctctcagccagccctgctcaggttcttgacctcagcctgctggggtgggcagcaaaaggagaaagttctgcaccccaccatgactattccccatcacttactgagctcattccaggggccacgcccaggagcagagaagggagagatgggcagcatgacagaaaaatactccgtggcctcagggaactgatgagctacaagaattggccaagtgcaactgctaatgtgtttgtgtaagtaaagttttattgcaatacagccacattccctgatttccatattgcccagggctgctttcatgttagaacagttgcgataaagatcctgtagcctgcaaagcctaaaatatccactctctagtccgttgcagagatagttcactgacccctggtctagccaatagaaccaagttccaacataataatggaaatcaaaactcactcactgcaagagaggaaaatgccaactggagcaagtcctccctttacctgtcagtgcaagccagcagcatagggggctgtctctcaccacagacacacaggatggctaagtccttaacctctgggagggacaagtctccccaccaccttcacagtctttggcatgacccaagaatactattcatttaggtgtcgggacagaggagatgcctcttctgttttcacatttttatatgtaaaatttcattcacctcttcactctggctttggggatctatacataccgtttttgggaaggctgcattaaagctgaaactttgtcatcataaaacttcttcattgcaaacctgtcaagggcctggtcggcgctgaaggggagagagagagaaagagagttaactcagtggagcccacaccacgtgggtacttgacgggggatgtgtctcatggctgttcaaagcgaccagctcccacaaggggcttcaccctttgctgcacctgtgcacacccaatccacctgtcccttgttagacttcatttcccccgcaggaatatgctgtgctcaaagtgggagccatagtgcagggtcagaattctcatctgaaataacagctccttatctaaagatattattcttaagagtgctgaatacccagcttgcagaagaaccaactgaggcttctcagcaggcaggtggtagggctggtgtccaaaactgtcccttggccaccctacgtcctaaataaagaagaccattttaagtgggctctgtgcaagacaagcaggcagactcaagtttcaggaccacatggatgcagggagcaacccagggcaggagagtcaacagacacccccatgaagtcccaagaggcaccctcgggacacaagtgggccagcctgtgccccgccagtatgtcactcccaggactgggcttgagaaggctgtagggcactggggttggaaaggtgtctcaggcctcggggctgcagcattgtttttgaagtgactgaaagtaaccctgctttccaacaatatatttgaccttcaatgccaggtccacagtgcccacaggaagtgtctgacagaaacttccagaaatctcacagcagggcattcatgggatttcttgatatgacttcagcacaaatcctggaatatgagtgcagtgtcttaacaattccaactcatttgggccaaatgcttccttaaaaccctgataggctgggtgcggtggctcacgcctgtactcccagcactttgggaggccaaggcgggcggatcacctgaggtcaggagttcaagaccagcctggtcaacagggtgaaatcccagctctactgaaaataaaaattaccgcggcatgatggtgggtgcctataatcccagctacttgggaggctgaggtgggagaatcacttgaacccgggaggcagaggttgtagtgagcagagatcgcaccattgcactccagcctgggtgacagagtgagactccatctcaaaacaacaacaacaacaacaacaacacctgataaagtgggcccgttacttagaaaaatgtgtctgtgcccctccagaaaaatgatgtacataagcactgcggacttcataaaaatcctggtagagagacaggcaggaggaaaaagaaacatactcaaaagtaagttgagtgtgatttgactttcacagaatactataaaatggacaacttgctacgtgcatttgctaggcaaggggctgtgctggtggggcagtcacacacagaagggcccactttagcaccgagtccatcacatactgagcagcagagtgcagctccatagcctcccagtgacttttaagcattcctttttctgaaatttacttgttttattaaatgctgagaatacattttgaccaatgtttattttctatagtgatatgagtagtagtaataatattagtactggttttgtctttataactcttatttctatggtgttgatacaagaatgttcttctctggtgacttgaagtttcttttttcttctgtttgcagtttgtgataaagatctcaaatgtgtgcttgtgctatctgggattactctacttctggaatataatctaagagggaacattgtagaaatgatcaaaaatatatgtataagaatgtgttcatcatggcaagctttgcagtagaaaacaactggaagcaacctaaattacaaaaaaaaaacacacacttaggaggctgaggtgggcaaatcacgaggtcaggagttcaagaccagcctgtccaacatggtgaaaccacgtctctactaaaaatacaaaaaattagctgggcatagtggcgggcaccagtaatcccagctacttgagaggctgaggcaggagaatcacttgaacctgggaggtggaggttacagcgaaccaagatcacgccactgcactccagccccggcaacagagtgagactctgtcttaaacacacacgtacacaaaactggaagcaacttggataggcaaaatcaacaaatgcttaaatacataacatatccattgaataaagtgctatgctgccactgaaatgatgtcgggaaatgatgcatataaaatgatattaatgtagaaaatcaagtcacaaaaagcatgtggtatcagcccatttaattgaaaggcacttaatactattactcctaataatcacagcagcgttaatgatagccaatacctgagtaccgatgctgttctaagtgctttttgtgtaacatatgttgaactgtcacaacattctgggaagtagagctaccatcattttccaggtaaggatgctgaggcttagagagattcaggtaaattgcctgacacatgcagctgaaatacatattgactattgagagaaaacagagtttgtaccaagagcgtcaaaggtgtgtttttagccctaagacatctacccttcccaaaaaatccgggactatccacagtgcatggaacttcggttcaggcagtactactttgctggggatagaaatgctcaggtgtggctgggcgtggtggctcacacctgtaatcccagcactttggcaggccgaggtgagtgatcacctgaggtcgggagttcaagaccagcctggccaacatggtgaaaccctgtccctactaaaaatacaaaaaattagctgggcatcttggcacacacctataatcccagctactcaggaggctgaggcaggagaatcgcttgaacccgggaagcagaggtggcagtaagccaagattgcaccactgcactccaacctgggcaacgaagcaagactctgtcaaaaaaaaaaaaaaaaaaaaaacagaagtgctcaggtggtctctgtccagaaccagccaggctatgtttagtcaccaaccaaatgtctttggcatcattgagggatggatgtgcccaggaatctcgattttcctggcacacacacacaccgatgattattctcaccaagagggtatctgattttcacttgggggttggtttcctccctggcaggcaccaactcctcagttggtttccagagaaaacattcagaaagtcaaatttcactccttggtgctagaaaggaaaaggtttatcggctgatatgaataggcttctatttcctcagaatggaaagttcaggctttacaaagaggccattgagaagacagggcagatgcaaatgtagaccccataaataatattttctgcactgcatttcagcgagagtgaagatctgcactctgggaagggtccgggtgtacaccacagctgcccagggccagaaggatgggcatagggctgaggtccttgtggccctgctgtgtttgtgtcatgtctggcttaggggacccgagtggcacctccaaagtctccacgattacagttccatctcatggaaaccagcccagacctggctctccactcctaggctgtgagatcatgagcaagctgcctggctcctctgagcctcacctccctcatccatgcaatgggaatgatagtaactgcctcgtggattagttaggagaattcagggagaaaaggaaaataatcagtatacttcccagaggcccagtgcctgcaaaagaggtggctgtcatcatcattatatacaaggtatgagctgatttagtgagaccactctgttcttttcataatggtgacttttatctctgttattttttgttagagaattctctattaaagaacaagggacagtggggtcacttatttttttaatgcctccatggaagtacttagaatcaatcacacagtcacccaacctggaaaatgccactttcacaagtgtaaacgcttaactggaaactgggtttctaggcactgaccaacccagcactggggaatgggaaacacaggtcagccgagcccttggtatccagaacagctcccgcgcagacagccttcagccccatgcaggcccagcttttagcacctcaagacagcgagctgacatcttcatcctacctggctgagacgttggtgaaatgcatgtaggatgatatgaccactcctatgcgtcctttcccgccctgcaggagacaaaagatcagctgattttctctgaaatcccacagcagagatgtaattagaacaggaaaagactcactagtggacaaaacaatagagagcctgctttggtggtaaggccagcattacccacagccttcctgtctgggaaagtcagtacccagtgcaactggagtctctgcaacagggaacccgcacgctgggtgcaaacagtaagagtgggtgctaactggagcagctgtagaagcccaggagggctgaccaacacagcagctgcctgtcattttacccaattaggctggaaaaaactgtgccaggagctgcagcaattagcatgacttaattatccaggtcagacagaagtgaacgcctgcctgctcacgggctgacaatgatcagggctgcaaacacagctcagcatgatgggacatagattccagcttactggcagcactgccggcacctgagctccacatacaccgccgcagcccaccctcattacacataaaggaaccactgtcccaggcagaagttctggaaaaggactcactcaaaccataaccacagacaccaacagcccagcccacagaccagcaacaccagcaggagaagcagaaactattggacaggccaccttcacccagggccacagagtgccaccttctagaacatactcttacaacctacaacagcagattgcaaaccacagcccaggagctacttctgcccattacctactttcccacaacttgtgagctaagagttagttttacattttctaactattaagaaaaaattttgaaaagataagattccatgccatgtgaaaatgtgttgaagttcagatttcagtgtccaaacacaaagtttgactagaacatggccactcccatctgtttacctacatccagggctgctttcactctcactgcaggggtaggtttgagtatttgcagcaagaccacggggactgaaaagtgtaaaatacaatctggctcttttttttttggagacggagtctcacgctctgtcccccaggctggagtgcagtggcacaatctcggctcactgtaagctccgcctcccgggttcacgccattctcctgcctcagcctcccaagtagctgggactacaggcgcccgccaccatacccagctaattttttgtatttttagtagagatggggtttcaccatgttagccaggatggtctcgatctcctgaccttgtgatccaccagcctcggcctcccaaagtgctgggactatgggactacaggcgtgagccaccgcacccggcctaatctggctgtttttaaaaatatttgccaacccctgatctggaatcatataaagccaaaaaggcagggcctctaatatgtagctccctaacttcttgagaagaaactactgatcaaattcaagtcacaattctgataagcccagtcatacatgaaagtcacccaggagcatccttctctctgtcagtgaaagtcaagagcatgccttatagatactcaatgcgggcacttgatacactctttgcagctgaatcctggcacgtgcaattattaatggtatggctactagtatacctcttgcataaaactatatttgacagcaattcacctacaaagaaacaacacctcagccaaaacaggcacacatggtggtgacattcaccccattatcaatcacttttgtggcactatttatggatgtataaagcaagtatttcttttcttttcttttcttttcttttttttttttttgagacagagtttcgctcttgttgcccaggctggagtgcaatggaacgatcttggctcacggcaacctccacctcccgagttcaagcgattatcctgcctcagcctcccaagtagctggaattacaggcatgcatcaccatgcccggctaattttttgtatttttaatagagacgggcttgctccatgttagtcaggctgatctcgaactcccgatgtcaggtgatccccccgcctcggcctcccaaagtgctgggattacaggcatgagccactgcacccggcctataaagcaaatattaaaagatctgaagggacagatagaaataccacaaccgtacgggacttcagtaccccattttcaacaatggacagatcacctagacagaaaaccagtaagaaaacagggtactcaacctgcactttagaccaaatagaccttacagacatatacagaacattgcatcagaatacgcattcttctgaagtgcacacagaaagttctccagcatagatggcatgttaggccacaaaacaaaccttaacgaatttaaggagactgaaatcatattcagtattttttctttttttttttttaatggagtctccctctgtcatccaggttagagtgcagtggcatgatctcagctcactacaacctccaccgcctgggttcaagcgattctcgtgcctcagcctcccgagtagctgggaatacaggtgcatgccaccacacccagctaatttttttgtatttttagtagagacggagttttgccatgttggccaggctggtctcgaactcctgacctcaggtgatctgcccgccttggcctcccaaagtgctgggatcacaggcatgagccaccgcgcctggcctcaagtatcatttctgaccatagtggtatgaaactagaaatcaataacaggaagaatcttggaaaattcacaagtttatggaaataaaacaacatactcctaaataactactgggtcaaagaaaaaaagtcagaagagagatttagaaatatcttgggagaaacaaaaattgaaacacaacacaccaaaacttatgggatgcagcaaaagcagttgtaagaggaaggtttatggcaataaatgcctatgttaaaagacaaaaaactctcaaataaaaaaacctaatgtcaggcagggcgcggtggctcatgcctgtaatcccagcgctttgggaggccgaggtgggtggatcacgaggtcaggagatcaagaccttcctggccaacatggtgaaaccccatctctattaaaaatacaaaaattagctgggtgtggtggcacgtgcctgtaatcccagctactagggaggctgaggcaggagaatcacttgaacctgggagttggaggttgcagtgagccgagatcacgccactgcactccagcctggtgacagagtgagactccgtctcaaaaaacaaaacaaaacacaaaacctaatgttgtacctgaaggaacaaagaacaaactaaaccccaaattagcaaaggaaggaaaaaacaaaggtcagagcagaaacaaataaaggagagactagaaaaacaatagaaaagatcaacaaaactaagggttgggttttctgaagactaacaaaattgacaaatctttacctagataagataaaaagagaaaactcaaaatcagaaatgaaagagcagtcatcataactgatgccatttaagacacaaagaaacataaaaaactatgaacaagtacatagcaataaattggataacctggaacaaactcataaattcctggacacatacaacctactaagactgaatcatgaagaaacagaaaatccgaacaaaacaataacaagtaaggagattgaatcagtaatataaactctcccacaaagaaaagcccaggacctgatcacttaactgatgaattccatcaccgaaaaaaagagaaaacttcgctatggtttaaatattagccccctccaaaactcatgttgaaatttaatctccaatgtggcagtattgagtggtgaggcctataaaagatgattgggtcatgaggaaccttgccttcatgaatgggttaatacatctgtggattaattaactaatggattaaccagttatcacaggagtagaactggtggctttctaagaagaggaagagagacctgagctagcaccctcagccccctcgccatgtgatgccccatgcagccccaggacctctgcagaatccccaacagcaagaaggctctcaccagacgcagccccttgagcttggacatctcagcccctataaatattaatataagaaataaattccttttctttacaaattacccagtttcacatattctgttataagtaacagaaaacagactaatgcaaactctgccagaaagctgaagaaatgcaaacactttcaaactcattttacaaggccagcagtaccctgatatgaggtctttcttaatgaaatagtaagtatttaaggttttgcaggctgcaaggtcttgtttcaaccatccaaacctacccctgcattgtgggtggaagcagccatggatgtacgtgaacagatggaggtggccatgttccactcaaactacgtatggaactgaagtaggacatcttcatataatgttcatgtaaatacagctcttagctcacaggatgtagaaaacacaagagggcacgataggctcatggactgttacgttttagtgcaagctgcattcttttggacttggaattgttaacaaaaatcacagaatcactaactgcacaattttccatgggtattcttcaccatggactcagaaacaaaaggtatggtgtggatgaaatctcccaaaagaactgcaggccatttctggtcagtcaataaccagggtgtggaggggtgaggaggagactgcacacacccacacaaacacaagcctctgcatcacacggcagaacgggaagcataggaggaccgaccctcactctgttcctgcccaggctgagacaggcccagctacgctagaaattcctggcatgtgtggaaggaaacgcgcattctgcaaagcaggcggatttcgccaaatgtcagcgatttcacccccgcagtgatgatgatgaacttctgttaacatcgacatcagcaatttcaaattaaaagagggcttatctctcagggcacaatttctaagcgtttcaaaaatggtttacatggcaccagaagagggcaagccattagcaaatcacttctgagaagtttcaacatgttcccatgaattccactaacaagagctgtccagaaagccgaaagttgcttagcaaaaggatgcattttagaaagctctaggtggtccccactaggacccatatgttttaaataatctcatcatttctttcaatttcatttaaaaaattgaagtgaacaacaactaaaatggaataaatggccaaggatggcacttttcaagtccagcaactccaagagacttctgacaatgcagcaggcagcaggtctgggtgtgccctagaacctgcactttccacaggtgctgctgctgggcccaggctcacagctcaggaatgctgcttagaacagcttgctacgtgatcctgggcaatgatgatccatcaatatcaggctcactgtgtcaaaatcaccacaccaagcctgaaaagcataggttgttttaattaacaagaattatatttatttaaaagtccgtctgtctatctctctctctctctctctctctctctctctctctctcttagtttgcaccaaaacacaatttgggtgaaggatccataatctaaaataatacttgaaaagatcaggtcatcacggacgatttggtggtcctaatgggtgtacctgtccatttggggggaaaatatgatcaagttagatgtgaggaaagagacaacactagagagaagcaaataacatctgtgtgccccgatggaagttttctgcacatcaagtggtcatcatatgccttacagctgtaaacaccatccacaagccagcctacctagtgcctttgcaggaaagatatactgagagtctaatataactcaaagggaagcttctttcaaactaaattccataatacaatggatttctgtgcagttttttagtgtaaaagagtccggaagaaaaaaaaaaaaaaaacttctatcttgaaccgtcaacacttcctagatactttgatggtcctaagaatgctttgtcaaacacacaaaatagggagctgcccattaatgaacagtgaccccagcccactggctacatcctttcccaaaggattcctccctgactcaaggtgtgactggaataagagcttttctctaatagtaagtttctggcaggagggttaagcttcacacacttacccctcagtgagtttgctttcagtccaacccctttcaacaacaatcacatttgaggagcagtacaaagcagttgagaaaactgggaattaagaggaaagatcccaggaggtgggaggaggaagcatggaaggagcccgatgcagccaggaggaggagtgcccaccagctatgcacctgggctgctggcatccaccaaccctgctggggctgacagacagacagtcccggccactctgtgaagatgtacaggccatgtctgcactgcaatggctccacgtggaaaggacaacacgtttactgcaatggcatcatgccatcatctagtccatcaactgattaccataactcaagatggcatggaaagtctgacacagtccatctgaaaagggcatacatagctcttttgaaaaggagggctttccatgaaaaataaaatttaataaaaatgaaacgatttgctctcataatcgtggtcaatttggggtcaacagtttcaaatgtccagctacacattcagggaccacaatcctataaattctaaagccaaacttggggaggtgtgataactctgtttccttctttaagagcaagtaggaaaacctaaagacaaacccataaggagcacatcgcaccagctcaaagcggaaatgtgctcagatgcagcattggtctccatctcaactccaaaggctgaagcccagccagacccccaaatgtgagagggggcgcactcaccctgcagtgaatgacgaccacatgctggaggttgctgttcagccaggactcctgcgccttgcatatggtacacatcttatccaggggcggtgcgtggagctctggccagcccacatccatgatctgcaacaagaaaggggagcttcctcggtttccatttcctaaaaccttctgaggccatctcacaatgacttctttcatcatcagtacatttcatttgggagtaaagaacatgctgggtgaccctttcctaaaactcagtgagcatgaggatcaacttccttcactgggaagaaaaaataaagcattatactgcccatgtgatgcctcttcttccaggggctcatctgctcttctgcagctggggtgacaattctagaaaggtctttgagttgctgatggtgcaggttgtgtggacggggctgcagtccagtgagatcacaaacaggagtcctaggcccaagctgctgccaaaatctccccactcgggttaaaatcccagtttggagagtgcagccagccatctcccacaccgtgcggacaacacctcagagacaatctcctggaaaggcagcacttaaggaggaagcaccttcaaaactctaattaagtttggtgcttggacaaagaaaatcaccaccatgtgctaaagacacagtgactcggtgcagaactgcagctctgagcgtcctgaggcacacacaagtccacagtggcccacagtggccacacgggggtgttgcttttcctttgatttccttttgtcagtaggacgaggacaaggagctctatcttatgatgaaagtcgtagaaatagtgtaagactgttggaaatttcagaaagttgccaggaagtaggaaaagtcactacccctgccaccactcaaagataaccactgcaatgttttcatgaatcccttagtctcttttctgtatacatttagcataattgagatactattatacataaattctatactctactattgttaactagtattaaaataggcaacttatcatgtttctgctttgttactctaatggctgcaaaatatttcaacatatagaatatacatacatatatgtaccacaacttatgttgactcagtcttaaaattatcccaaactttgctgttgaaaatgatcatgaagggtgaggggcaaggggaatgagagcattaggacaaatacttaatgcatgaggggcctaaaacctagatgacaggttgataggtgcagcaaatcaccatggcatatgtgtatctatgtaacaaacctgcacgttctgcacctgtatcccagaacttaaagtaaaatttgaaaaaattttaaaaattttttaaaaaatgaaaattatcatgaaaggagtggattagtatgaccataaagagatactagcagaagagagccccatgctgatggaaatgttttgtctcttgtttgtggtggcttaacaaatctatacacatgatgcagtttagatttattctatacatatatttgttatagatttgttccatgcatatatatatgcagtatatatgaaagatcccaggaggcgggaggaggaagcatcatgtgtatagatttgttctatacatatatattagtatttatcatctatacacacgatgccgagaaacacacatgtacgcaaaaccagggaaatgtgagtgaggtccgtggactataccaatgccaacttcctgacctagatatttcactattagtgttgtaagattctcccactggaaagactgggtgagaagtacaggagatctctgtattattttcacaacttcctacgaatctctaactatttcaaactgaaaaaaaagtaattaaaataattgatatgaacaattcctaatactccttatcaagtcacattccacaaagactagtagcaaattatttttgcacaaaataagcattgtttacattttacaaaatgcagaatataaagggatgaactctgtacctttgggttaagcttcgtaaggtcatatctcttttctgaaaggtttaatacctataaaagagaggaaaaattgccttgcataaaatagattttaatattttaaaaattaatactttaatttttatttaattttaattaatactaattttttaaaaaaatatctaaaatcttcacactcacaaatcagggggaaaaaaagcttttagacaaatccttgacatcagagatgaaagcagaaaacacattgcatttttacatgatgtttcccttccaggtaccgaggatcagaaaagattgaaaaatacagacttgtgtggtcacagaataaaaaacaaataaaataaataagataaggatggcatacagaacccttacacataaagtctatattctacttcttcaactagtattaaaccaggcgatttactgtgttactatttttttttaattctcatggctacaaaatatcccaacatataggatacacacacacacacacacacacacacacacacacacacacgtataaaatatataatataaaatatatatacacatatatataaaataaatatcacggtcttgctcctgacaacacaaactgacccgatagagaggtggtacatggtggggaaggctgtccctcctctatggcctggtggccccaggcctggaaagggctgagttcatgcccggccaaaagccatggcctaagttcactgaaaaatcacagccatttgtggaaccttgctaaatactcaagtagttcaaaatgaaaataataataataataataataataataataatgttccagcagcaaggagccttaaaaattaactaaacgtccctctcacttcagagtcagagatgtgaggaaagtggagggtgggggcttgtcctggtcacccagcaagccctgtttatgacaagggggggcgctgctttgtgacccacagttcatttctaaccctgcacaagaaaaagatccctgccatagccattttgcagggagagctctggccctgacaaggccccacagacaggtgctggccagggctccaggccctctgcatggtctctttggggaagggggactggggaagaggggaaggatggccagagaggagactcaggatgcgctgaccagcctgggagtggcttccaaaggaaggagccatggtcctgcagagcacaccgcctcagtgatgaaggaggaagccctgaggaggagagggcccctggtgagaggcaccaccatcaaatggggcttggccaccacttcctgtccactgccaggtcacagacaagacgggcttcaagaccagaaagaggcaggagcctgagtgaatcaaggatcggggaggggtcaggacccaggtagcacctgggccagggctgctctggcatcagacggaggccacatcctactctgccacttgggtccacctctcccagccactggtgccccagtcattggagcagaccagcaaggaagacaatgaacaccttgtaggtttgcagggcagattagctttaccacagataaggaggcctccttactagagataacaaggcaggtagagagagggtgccagggagctgtcattcaatcccattagtgactgttgacagcagaaggaagtcagcctccacctgggctaccaaccatgggaacagaaaacaaggggccaatcagagggtgagagatggtgagaggctgttctgtattattcctcagatgtggctccaccatcaactcgacaagtgtgttttgaaaatcaagctgtctccttgtctccagggcagcccctggtttcttgggtgcccacctaatttgtcttcctaatttctggctcaggaggagagtcacaagtttgtctcttgatacgagggatgcagcatgggagcgcaagggtggctggctggggacatgtcccaaggcactggggagccagcctcactgatgagtgcaggacaaggcaacagccatccctgcggtcagcagtcgtgtgtccctgaaagctacctacagagacacataagtctcctccccaggcgtggcagcagagagacagaggacgaaggcgccacggacagctgtgtgagcccaggcccttgagcttctccctcatgtgtaaaccagtgttctgtgagtgcccatccctacacagtgcctgctgcagagcctgcccaaaggctcccagagccgcccaccgctcaccaggtagttgtccccgtgcttggacttgagcatgcgcgtgacctcctgtaggttgtgcaggtaggactcctcagagcagccggcagggaaggacacagcgatgatgcgctccgtgatgtaagtgaggtccagcccatggccctcctccatggtgggactcaggatgacgggcctgcgagagagcagtgggcagatcagaaacagggtaaggaggcagcagacattcatcctctaggaaaaaggtgaagacgacggacactcatcccctgggtgttcacatcagcacctgggcggccagctacgggaatttacagtgtgtgcagcctctgtgctgtgttcccataacagcgggcagtgtggggaggggcacaagattgaattttcctagcagggcatgacggggtaccgcaagctgcggtcagggaacgcacagagagaaagcaactcagagcagtgacgcatgggctcaaatgcaaaagcacgaaggcgggaaggactctttgtggttacactgggagcaggaacagggttccaggcgggactcctggagtgggagcctcaaccctgctctgaggtgtcaaggtcggcacgagggggcaccgggagggggccaggaggaagcggagatggtgtgagcagaagccaaacatcagcaagcagctcctcgtgtccgtatgcggcatcctgggggaggtgcggccaaggatgaggctggtgaggtggccagctatggtcgtggaggaccctgcaggcccaagaaggaggcaggacctcacgtggagaggggaccagctggggcataatcaaagcggcctttcatctactgagtagcaactcagcagactcctatcagaaggctaagagctccatggggccccgctgggaccccacccagctagccacaggccaggtggatgcagggtagaatgtggggctggccacccaaccaggtgcccaggtggccagggcaggcccccaagtgtgagatgaagactgtggaggagggaagagggaagagggcagaaatggtcatgtcatggccagcaggctgaggacttgggcaggactggcagtgtggagtcaggcacccaatgtgactggagacaagggcctcccacagaccacagattctccaccagccctgtgggccccagggaggcctgagcccctcccaggagtgctcctaacattatggctgagggtggtatccaggaggaggtggaaaaggttccagggagaggggatggggttgaacccaatcggtgcccccatgaggtaaagccagaggcatgggtgcacgggacgtgtccttaagtccctccaaagtgctgccaccagctttggggttttcatttttactactcctatgtgtttctctctttcttttaattttggaaaaattcaaaaccatataaaatggttttgcaaacctccatgtacccacatcacctaacttcaaaattaccaacacacagctaacctctgtccatcaatatctccagcaatctcctccaccactttgattgctttaaagcaatcccagatactatgtaatttcatttataaatcttgcagaatttatttctaaaagataagggcactttttgattaaaatgtctacaatgccattatcacacctcaaaaagaaataataacatcaaacatccaataccatacatttatttttatttttatttatttttattttttcgagacagagtctcgctctgtcgccaggctggaatgcagtggcgcaatctcggcttactgcagtctctgcctcctgggttaaagggattctcctgcctcagcctcccgaatagctgggattacaggcatgcgctatcacacccagctaattttgtatttttagtagagatggggtttcactgtgttggccaggatggtctcgatttcctgaccttgtggtctccccacctcagcctcccaaagtgctgggattacaagtgtgagccactgtgcccggcccatacatttattttttaaggttgatttgttcaaatcagcatccaaacaattcccaaggattttgttttctctaccttatttatcagacatggatttcattccaattcaaatgtattgaacactgttagaacagaaataaagcgcttcctacggtcatgaggatccacagtgagtgcctctccagaagatgctggctcagggcccccctcatctgctctaaaggggctcttgccagcacaccctggagtctcccccaaaagtgacacttgcacaatcaggcctcagcagtgcaattatttattcaaagacaatcacaggtgtttctaccacctgggcttctgaccctgacacagcatttagaaacggacagaaaacctggcctgtatcacctttgattggcaatgtttacaaccaaagcagaaattatgatttctacagaagaaaatgatgccatgcccaagtttcctctgtagagagctgacctacagccagagacacaggaatgcatgacccacacagacactcaccgcagaggtttatcacggcagagagaactggacagcgtggaactccctggagcctgcaaataacaaaacaagggtcattttgaagtttcctttcctgccagtctacatgacacagacaccactgagagggaacaatgacagccgttccacagtttaatcataaacagcaagtcaatcgtaactacaagcccaccttatcacctcagaagggtctacaccatgttgtgtgattcagctcaccagaggacgcagtgccactaaccagcatcaggacgggctttcacaggagccagtgaggccaccctccagtcagggcaaggtaggcatcgcttggcctgcaaacagtgccctgccctccaacacaggaggtgccagatgacaccagcgctatgactatcatggctgctattatttacttgaaagaaccaattaatgagtgactttcaggaattctcagtcatacctactcttttttaaagagcctattcaacagggagaaaagactcgggttataattactttatagttatataactcttccttgtgtgtaagggttgttatatactatggtgacagagatctactatttcaggaaaaatgcccagcaactgtgtgagtaagaaggctcttcaatatttcagaagtgaggaaattgggactcaaagagggaagcgatcttgtcagatggcagaggtgaatggggaaacccagacacccactacagggctccctcaaagtctctttctgccccaagccaggtaatgctgcacacaggagcccagagacccccgagttggggggacacagagcctccggcactcctcctgctccccgatcaaagcaggcccacagacaccaccatcagaggcatcaacacccccgatcacacctgggatcccactcaggcaggtgcagctcacctggactccttaggcaagaaatgaacagaaaacaaattctatgtatatttcggagaccaacaatacagatgttttcctgaaatcataccaatgcaaagcctagcgccaattccaaaaccacagagatcatcgtctcagcctcccaagacaggggcaggatctaggggcgtgctcttcagttctacaccaaggtgccggtgagctcagccctgggtccacctcctcattgtttttcccgggaaagccccttggccactccacttctttgtctcctgccttttgaagtgagaatagtaacagacagggccagtctcatggagctgtccagggattcactgaggtaattctgtcaatggcttggaatccagcctggcaccgcatggccactgcccgtgctgggcagacctggtcaagtgaagtcccgtggtctccagaccccgcccacccctgacatctgagctgcaccccctgctcatcccctatgcccacaaagctgcaggaggctccaaacatgttcctctgatcttctcaaagccctaacccaaagcctttcacagctcagactagacagctacaaaacagaagactactcttttgcctagtagagcagcaaaaataaaaatcttgaaaacattttttaaagttttgatgaaatataaacagatgcaagatttcagaggacaacttgtcagtgtgtataaaaagtatttagaatacggccgggcacagtggctcacacctgtaatcccagcactttgagaggccgaggcgggcagatcacttgaagccaggagttcaagaccaccctggccaacatggtgaaaccacgtctctactaaaaatacaaaaattagcctgcgtggtggcgcacacctgtaatcctagctactcgggaggctgaggcacaagaatcacttgaacctgggaggaggaggttgcagtgagccaagatcgtgccactgcactccagcctgggcaacagagcaagactctgtcccaaacaaataaacaacaaaaaaaaagtatttagaatacaatcccagagtaaactgaatgcactaaaatgaagtctccgaaaaggtaaggaaatgatacatcaaaaacccgtttaggttaattcatacaatctgtacatgtaacactcaaattcaagcagctcagatgcaatcctaatagagccaatctcattatggggaaactcagcttaaccagggtcccatttaattcaaaaaagtattcaataagccaacatctcaggggagaacagcaaggagtttgatcgaccatggtcctgggtcttacatgaacccaccaggatctgactatatgtgtcccacatcttcaccagaccacgcatccaaaatacagtgactcccattgcaatgccatgctggagtacactggcccagttcctacaagtgggctgtcgcttcagaccctatgtcacgcttatcatttgaccgtgaaagactggcacgcaacttaacatataaacagcattatataactcatggggcaaaactatttaactctcacatgacacatcattccaagatgacaaccacacaaatacgtgactgctcactgccggcaccaacgtgatggggtaggagtgtcaccgtccctcaggcggggccctgacggcaggagggaaggagggaagggtcccagaaggcatgaggactctgctgtccctgacggaacccagggcccatttcctcagctgcagagtgagaagggcaggtcagacagacccacgggatcttctcaatccaatagtctctgaatccaattcagcattataggcctcgatacagtaactccaatgttcaaaccccgaaaccatacaaattgcaaccactgccaaaaaaacaaacaaaaaaaaccttttaaaccaatagttatataatttctaaggtcaaggccaatggaggaaactgtaatctgtgctatcaccacagggaggccccagcacctgagctggtgaaaagtcagaaagtgttgaattgcacaaagttgcttacatgaagtgttcggaaatgcagggttcctgtaaagtgtcccagcattgcccagagacaccccttccttaacctctgtattgggaagaggggcaggaaggaggaattcagcccgtcccccaacatacccaattttctatgtaagtctacatccacttaaaatcgaggcgagaaacccagcacagctcagggccaccctccaaaaacacagacagcttgacacccactcaaatccccagccccagacccgcatctgtccacctcatgcctccagatgtgcaaacacaggtctggccacctccaaggcatgtggtgctcagcagcttccatagcacaaccctgaagagcattgcacggagcccagcagaaaccccagtaagcagacatcaccacccctatgttacatgttacaggttggtaacatagggatggtgatgaggaaatgaggatttggtgggcggacgtgttggaatcccacagttaagctgcagtagcaccttctgacaccaaaactctgttctccttccatctcctggctttcaggtggtccacaccctctcctgcacaggctgcccctgaatcacatgaacatcagtgaggataaaagactcttgcttgggggagctgttctagccccgtgccaaaaagggcagagaaactatggcccttccatcacttccaagtcagcgtctgagatctcatgtgactaaaatccccctgaatcattcaggggttaaatctggaaccaagtagaggacatgcctatgacaggtccccctgacacactggggtagaaccccctcagctgctttgacttggactaaaatgagaaccaggccccatactgaactggaactgccgccaagagtttctgaaatactgtgcttgtcaagaggagactcagggatacaatgtcactgtaagtctttatttgaaagtaaacaatacacctacacttgggttgcacaaatctaaaccctgtgtgtgcaccataatgcatttcatgactgaaggatgactgagaaactaacttgctataggttatattaaacctggctcctgagaaacccgaaatcctaacctcatataaggtttaaaaaactctctctacttgtaggcaccagtcctgcaaatctgtgttgcaaactcactctctaggtgtttttttcttttgttttgttttgttttgagatagagtcttgctgttgcacaggctggagtgcagtggcacgatctcagctcactgcaagctccacctcccaggttcatgccattctcctgcctcagcctcccaagtagctgggactacaggtgcctgctaccatgcccagctaatttttttgtatttttaatagaggcaaggttccactctctaggtgttttgaaaagagagctgcctgctcacgtcctcagaagccttcccaagctgtggtttccttgtggaccctatcgccaatgtcaatcaaatccaagcccttagtgattagagtttccatgagatagaaacacaagttgcttcttttgttctcttgttttccagggtgaaaaaacccagacagcaaagcctcccacccagcctctgcccagcccatgcctccctcacctgtgtccctgttggcatgctcttatcacagccttcaacacccaaataagagaaagagaaaagggaggcccaggtagaatctgtggttaaggttaaacctgcaaaaggtaagcctgcaaagaccgccctgttccaggctgcctttttttttttttttttttttttttgagtctcactgtcgcccaggctggagtgcagtggcatgatcacggctgactgcagcctctcagtgacttctcgggctcagatcatcctcccacctcatcctctcaagtagctgggactacatgcatgtaccaccaaatacggctaatttttgttttttttttgtagagatgggggtctcgccatgttgtccaggctgctctgacgctcaagcaatccactggcctcggtctcccagagtgctgggatcacaggcatgagcttccgtgcccggccagactgctctttagaagcattttccttctacaggtcctggagctcatcctggccacgtgacaaactggccccatgggctcaatgaggtcaatgaggtcactaaactccctttctcttccggtaaaatgacagctgtggatcaaacacttggaggtcatcccagtcctggactccctgagtcagtgagtgaaaagtgaggagaggcattcctcagataaaaaattagatgcactgcctggagggtcattctggttccacatatgtttgtttgtttgtttgtttgtttgtttgtttgtttgtttttgagatggagtcttgctctgttgcccaggacagagcacttcctagtgtgtcacagcagtgggcgagagcagactaagcggcaggaaggcaaaaacacctcttttgggagaaagtagcctagccttatggcaaagcacacaggctccacatcaggcagtctgggtccaagttaagggtccaccgcttggcacctgcagcctcaggaaaggtcctccactcgcctaggcctcatctccctcctctttccaggactgtgcgctcatgtcccgacctcaccttggagttagcaatccacgcatggcacactagggcaaacctgcttttcacagtggccctatggcacatggtcctgcagtgaccctacagttctcagtcccgctgtgccctcctgcagggcgccatcctgcagtgcgctatcctagcacaccctaggcttcaccctaaagaccctaccctaaagcctcatcccatcccacagcgccccaccccaccacgcgccatttgccaagaccagcggacaactctagaacatgtgatgatgctcgctctagtatctctatgagaaccatgctttccactgtgaactgcggcttcttgctcaggaggacagccctgatcagaaggaagacctgagcttcaaagagtctttctgcacatctgggagcagaacaagggaagagccaagcacatccacctaaagaaggcagagaagacagcaggaggctgggggccctggcagaaggaggggaggctgtggactgctgggactgaaagggccactggagattccccaaggccactgccaaagcacatttccagagcagccatccctggagctgctcccttggctgtcacatcaacaccatggccaccacccgggcaggagtaagcacactcaccagaaagccagcagcctcctctgcactcacccatgtggggcatgcagagggggagcacagggaggagggaagagtgaaagacacaggccccattccctctgcaacaaaacttccttgaagtccacgacgtcccagggagacatgggatcctccccaggtggggtgggatcccagctggtttgatgttcctctccacagctgaggatctgggagcccccacctgacaggaaggttaatttcgagacaagcttgtaatcaatgagagcccaactctggtgggaattcgatttttttttttttttttttttgagacagagtctcactctgccacccaggctggaatggagtggcacgatctcggctcactgcaacctctgcctcctgggttcaagcgattgtcctgcttcagcctcccgagtagctaggattataagcacccaccaacacacctggctaatttttgtatttttagtagagacagggcttcaccatgttggccaggctgctctcgaactcctgacctcaggcaatccacccacctcggcttccaatgctgggattgcaggcgtaagccaccgctcccagccagaatttggttcttttttaacctatgtccttcgactgcttgtttgaacaaatcaacagtttccaaaacctcacagtatagtaatgaaatctgaaatcagacagacctgggtgtgagtcccacaccacctgccagctgcagaatcttgggccagggcactcatgagcctcagtgaccccatctgtggagcgggacaatgatgtctcccttgtgagactgttcacagaataaagacaaaaatgtccaatgcctgcctgagactaacaagccagccttgctcactgcagattgtccctgagccttgcactgtatgttgccgatacatccagttaaactgtacagaatctctactgcccagggaagtcactgctcgacgttcagcactgtgcgcctggcacgggtgcgtatcctgcaggtggaaggcagtgtgaagagtagagtcagctgcagcaaaccaagcctatgtcgtgcaattaatgctagtgcggcatttcaaatggagcatccttcactgacgtcccattgccatggggtgaaaggcaggtgctcagcctggtcctcagagccctgggtgagccagcccctgcctcctcatgtgcctccctcactccctgtccctaccttacctgctgtgcttcctcctgccccaggttctttgcacataccacacagtttagaatgctcctcattcatgtatcccagctttacctggttaactcctgtgatttctcaagcacttggctcagatggcaacttccagcaaagcataatctgatctccctacccgacctgagtcatatgttcctttctactttggtctcctttttgttttgtttttgtttgtttgtttgagacagggtctcactctgttgcccaggctggagtgcagtggggtgatcttggctcactgcaacctccatctgccgggttcaagtgattctcctgcctcagcctccagtagttgggattacaggcgcccgccaccacacccggctaatttttgtatttttagtagagatggggtttcaccatgttggccaggctggtcttgaactcctgacctcaggtgatatgcccgcctcggcctcccaaagtgttaggattacaggcgtgagccaccacgcccagccctggtctactttactgtgccgaccacaactgcaagaaaacaactaactgtgaattctcgtctgagctctacagccccctcccatgcggatccagcagaggcactggcagtctagctcccagaggtatctctagcctctggggccgcactctgcacacaatagccacccagcacagcagtctgtagaatgaagaaaggaagaaacgaaccactaatcccaaagtggctgtggagtcatctggccatctgaagaggcatgaggatgctgttattagatttcaataacagacagctagttagctttagttttgggttaacaaaaataaatgtacccattgactttaacaggcttatctaaaagaagaataggatgaaaagcagtgacatctgctccttcccaaggtcataacatggaataactggggcctatttaggaagacagtgcccacagaatagcaatgtggttaagcatcagcttgacagctcggtaaaagctaacagtgtgacttggatacacatgactataaactgtggatttttctcacccactgagctgacctcagtaccctgtgcctactcaagtactgaaaacggtaatacacattttttaagtgttttctcacataattccccaagactaccctttaagaagcagtccccttagcatctctgcctccctaagacccaagaccctggagcagaggtgaccatccctcttcccaggggggctctgaccactggcagaaagcaggtctccactatctgccaggcctctagctacagcccaggctggccaaagaagcagtaactagcactggccctcactcctgcttacccaggggccaatatgggtgcagggcagtgccaggataggttaaacatggcaccccgttccctgcctctccttgtcctcactggcttttggtgaagaggaaagaaaagaagcccttggcagggcatggtggctcacacctgtaatcccagcactttgggaggccaaggcaggggatcacaaggtcaggagttcaagaccagcctggccaacgtgatgaaaccccgtctctactaaaaatacaaaaattagccaggtgtggtggcaggtgcctgtaaacccagctacttgggtgactgaggcaggaggattgtttgaacccaggaggtggaggttgcagtgagccaagatcatgtcattgcactccagcctgagacgctgtctaaaaaataagaaaaagcagcccttttatggacgtcatgttaggaatcccagcaaggcctaagcctgcaaagagaatatcagctcccctgggtgtccccagggcctgtgcgctgctcctagcagcctgaccagccctgaaaactagcagtgtaaacagctctgtaaaaagaaacaaaaggccaggcacagtggctcacgtctgtaatcccagcattttgggaggtggaggcaaatggatcacttgaggccaggagttcgagaccaacctggccaacatggcgaaatcctgtctctactaaaaatacaaaaaattagccgggcgtggtggtatgtggctgtagtcccaggtactccagaggctaaggcaggaaaatcgctcaaacccaggaggtggagattgcagtgagccgagatggtgccactgcactccagcctgggcaacagagcgagactccatctccaataaataaataaatcaaaagaaacaaaagccacggataaatccacaaggaagcaggactatgaacagcccggtgacgagagacacagatcacagctgccgggccatgtgtgaggtgaggacaattaaacaggttgggctgagacacctctgcacattctgtttttgtttcaccaagcaaatggagaagaaataaatgtaaaatctttttcaaaggcaacaacctgaacaacattcagctggcaaatttcaaggcatttatttgttcatccttcattgattcctccaccacccagcacatacgacttgggggttcagcacacactctttgtaatactaatgcctgggtaggcagccagctctactgctcgagtaagccgtctgatcttgggaatttacttgccctctgtgtgactcagttttctcatctggaaaagggagacagaaacagcattcttggaaggattaaataaggaaacataaacatagggcttagaacagtgcctggccagtaataagtgccaaagaaatattagctacttattccatcatcttatttctgtgtcaggcctctgtgaggccctggaaatgcactttatccacaagttattaggatcccccttagatcacaaaaccagctgtgaccacaatgcccatttaacagtaggagaaacaatgctcagagagggtaagtgattttcccaaagccacacagttaataagacatttttttcccttccagaacaagaataccaggaaccaattaattgtcaggattgcccaacttgattttctgcttaatgcttttaaacataagcagcaatcgttaagaactgccagagaaagtacaccccatggagggtgggaaactaaaataaagtcatcttgtcattttaccttcatgttcaactatgagaaacaacagactaagattgtatctctatttatttgtaacgaaatagtcacaggatcctgcctccctggccaggagctcaggctggtttggaaccatatggaaggaggcagctcaggaagactggcagcagggagaggtaagcaacactcagggaggacacagagatgtcagcatttccaaagaagtcggaagctcccctttgctcttctcacaaataagtttcccaagaaggggcagatggggcggatggttcttaggacacaaggtcccaccgaacatctgcagcattgaagtgaaaggggaaaaatgacttggaaatgccccttcactgcaaagcagccagtaccggaggccacagaggagggtggccagggacagacaaagtgcccagtgccagcccagccgagaggcggcacgtggggagttgggaacttactgtgctgggcctgggcagggaccaccggccagggctgcttttcccttccagaaacagctcctcctacgtttcgctccttcccctgctttagtcaagcacacccctcttcgtgttaatgtctcggcagctctgggcataaaggaggcagctggaatagcccaccaggtgggagagcctggtgagtgtgggagtccccagaaccacagccaggagcagctggcaggtgtgcccggccccacggtgagcacgcaggcatggagctcacaggacaatgtccgcccggggctgagggccagcctgccgagggccagcctgccaagggcctgagggacaggaacaagaacagcgctctccgggagagccttctgaccaggaagctgagtggctgtgccttcctggggactagccactagggagaaccgcctctcaaaagttcccccaggaaaaacaaaacctacttcgagctgctgggagggcaggttactcacctctgtatcccaggtaacagatgcctgatgcccactggccttcctccctccctctttccttcctctcccccaaccccattctctcctttaccacttccttccttagttcatttttgctccacttcattccaaatagaatttgagatgactcatcgaatgaattcaacataactaaataaaatttttaaaataaaaaccaaaccaataaacaagcacaaaaacagggttaaagacaagagtggccaggccagagagaaggaaaggtatgcagcgaaacctcagttatgggaatgaggcaccagacggttctgagttacaaaacgggagatggaggccggatacacggcagatcttggtgacatagagtcccggacctgcccgaggcgggtttatttcctcacttagcactcagagctaagaggaagggtggccagcccgggccacatcgtgtcctcagctgttagactcacccaggcagctgtttaaactgatctcactgatctcatgactacatggtcagtcacgtccctttaactgacagggagatttgtgtgtgcttttttgtaacatcttacatgcacttacattcttttatttttatcacttatttcataacgaaaacatttcttcacatagaaaagtggaccaagggaggggaggtggggagggcctcattgggcccccagcataaccctatcagtgggcagggtgttctgggggcgcccattccactggaaaccacgtggtgtctccttccaggctgaacacaaacagggggccccagtttataactagccaggggtgcactgctcagaccaggctcagctccacaaggcagcctgcgcttcctgccacctgcccaccatttggcaggggcagacacagcagtgacggcagggggtcaaaataggaccacctgtccctttactggccacagtcatcagacccggagacactaaacaggactttaactcctccgagcattggtttccacctctgtgaaactagctgacaacaccaccagcctcccaggatctctgtggggactaagaagatgcctcaaggcaccaagcccaagccagcagcactcatcatcagccctgggggagagaggagggttgcatgtgttgtttccagtccaactcccgcattttacaatggaggaaaggccatggggaggggctgctctgggggggcaacagctgggcagggtgtggcaccctgaggacaggccagtttattccttacttcatggtgacagaaaacaggccgagccctagagagccagctctctcaaagtacccccaatgggagtgtcctcaactgcaggcagcggccagccaggcagagccaggcagggggctcccatccataggcgagcaagttagcaagggcggcctgggagggaagtgccttctctagaaggtgacaacattgttaatgagcccgtgttaatgtcagtcatctccggagtctgaaagtgccctgcagcaggtgggaggggttatgtatgctgagtccactctggagtatgccctgcagagctgcgttctgtcctgttagatgtcccacccaaactcacacagatccccctgcagagagcctggaaaccagcccctcagggcacagcacaggcatcccaaggacagccccaccaaacccccagcatacagatacctggtcctgtccacatgggatgtcgggggtgctgacgggggcaagacccacagatgctgaccaccatgggccacagagataggtctctggccctgcagccagctggttccatacaatagctcaatgtttgcaaggctgagggaagggcctaattcacccaccccagcctggccaactctgatgggcaaaggggctgcccagagaatgctgagaggatcaccccaactcagaccaggaccatacctgcctccacacccagaagggcacagcagggcttttgctttagaatgaagagctaatgaattgcactgacactgacagagcagccttaacctggagtttatcccacaataatcagattcatatggataaccctggaaacaacaagcagagagggctctgagcagccctgcttccctttcatatccacaaatgcaaacaagtatttgcaggagggctagcccatttcaggcactgcagggagaatgcaggtgtgacagaggggaaagaccaggatggactgaaaactgaatggatgagaatcctgtcctggaggtgctggataagtacacatttaagaccccataaaggagagagaaggcagtgccagaggtggcggcgatgggcacctgggagaagaagagctcgtctccagctctagaaaccacggccactttgcagatccatcagggcagctcttgggataggccaggatggctagaaagcatctgatacaaagtgggcgcctgtggcagaggtggggcaggaggagcaaattccttcagaggacagagtctgggcagagaaatggaggcacactgcgtgtggtgggtggggcagccaggagtgacacacgccatgctcacaggatgcatgagaaagaggctcaagcccgggctcaaggagcccaaatgccagatgatgaatccatgacgatgaaaggtgtcagaagtttctgcataggggagtgacacaatctcaattgtttttaacaaggtttagtggtagtagcagcagcaagattaatataaggggaacactgggcagtggacgacataggtggaaatgtcaggcccaagagcagacagctgctgacctggacctcatctgttagtggcatcaggagtggctccagcaggctccaggagcccagggtgcacttcccagacatcaggtcggaggttgaaatcagcaatggggggagtatttataccaaagaaatcagcaaacactgccgaccgagcttttacctggaaaacctctattaaacattcaccagcaaccccgtgatattcgtcctctagaagcctcagattccccacctggggaatgggggtggaaatggcacataatgcagagttctaggaagatcaagtaaggtaagcatgcaaagtgcttaatactgtgcctggaacaccacacatgctcaacacgtgccagcttttactagtatattacattattactattggggcaatcaacggaggccaggagggcatccattcaggatgtgaggagaaggaagacaaggccaacagacccaggtcccctgaagctgaggaggtaaatgatgctgagacagcaacagggaacgctcaaggaccagcacgtataggtgcaggcccggcaagcacacacacaacacagcccacgagacattcgctgccccacacctgctgctcacctcagccaaccccctccacatctggagctccaacagtgagaaccagctgggtaacaacaggtccccattccttaaggacgctttcagctcttcctccttgagtgtttctcagcccttttgaaggttatgagtattagtgaatgacattaacgagactgtcttccaaggactcccattgtgtaggacaattcagtatcatagtaactttctccctaccttacccctttcttttaagaaaatgataatctctctttataaatgtcttttaaaatattcagtgtgggctcaattcttcccatatcattatccctggaggtgtgctggtaaaggggaggggaggggaggggaggggaggaggggaggggaggggaggggaagagaggggaggggaagggaggggaggggaggggaggggagaggcaaccacctcgatgtatcctctgtccattcctgtggcgtaaatactgccaccatggttcattctaagctagctgggtaattccactgaagatggagtggggatgtgtgagtgatctcactcaattcctcactaaaatgttctctttttataggtgtggaaatgatgcccttgatatctaattgacctgatcagtgctctaggccagggcctacagctcctccccacttccacacacgtcatggataggcaacctatctcagagacaggcccttctcactccaaatagcttcaacagcctccaagaggccactcctcctaatcactctccctttcatcttcccactttctccactaaattaacttcgttaccacttctgaaacccaagctatcaaaaacccatcaccaccatggtttcctgccactcaagcacctagaatgctccctatttctatagagctccaagtcagtcccctccaaccactacacactatggtgccctccatccatctaccaccactcatcctttctgcagaggcagagcgtattacagttgaaggaccatgggaaaggacttggaggcagggagcctgactcaaatcctagctctgccctacagacaggttactctgggtagtcagtgagccctgtcgcctcagtgtcctcatctgtaaaaacagggacaatgacagggacccagcactgtcctcaggtgcaccctgaacttgctcctagcagctcacaagcagaagcttgagcctatcaggagactctgggaagaggacatagtctgaggcaccaaaaaaaggaagtatatctgctcaggtcaatcctaaaacctattgagacagtacgtctcatgccaaaataatgtcaatatgccacatacatgacgtttacactacacagaaacatgggtgatcttactcaatttcttacaggtgaggaaataatgtccttggtatctaactgacccgttcaaggtcatctggttagtcagctgaggccacgtctgcccaggatgagtgctctaggccagggcccacgggctcctcccaactcccacacacacacgccatgggacagtcacctggggctctgccaaagggcagcttcactagctgagcacagggcatccatttcccttttaaacatggggacagatgtgtcctctaacctctgaggcttccatctggaagtgcctcatgagtcagtggctcacatttagaacagctgtgcctcctggatgccccaaccttttttctccctcatttctatcccagagagattagatgtcctgtacaaattggatctgaaaatgataataaaataaaatgtaatataaaacaagatgaaataaaatcagtctgcgctgggatgagctgtgaaaaacggggctgctcaagccacctcctgtgagcacaagccaaccacagacgaagccttctgcatgaggaacaagcagtccccccatcccttcccgcaggtgcaggcttgcagctcgggagtcagaccccaggcatgtaggtcccaggccatctgaggagcctgtgtagacccctgtggctgaagagcagggcctcactgcccttgagaggctagctctgagaaccagctttttaaataacaagtaccacctactttcattcttatgataaaagttacttggttatagaaaattcagaaagtagacatatacaaaaagaagcagacagaatcagcctctctctccctcccataccccaagataaccaactttagccagataggatggacccctaaataagtacgggcgactttcttccgcccatacttatttaaaagccaaatggtgctttatgtccatatcactatattttcttctgcactgcaatttttaacagtggcatagtacccaattatccagatggaacataatccctctttaacagcatgttttttggtctcaaatttcccactcttatgaatgatgctatgagaaacattctatagtttaaaatgttaacatccttagtggctgcctcgggataaacacccagagatgccatgtgctttggggtccacatcactaggacttcctctagaaagtgctgtgacttccaggaccacatgcatcatcccagagaagaggaaacatacaaaacatgaaacccattccatctttttctatttaagcatattttatcccctttccaaaaaagaaactatcttgtcaaaggtaaagagacttgaagtgtctggatagttatgaaaccagtgtcccagagaacacagcagaggagaaaacggcacctccaaacctctctgcaagcaccttcatcccctcccaggtcagtctcaggccccaagtggactatgccactggagtgtcctagaatgtaaattcccccacaagagaaccacggcaggcctccatatccccacacagggcccagtgtctggtgcatcagaggtccccaggacataaatatttataaactgattgattaatgaaggaggggcagggcagtggaagagaggactcatctgttccataatcaagaccataacttcaagtttatgatttattacccaccatatctggcaaaggtagcaccgtcctcctccccactggagactgacaaaatgcctggtaccatctgttaatggatgaaatgcattcccacaaacatccatatgttgaagtcctagtgcccaggacctcagagggtgacagtttggaaacaggatctttaaagaagtgattaagttaaaatgacaccattagggtggccctaatccagtatgagtggtgtctttataaaaagaggagattatcctggctaacacggtgaaacctcgtctctactaaaaatacaaaaaattagccatgcatggtggcgggctcctgtagtcccagctactcgggaggctgaggcaggagaatggcgtgaacctgagaggcggagcttgcagtgagccgagatcgcaccactgcactccagcccgggcgacagagcaagactctgtcccaaaaaaaaaaaaaaaaaaaaaaaaagaagaggagattaggacacagacacacatagaggggcagccatgtgaggacacagggagaaaacggccacctacaagccaatgagaaagccctcaggagaatccaaccctgcagacaccctcatctcagccttccagcctccaggactgagggtgataaccgcccattgctgcagctgccccgcacggtggtgctttgtcttggcagcctaagctgactaagacgacatctgaaagctctgagatgcctggtgggtgtttgggaaatgctgctgccaggagcaaccttcagctcccaggatgggcaggtggcctggagatgctcacctgccgccctgcgctcccctcacttcaccctctcctggcaggaagccaggctgactgtgaacagcagcaataaagcaaggagtggcataaggtgtggggccggaatggcccctagccacacgtggaaacgttgcctcctcctcctgaatgtgttaaataaaagggagaggcagtggggaaaacaatccagtaagtcaagctggttaatgtaactaggaagattgggcaatttgatgggcatgccaaaatattgaaggaggaggaacagcaggagcatcaagacacaagatatccaactactttcagctcttcctccacctagtaacttccaataaagctgaaggaggatgtgctctaaaccagagaggttttatgtgcatcatataccttaacattacagatctatagatcccgccatgagaaaataagtttattgagcaattaacttcaaaatttattttccagctgttagaatgtgtccagtctcactgacaatgctggagttgaaaaaaaacgggaaagagcatattcccgcctttgggaagcttacagtgagatgaggggacacaggcaggtgtaaacataagacagtgagccccgcattaagtgttgtatgtcaagaaatgagtacattggaagctgaaccaggctgagcaaagccacattcatgtgtgagtcttttctgcttactggttagaatgaaactgcatcttgccctccaaggaccacataaatgaggtcactccaaaaccacctctacaggcttcccaccaaccatggatctgctgtctccctgttcgttccatgagacaatatggaatgcatggcctgagccagctggctgggctccacaatggagcactagagaattggctgtccccgctcccactgaggggctcagtcagccaagactctagcagtgcagaagtaggaactagatgaagaccgaaggggcccagggccttcctcaccacccctgtccaggaacatcattgttactactgaggagccgggcactgcatgcccactgcatgcctgaagccagcaggctgggctctgcagtcccgcactgtgtttcttctgtcaattcaaaagctgaccaaatgaccactgcgtctgctcccaaccctgcaaatgccagttgtaccagttattgtaattgcagagcttaataaaatactgcagaaatcaatgaaatgtgagcaaaaaaggatttgttactgctgcaaacactgaagtttttgagagccttgcgtgaggcagtcagtaaaactcatcaaatttctgtagggcagctggggcagagtccagaggatttctatgctccaattattcctaagtatctttaagctttcttacactctgaggaaccccaaatgggaaatttcaatgactcattgtagatgtacactatgtaaaaacaggacagggaaccccagaccctggagagaactcaaagacagggtgggatggtacgtcaaagacaggtggctacttttaccggttttcagacacaatggaatcctaaatgaaaggttcaggattccgcaagttaactgatacttcagttcaataatcacttataaattctgatccctttaaatgacagattctgcctggatgtgaagccaaatgcatagtaagtgacatgcaagcagcaatgaccctcctcgttgcccctgtattaataccagtaacgatcattgtcacagcaagttattccacatccactctattcctgacataatgcaacatgatttgcttgtattctctctccatccttgtagcagcctgctgagcaaggaacccttatcatccccactttcaaacaggcataagccactgcgcctggccgaggttatgtgttgatcagttcgtgaaaacactgtgactagagctcgcaggaccctaaccctttatttctcctagagacagaagctcagtgttggctaaatcagtgtttgcagcaactttatcgaacatgactaccaccaataatgagaatctactgtaattgattaggtattgactagggttccatagtaagacagccccattgtcaggctgtcacttcatctagttcaaacccaggaccaggcttgcccacctgaggccatttgcagcaaggggagtgctaggacacaggccaggtctgtcttagctttcactccaccacgagggaccatcgacttttctacctccctagaactccacagccaagactagttagccctctgccctgattcctccccgctgtgcctctcttctccctgcctctccggtttgtaagcaaattgcctatcataggttcacagaaggcagccagaaagtgggctgggatctgttctctcagatagtaaagctcagggaaagaatcattaagtgaaaacctgacaatgaggctgtcctacaatggaccctaatcaatgcctaatcaattacagttgattttcgttattggcagtagttgtgttctataaagttgctgcaaacactgatttgaccaacactgagcttccgtctctaggagaaatacagggttagggtcctgcgagctctagtcacagcattttcaccaaccgcttcaaggcataaccttggccgggtgcagtggctcacacctgtaatctcagcactttgagaggcctaggcaggtggatcacctgaggtcaggagttcgagaccagcctggccaatgtggtgaaaccccatctctactaaaaatgtacaaattgtcgggagtggttgtgcatgcctgtaatcccagttactcaggaggctggggcatgagaatcacttgaacccaggaggcagaggttgcagtgaaccgagatcatgccacagcactccggcctgggtgacaaagagagaccctaatttaataaatactgtggattcattaacatgaaactctcagccattggtgctgtaactcacacctgaaggaaggactgtctaacacatgcgctttctccaccaggcacaggacagtcatcttgtgcttagggacactggacatcacatcagcactacacttgcattttaaacagcataatcaacaacagaagcacaaaaatgggggaaatgtggcactaaatagactgtggaaaggatgcctgtctgcagtatgagttgaaacaaggaagagctttgctttgttcagtgtcagacgggaacatgcaggtgggcaacccgaattttgagtctttttgttcatgtcttcaaatgaccacaaaattgtccttggtattgattttggtgttacaaataaattgtatccaggaggctaatttgcaaatatggaatccacaagtaatgaaaatcaactataatttaatcttcaaatttgtagatttaaaattgctagaaacttgccagtttctaattctaatgcccccacttaatacacctgttactctaacattattaaaagggccgtaatcacagcctagtccacccgtaatttttatctacctgactctacttcttcatccctaggatgcctcatgctgctacagaaagcaaagccttagaggaatccttcctcctgacaaggaagctccagggtggcaagttcaggctgcagatgccttcttctaaagacgtgcacttcttttccagatttatgttccctacctgaggacctctattgatttggcaatgccttgccttgagaagcttacagcattttctaggcaaacacactgaggactctggcatcagaatattttctggagcacgtacgacagaagccaatagtcatctgcccgggatggaaagaagaaaggcatcagagaatgtgagtttctcaggtggaaggaaatcataaacgtcaggtcacccaaaccccagaggccgccgagttctcagtaaccctacgccccgagcaccctcaacacccctaggattgctcaaggtggccccgggtggcagccccaccccagcaagtcatctcctagaacaggctgaacagacttcagtttgcatcagaaccaccaggagggcatattaggagagagacttagggaccctatcccagaatttctgattcaacaggtctgagtgggcacaaagagtttgtatttctaagttcccaggtttatgctgatgctgctggtcttagatgacactctgagatccactgacctaaaatatttgtgcatcagtgtggtttatactaacgaccttgtcaccacatgcaatgcgggcttcattactgcatcctctgccatcatttgcactcagtctcccaatcaccctaagaaggaacactgcaacataacttccagccactacttaaatggcaccaatgatggggagctcaggacctcatacaagtccaagtccatgtttaactcccctaatattccaaagtgcttcactctcttgaatcacaatctgtgctcactggatgcctgcgccttggccctatttccttccatgcacaaaacctatcaaggctgatctccctggtgagtgagttgtatgattttcccaggggaaaaaaagtaaaaatgtacctggctagtgtgaaacaaccctttattcagaatgatttctttaaaggctttatgaagcaagtgttactattttacaaagcagcctgtgaactctgtgccatgtgttgacaaactcagtgggttttcagcgaaacatttcatcaaataagacacattgtagcactgctgaggggctatcacccagatgtcaacggctcaatgccacacaggagacttgtgggaaaagtcttaagccattaggtcatggaagataactgcaagagggggaaaggacgctggcttgggaaacactggtgtgtcatatgataaaaacagtgaccagccagcctgagctctgtgcctaaacacatcatctgcgccctgcacaatgcccctgtgaagtagagacacgcggatcagaagccccaggtcccaccactttgtttccagtcaccaacttgtccccaaatcaactgcatccatacaccgacaccccctacccaactgtgccatttaaagctaaccctagatatcacatcacttcatccataaatatctcagtacatatctttaaaagtcaagccgggcacaatggctcacgtctgtaatcccagcactttgggaggccgaggtgggaggatcacctgaggtcaggagttcgagacaagcctgaccaacatggagaaaccccatctctactaaaaatacaaaattagccgggcgtggtggtggatgcctgtaatcccagctattcaggaggctgaggcaggagaattgcttgaacacaagaggcggaggttgctgtgagccgagatcacaccattgcactccagcctgggcaacaagagcgaaactccgtctaaaaataaataaataaataaataaataaataatttaaaaaaataaaagtcaagaacattttaatacatagaacaaactgccagaattgtgaagaataatttcttaaaatatctaattcatgttcaaatttctctgccatacgtgttttggggttgtttggatttatttttacagtctaagttacagtctgaataaagtcttacgatgtttattcaatatgtcacttcagttcctttcttttttttttctttgatacggagcctctgtcgcccaggctggagtgcagtggtacaatctcggctcactgcaatctctgcctcctgggttcaagccattctcctgcctcagcctcccaagtagctgggattacagacgtgcaccaccaagaccagctaatttttgtatttttatagagatggggtttcaccatgttggccaggctggtctcctgacctcagatgatccgcctgccttggcctcccaaagtgctgggattacaggcgtgagccacagcacccgacccagttcctttttcttcctcctctttttgcaatgtatttgaaaaagactggggttgtttccacacagtagaattccctctgccctggatttcgctgagccctgcagtatggcttcacagatgtcctggcccctggacttcctgtcagttgcagatggatctgaggctgggtctgattctggtttgattctggtgaggacttggctagggtgaggactcagctgtgtacttcctgcaaggaggcttacaaccctatgacccatggtctaactccccttttgtgatagtgcaggttacagaggaccagagcctagagccagacagtcatttattaggagtttggaaagggcactatgttaaccctatcacattttcaaggtttattagctggaattcttctttcaatacaactttccctcttcctttatttggaaactccaaagaacagttcccaaaggttaaatgctcgattgcttctctttatttaccaaatcagaatgagttggttccctacatcccccaaaggtaactagggagtgctgtggtgatgacggtggtaatggtggtgatgacggtggtggtgatggtgtaagtagtacttttgaaagtctgttgcatatgttagataattacatctgtgtccaaagtacaaagctaacagctattacaacctggatgcaagcacagcctgccccggtgaagtccctcatcttccatgaccccaggttctcttcaaattccataatttctggaaagacaggccatggggctaccccagggcctgagggccagagaggacgggatggggagtgctagtggtcatcacgctgggaaacgaagtgttagttaagtagagaaaaacttcccactaaagtagaaaatactcatccaattaaacatgtttctccttattctttctctacgattgagtctccaaatatgacaaggtttccggcagggacttttttctttttaattttttaacaaaaattgtttcctgatactctcgggaaagtgcacattttaaagaaacctgttataaatgcaccaggagaatgagacaattatcacagcagctatgaggaccaggagcccatgaagtttcagattttgaagccaacagttgtcctgatgctggcagactgacacccagacttgggtccccagcaacacacagtatgagtgaagtttctgcccaaaaagctcaagatgccttcagtgacctgaggaaaccgccatggtacctgcttctctaaaataggactattgagccacaggagaccacagattcatagccaagcaacccccatatttgaagataagaaaacagaaggttagaaaacaaggccatgtataacaggaggggcctgagcctagaccctggctcctggaccaagccagctccctcccacagcacgctggctgtcccccaagtggatgtaggttggagatgttgttgtgtgtggttttctacatgagtatcccttttgcaggtaaaatacactcaggtaatataaataatgcacaaacgaatgcctcctctgacctggaatctgtaacgtctccttgtcacatgccaacttctctccaactgcagacatttaaaaaaaaaaatcagcactttgagagcctgaggcaggcagatcacttgagatcaggagttcaagaccagcctggacaacacagtgaaaccccatctctactaaaaatacaaaaattaggccgggcacagtggctcacacttgtaatcccagcactttaggaggcaggcagaattacctgaggtcaggagttcgagaccagcctggccaacatgatgaaaccccgtctctagtaaaaatacaaaaatcatccaggcgtggtggcacacgcatataatcgcagctactcgggaggctgaggcatgagaatcacttgaacccgggaggcagaggttgcagtgaaccaagattacatcactgcactccagcctgagcaacagggcaagaatctgtctcaaaaataaataaataaataaataaaatcagtatttaatgttccccttcagtagttactgctatttcccgaaccaatcacatatggccactgcgtttaagggcctctccatatttaaaatgcgtgactactgctgaaagaaatcagagaaaacacaagcaaatggaaaaacatcccatgcttatgaattagaagaatcaatatcattaaaatggccatactacccaaagcaatttacagattcaatgctattcctatcaaactactgacatcattcttcacagaatcagaaaaaaaactattgtaaaattcatatggaaccaaaaaagagccaaaatagccaaagcaatcctaagcaaaaagaacaaagccaaaggcatcacattattcaacttcaaactatactacaaggctaatgtaaccaaaacagtacggtactggcacagaaacagacacatattccaactgaacagaacagaaaacacaaataaagctgcacacttacaaccatctaatcttcaacaaggtcaacaaaaacaagcaatggggaaaggacaccttattcaataaatagtgctgggataacttgctagccatatgcagaagaatggaactagacccttacctttcaccgtatataaaaactaacccaaggtagattacagatttaaatgtaagacctcaaactataaaaatcctgaagaaaacctaagaaatacccttatcgacatcagccttggcaaagaatttatggccaagtacccaaaaataatttcaacaaaaacaaaaattgacaagtgggagctaattaaactaaagaacttctgcttaacaaaagaaactatcaacagagtaaacagacatcctacagaatgggagaaaatattcacaaactatgcatccaacaaaggctgaatatctcacaccagtcagaatggctattattaaaaagtcaaaaaacatcagacgtcggctaggctgcagagaaaaggaatgcttgtacactgctagtggaaaagtaaatgagttcagccactgtggaaagcagtgtggagatttctcaaagaacttaaaacagaactaccattcaacccagcaactcacttatgggtacatacccaaagaaatatagatcattataccaaaaagacacatgcactcatatgttcatcaccgtgctattcacaatagcaaagacatagaattatcctaagtgccattaagggtggactggataaagaaaatgtggtataggctgggcacggtggctcacgcctgtaatcccagcactctgaaaggccagggcgggcggatcacctgaggtcaggagttcgagaccagcctgaccaacatggtgaaacactgtccctgataaaaatataaaaattagccaggcgtaatggcaggtgcgtgtaatccaagttactcaggaggctaaggcaggagaatcgcttgagcccaggaggcagaggttgcagtgagccaagattgttccactgcactccagcctgggcaacagaatgaaactctgtctcaaaaaaaaaaaaaaaaaaaaaaaattgtggtacatgtacaccatggaatactacaaacccataaacaagaacgaaatcatgtcctttgcagcaacatagatggatgtggatgccataaccctagacaaattaacacaggaacagaaaacaaaacaccacatgttctcacatgggaactgagcacactgagcacacgtgaacataaacatgggaacagtaaacactgggaactgcccaagtgaggagagtgggagagggacgtgaattgaaaaaccacctattgggtactatgctccttacctgggtccaacacacctgggtaacaatcatacacatgtacactctatatctaaaataaaagctgaagtttttaaactttaaaaacaactttaaaaatcttaaaataaataagtaaaatatgtgaccactctagaatctgtgccataaaagaaaagaaatcccactcaacctgatttttcttgtctgctgcagacgtccagtcatcagacttggcagcattcattcattcgaaacactgcttacaggtgagtccagggaccacacgacaatacttcagccaaaggtgcctttggtgcgtccagccctgacctggcccacctgtcactttaggaagagatccccagcgcagagaaatgcagcaaccctgaaccacagacgcaggtaatggtcagggctgatgggaatccagtgtctgtgagccacacacctgcagcccaggcctcctagccggagtgggtttttaatcattagccaaggctttgtgctcccgggtggatgtaagctgacaccagggttaatatgttccctgctgttgaccgttcacaattccctccacctgcagaggtgggacaatagcttcaggaacagtatccaacccaccactttcaaattccagctacaaagggagagcgcctgcttgtgtgaggctcacattgacgggtgtgttttgttttttgtttttttttaatgtgttgaaggtttttcgtctttctcagcaggtcagtgaactgagacctgtgggctcctgactgtggatgaggagtctgcctgaagggaaggccaaggctgctgggaagcctcctcactggggcgcagttcccagaaaccctttggaaatagccaaaggcctgtatgttattttaggcgtgagaggagacggtgaaatcaaaggaaaagtgtggatcaaagttcagcctgtggggagaaggggtgagggtgggggtgccacaaccacaggcatcagtcccagaagactgtgcccacagggtcatgatggcctcactaggcaattgtgcagatgctaaggggagcagctggaaacagaggccggggccaaggggcagggaccatcctggtaaccatctcaccgtctcgtctctgggaactgggctgagctctgaagggcagccgtcctgggtcccactcacccatggagtcattcaggatggaatggaagggggtcttcctttccaaccttggctcccactgacttagtgcctgactcctgcaggcagctccagggcacccgcgggccctgccagcctttcctggaagagccctggggtgacagaagcctcacaatcccgcccagttcgaatgacagttcatcaccagaagctcctcttttaaacacgttccactaacatcttctgctgtttatctgcccattctcaaagtctgctccatctgagcagaatgcggcagtttggagaaggggcctcagccaggcttgcccaggagccacctccccctcgggtgtccactgggtaccagctcctcgcggcccatgtcttcacccagatgaggctggagaggtgtgagccaaaaaggatttccagaaatgcctgaggaacaactaatcaatatgaaagaagtgaagggatgcaccccattgtattaatttcctaaggctgctgtaaagcactacaaagtggttggcttcaaacaaggcatgtgttctctcacagacccaggggctggaggtctgaaaccaaggcggcaggctgcgctccttctgagagccccagggaggatctgtccctgcctcttccaccttctcaggctgccacaattggtgaggttccttggcttgcagacacgtggctccagcctctgcctctgtcatcacctggctttctccctgtgtctgcatcctctcctcttcttacaagaacccagtcatggaaatcaggcccaatctaatccagcatgacctcatctctgtcatcattccaaataaggtcacattcaggggtttcaggtggacatgaatttcgggggaacacaactcaaccccctgtacctcccctacagatggttctctgggatccgtgagaaggagggaggccccactgcatgttccaggtcgaatgttctcatagcacgtcgtttccttacctgcaaggctaggtgtcagtgtcactgggaaaggagcccattggcttgccctccttcactggtactcactgtgtgtgcccatcaagagaaaggcacgtgcacagggatatagggagaaactttcaaaggggtgaaatgcacagaaaactgagagcagtccaggactgtggccctaaacttgctccctggcagctccctacacacaggccttatggttgattcgcttaagccactctctagggactagaggcgtctagaccagaaggcgcaggtgagccatgggaacaggaagtcccagcccacatctcagcacatcttcagcctgtcctactccctcccacagagtaaatcccggacactcctgctggtctgcacttgctccaaagcaacagagaaccagcctgcactacatccacaccctcccagggctgaggccatgggcaatgatgaggcaggaccctgagccgttgttgttcaggacgcagcagctgggagatgggggtgagggtcatccccaacaacgaagcaccctccagaggggcgctgggtgagaaacagacggacttacagtgctggccccaccccttcctcaccttctgctgagcgacctcacgcgcatccagccctcccaatctgagtgtgatcgcccacgcagccctcctcccacccgactgctcagcatccacacccatcgtcctccaccgtgccctgccaatgcccgaatgctgtatgcacaggctaactaaacaccactctgtgatgactgagtgtcaaggtaagatctggggaatgcagtatcggtttgtacttttatttttgggtctcacctgacttttgccaaagccacagatgttgagtttggctcttctgaccaaatggaacacctggatgctgatctaacaggatccttgaaactcttctctctgcttcctggagatcagagagattaaggagcaagaacatttgcgtatatccattgacctaatagaactcaatttcactgtgactctggtcaaatatgtttgcatgaagactcctgatgagacacacagaatctggaaggggcagcggtgaatccagaaaccatgagcacgcacacatacacgtgtaggtgatcttcagccgagactctgctgtggtgtatagacccgtgtctgtgtttctgaagtttactgaggggtggaaacaatctataagcaggaaataaccactgtccagtcaaatacctggacttatgggccgtgaggacaagaaatgcatacccagagacttgtgggaagccttctgtgacaacatgcatgcagaaaccactgcaggctggggccggcagaacagacccacataggtcacctggatccactgtcccagatcactggatgctcagctcactaagccccacacccagtaatttacaggtggaaagtgtgggtgttttgttggaaatttgcttaatttttcagtaaaataaaatggagaccattaaagtgatttcatttatctgaagctcctcatcatccatttggtcagcattctttctgaaagaatcaaatagcttcatgagactccatcacggtcactggggcagaggcagggatggcagcacgtgacctgcaagacttcctgacagtcacatctgtcctgtccttgtgttggttggtcttgttgctctggtcacttcctctgtctggctttctgagttcaagtaaaacatactgagcaagtctcaacacacacacacacacacacacacacacaacacacataaaaaaacctcacacacaacacctcacacaacacacaaaacagcacacaaaaaacacctcacacacaacacacacaaaacacctcacaaacaatacacatcacatacacaaaacacttcacacacaacacacacacataaacacacacagcacacacacctcacataacccacacaacacacacaaaacacctcacaacacacacaaaacacttcacacacaacacaacacatacacaaaataagcaacacatacacaaaacacaacacaaacaacacacactacacatacaacacacactgcaacacacacacaacacctcacacaatacacacaacacagacatgtacacacacacaacacaggcatgtacacacacaacacacttcagcacaacacacacagcacaacacacacacctcacaacacacacaagacacacctcacacacaaaacacctcacacacaacacttcacacacaacacacaccacaacacacacaaaaaacacctcacacacacaaaacacctcacacataatacacacaacacacacagcacagacatgtacacacacaacacacctcagcacaacacacaacacacaaagcacaacacacacacctcacacacaacacacaaagcacaacacacacacctcacacacaacacacacgacagacacacctcacacacaaaacacctcacacacaacacttcacacacaacacacacaccgcaacacacacaaaaaaaaacacctcacacacacaggtaacacctcacacaatacaacacatgcaacacacacaaaacactacacacactgcaacgcactcaaagcacctcacacgcaacacacaacacacacacctcacacaacagacaacagacaactcacacacaaaaacacacctcacgtacaacacacacactgcatcacacaacacacaaacacaacatacacacacaaaacacctcacacacaccacagaccacagacacacgcatcttgcacacagagctgtgcaaaggtggagtgtgagctccagcctcaggctgaaatgtgagccctgcagtcaccttggagggaactagcccactggcctcgggtgaggtgaaccaagagaagcaccgccctgatgactcagccactattcttacccaacccctcttccagggccacagaccacagtggccaaggccaagcaagaacaatcacagcgtgagtgcaggcagctggtgcgggctcgggacctgcccggagctggatcaggcactgccctgaaccctcccacaccagaggccgccaccagaaggcggagacaccggcctccttcaaggacagtggcccctctgtaaacaggcggcacttccccggggggggggccaggccctccctggactcaggctggctgtgggctgcccaggaggccgggcggggaagtgggtcccatacatggcctcggggtgtcctagtgaaggctgccctgcacctgagggcatcaagatttgctggtatgaatcaatcgcttgcagagtgtatgaaggtaaacacaggatggaaaaaaacaaggacactctgcccttgaacttcaatcaaaagctgtggggccaccattcggaccactgttaggccgcagcatcatgaaaagatcctgcaaacctgcaactaccaaggacagactcgcatgcgcccttgttctgaccgtggtgcctccaagtctgcaaatgcgggatcacaggaatcatctactgtgtctgtcatcggtgccctcaccctcaggaagcaggggacacgctctggaactcatcagactggttctctccatcaggagaaccagatcaacaatgaatggcacacagcaaaggctgtgggcaccagaagaaccgcactgccaactcaccttcacaggacaaccaaccaggctcttccccacacatcacgtgtcttccctgtgtcacactagcactgaggatctaagcatgttatttcattcgatcctggcagtgaccccaagaagagctggtggcgtcctcattttacagaagaggaaagtggagcccagaaaagtgaaagaactccattcagggccacacagctcaccagtgtcataccccggatgggactcaacccaactctagtccatgctcacacctaccactacattctgtgcctgtgtgcgcatgtgagcactgcgtgtacacatacacgtagacttacagagcagctggaccacaggctgtgactcccctgtaaggagcccggccacctctcccagccttagggacagtagttacctgaacaatggtgaagcattctctctatgacccagaagaccacagcccatagaacggtaatgtaagcagaaagacaccaattgtccctttatagttctaaaagccagaggtcccaatgaggctatgctgcaatagcttgcctctgacatccctccaaaatcatcattctgctcgactcatggagacgtggtgcatgcccctgatgccttagtctacaccctccataatttcccacgtcgcacattttctctgctgattcttgtttcttcccaccttccagaaaggcacatgccaatcattgtggtttccttttcacactggctcccaggaagctccaaccctgtgtccatgtaacatatgccaagttgacattcacaaagggaggtttgcctcccagctcctttctcaacaatactatgtgccgattttgagtccatgaattaatctaacctcacatcccacttttgtaagctgctgcagtaaacagaagattctgctaccaggaatatgaaaacgaacatcacaggtaaatagccacgggttcaatgcgccacaatcacggaaaaggttccttctccattgtgtcttaaatgccccggggagccacaaaggcaccctatgcctgcagacaaagaaccctcacacagtatgtcattaagatgacagacacccttacagtcctgtcctgggatgtcggtaagtatggctggcaaggctcatcactgccttctttctgccctaccagggaattaggcccaggggtttcaaaacaatcatgccctcagccagcacaactccaggaattttgacagacccggcagctcacctcgataaaacatgctgggatgaagctattctagaacctctccaaaggggtcatgcccctcaggttagctgcagagcagaggagggcctgggggtgggtacaagtgccaggtaaactccaggtgtgggaggggccgccagcacaggacagagcagaagagcagccaggtctaagggcaggtcacagaggggcctgcaggggcactgacaccccagagagcagaagccccttagtgtctgggtgatgtgggagtttcttcagttttctgagctccagcaggtgagggagggcagggcatctgagacagaataggtactcaatgaatggtaacaaagagaaaaacaaaaacagctatcaggtgacctggccaggtgccacagggcacagtgacaacccaggtgacatcggggatgtcagtattatctgaaagcaattccatgcccatccaaaatgccaaggatcacagtgccagaagactcagcccagacaggatcaggaaagaaaaaaaagattctgtgctttctgccctgagaagccacacggtgcaggcggaaaccctcctgcccaagctccgctaaatgggggggtctgcttctacaaggccacccagcagggaggcagaagagtgctcaggctgggctgggctgccacgtccatccttccatttactcctccatgccaggaggaagacagcactgccctgtttaggggagaaagctccatgcaaaataaagatgtgagggaactgggtgtcttggcatcaaaggccctctcatgaccccacaccaccacacggggagagcagcccagaaaggcaggcatttgccaaggccacccctgactgcacgcccacgggctgatctctgccccagttccagcccacagccaggattcccacacttgagctgatcagccttgccagagggtttgttaaagcaccgatcgcagggccccagcaattcagtacgtctgggctggggcctgagaatgtgcatttctataggtccccaggcaatgctgaggctgtaggtccagggaccacacctgggggccagctggtcaaggcaagttgaaaaggccacagagagcttagtacagagtggactcatgcatgttcatctcagggaaatacacacacacacacacacacacacattcacatacacataaactgacatacataataaacacacacatccatatgttcacacacaggtaacaattacattatccacatatatataccctcagatatataacaactacattaaaaacctacacacattaataattacatacaagatacatatattcacatgtgtaacatttatatacataatatatgcatacaaaccttcatataaacaattacataacatatatacactcacatataaagactgcatacctaatatacatatatattcacatacataactctcatatgtatggcacatgtatgtattcatgtgttgacacatgtataacatacatattcatttgtgtgcgtataacaattacatgtataacatgcatgtatgtgttcatgtaccaataaaattacatgcataacatgcatgtctatccatatacatgtaacaactacatgcataacatacatgtatgtatttgtacgcacaacaattacacacataatacacacacacacacacagagcagcagcaaggggagtgggcaggagccaggctgggctagaagagcgagatctcttagcaaccacacctgtgaaaaggttaacagggaggccgtgtcctgacgcagggggagggctgtgctccaggagactgaagactcctctctgggaccctgggctccagagggaacaatgacaacatctaagcagccaggatgggccctttgggctctggcctgtctgacagccctgcaaccggcatctttagagccagcacacagctttagccctctggtgcctctgatgtccagggctcaccaacaaatctgatggcaagggactgtctgcgaggtgggagagcctcagctgccaccaggaaaacaggcttcagccagggcctcgggacaggcacacagctctggggccacctgggcctcagcccctggctcccggggcctatgacaagcctgaggaaatcagtcacaaaccgcagcctgtcaaaaccaactacaaacacaggctcccaagtccccccacgccccctactcccccacccccccgtcggcggtgagtgccacaggaggaatggagtgagactggaccacaggcctggggacacagctgaggccagcagggacagccaggcaggcgcccgccccggacggcctcagctcttgatgctgcaacatgtttctcatagtttgtcaatattttaggtttctgggtgagattttatttttaacgttcctatgacctcaaatgcatactttgctcttccagaaccaaagagaccacaccacatgccagcattaaaaggagcataataagggcaccccgcctgtggccaggcttctgtgacaggcctgaccctgtagtccctcttctctcatccgcagctaggttagagagcacctctatggccattgcataaaggagaaaaccgaggctcaggtgggcagggggcgagggcagggcctggccactcaagtgatgaggttagagagccacccccacgcccactgggtaaaggaggaaaccaaggctcagatgggcagggggcaagggcaaggcccagccactggagccaggatctgatcttgacttcatcaaagcagggaagctgccacacgggcgccgctggccgagcctggggaaggatgtcctactgcaccacaagacagagccagttagccagttccatgtctggaggccaccaggctcacaatccagaaaggctgccaaatctccggcagaacaccccagattctgtgtatggcgaagctagggggagccaagagcagaaagccctgccctacttgagaagtacagggaacaacacacctgacagatgcccaggaggaaccacagggtgcacctgtttccctgccccaccggggaggcccagacctgcacacacttccccagcagcaagaggcagcttcccatttgcctcccagggagtcgcttctgacttgcagtgagagaagagggtcctgtatcctactgtcttggcacagtgagcctttcaattatcctgcaagctgctaataagccctcagaaacaaagcttcactcactcagctccaaaggatggaggcaaagaaaacaccaggaggtaccatgaccttccaaggagctgcatttgaaaagcagacagcaatttaaatttgcctaatcacaagccaaagagaaagtgctattgtgtttaccttcaatctgatttgaacacacacacacacacccagtatttgtcagagctggatgtcagtctacaaaccactgcactacactgtccacagccacctggcgacccaggcaccctcactgtccaggtttttatcactaagacaacagacttgtgctgtcttcactttatagccaaggaaactcggcccagggagattcgccccgaaggtaactattactgatagaaaggcagctcccgcaaaggcgcagcggatcctcttctctaaaaaaccatgcaaatggccagtgcagcatggtcaaaggacctcagatagagccttgtgaatgcaagctacaggtcaaagggagggcatggatcctagaggaagccaaaagatccccaaagagggagcagcttcaagaaaggacttagtcctttcttggatggaacaagggagccaaagaaatgcaaagggcttacctgttccagtcggacttgcacaccgcagggaatcaccacctttcaaagagagaagaaacagataagcaaatggattctccaggaaaaaattagcataataatcaagccaggctcccaaagactgaatgaaactgtctctaacctcactctggctacaaagctgtagcagatcaagactgacaagatttagagttaagagagtccagggttttgttcacttttggaaagtccctgtcatttttgctaatgtcatggaaaccatggggcctccccttccagaaaaatgcaaatcactcatagatacaaaatttagcccccactttcacaaagaactggtagacctcaaggatggaaacctctgagtcggtccgtgcttggggagcttgggagcggggcccagagaaggaggtggaaggctctgcctggtggtcttcaagaccccactcctcccatcctcacccaggggcatgcattctctacacaaggggccatcttttctagaactatttctacaagtagaactgaagagtctgaatgtggcaatgtcaacctggttattccattccgcacaagagacggggagaggagactttgactccaccatagtctctgaagaccgagagctccctgggaaagataaagaaagtaacggaggcaaggtggctcaaacacagtcaggagaggcagttagtaacaggcacagggagccaccagtcctgcagggcaaagaccccaccttgggcaggatctccaccacttactagccacaggaccttggcctttaatctctctgggcctcagtttccacatctgaaaactgcaggtaacaatagtgccttccgggcagggtcatggtgagaattaagagatggcgcgtgaggagctcagaagagtggcacagggcaggggctaagggagccaggcaggcattgcgctgctctggggggccgctcaggagccaggcgccagcaaacaggattcagttcctggtgagtgacctcactccttagctttctcctggcactgccccctccagatccctggcacctgccttctcaaagagttttctgaaaatgtgcaaccgaaggagaatcgtagagaatctcagagatctgactaattgtacttgtggtttggagtgggcggcggcgtaatcttggcttttaccaggataactatttatagcctcttgcttatcttacgcagtccagtcctcagggagtatgtgacacatggccgttcctgtgtctgggacacatcattactccaccatggctctgactcagacggatgtctggggcaggggtcctctctcagggcccctttaaagtttgatgaatggatgagagaataagtaaacaaataaatgtaaagcaaaacaaaacaaaaacagctttggaaacagaaggagtcacagacaaaaccttacaggatggcggaaacagccggacaaggagaccccatggttaacagagcggtgtgacttatctcccctcaagcatggtatctactcagtgcacacatgcatcttgttgcctcactccacatgtgacatgcaggcaagaaatgtgcgaagaatcagggcccctgcctttcaaactcactatcagcattcctgcaatggcatgtcaagcatgatgaaaaaaaaaatgagctatgaaggcaggaaaacacaaagaggaaacttaaatgcatattactaagtgaaagaagccactctgaaaaggccacatactgtatgatttcaactctgtgacattctggaaaaggcaaaactatgggacagtgaaaaggtcagtgaaagccagggattaggagggagagaggaacaggcagagcacagagactctttagggccatgaagctattctgcttgacactataaggatggacgcacgtcattctgcatttgtctaaacccacagaatgtacaacaccaggagagaatcctaatgtaaaccgagggctctggttactaagactgtatcaatattggctaatcaagtgtaacaaatgtaccacaggaatggaaaatgtttatatatgaagaggaagaagagtgtgtccaattttttttttttttttgagacggagtctcactctgtcacccaggctagagtgcagtggcacgatcttggctcactgcaagctccgcctcccgggttcacgccattctcctgcctcagcctctcgagtagctgggactacaggcgcccgccaccacgcctggctaattttttgtatttttagtagagatggggtttcactgtgtgagccaggatagtctcgatctcctgacctcatgatccacccacctcggcctcccaaagtactgggattacaggcgtgagccaccatacctggcctgagtgtctgatttttgtataaatctaaaactctcttaaaaatacagtctataatacattttttaaattcactctctggaagcacacgtttgttgagacaatgaaaagaaaagccttgtgcaatgtcagaaacttgagttttaaagacggcagccacttaaggatttggtccagaagccaggtctgtgtgttcccacatccctctgtggccagatggggtgcaataacggcccaccacctggcctggccccagggtgtcctacagaaaaggagaggtgagctctgtaagccgggactgcccgagtcccatctcaccccagaccatccacggcttatatggctaaccggctcgcgcgataagttggcacgcccaatcttgtcgaactccatccatcacttgtgctgcacattttcactgacagccttctcctgccaggacttcacttggaaatgaagcagactggtccctaaccccacagagcttacggctcacgtaatagaaactgcataaaatgaatcgtttttaagaaagtgagctggggaacagtagggggcgagcagcccccaggttctgcagagcaaatggcaggcagccttgccctgagcctccacattcgcatcctactgaacttgctcctctcttccaagagaaccagtcacaggccctactgtctgtttgcacatgtgctgttacaaaatgcagacaaaaatgtctcaggaaagaccttttgtgggagtggatttgcaaataaaaatgcacatggagcaccaaccagagaaaaagggacattctagaagcaaagagtcacctgttgataaagagaaaactcatcatttctataagtacaaacatctcatttagcaaaaaccatgaccaagtgaacacagagggcacttgttctttcaatgtggctaaaaccagattccaggacaggaagtccctgaaaagagactgtatttccgtcacacttttcctcccttatactaaggcaggtaagctgaccacagacagaaccacaggatgaggcggccgggctggggatgctcataccggcctgctcagcaccaaggaacctatggggactgtgcgacggtgctatcagctgcatttgctggacagtcaagtgtcacttgctgttcttcagccttagcagaggcagaagcacagtgcttccgtgcacagagctgcatccctgctggagcgcacacagctctccactgatctacaggctgccctgcctcccatgcatcaggagggtatctcctgtggatggagccaggtaagggagtaaggcacacctgcttgctctcctcacctcaaactccagctctgatcacacattccccagcactgtggggttctttcactgttttcactggacagagggaagcaccgtgggtcggggccaactccaggtgggcttggccttcctcggcacaaagaagctaacacttctttagcacttatgttcttaacatgccagtctgacttattcagagagagcagccacccaacgctgcagggctgggagggtcccggtgcactgcatcccctgagaccgtcctgcagacgccaaccagaagcctctgagctgcgcctggccccatcagtgcacagccagcatggctgggatgtgtgcggtggcatggccaggagtctagatgggcacccgctggccttgtgctttgcctgctctgtaacatgatgctgagtgagctgcaggggcgtgaaaggatgagacaagaaccaggcagcgttccctgtgtcaaggcacactcctggggaggcccacggctcatccaatgtgtggactcgaatcagctggataaacacgaaacagtgccctgtctgtaggtctttctctgtagccctcacaataaggccagcgagcccccactctgtgtatgagaagctgcgtctcagagagggccagcgccagccacgggaactctcccagagatgactccagctggtgccccagctccaggctcctctcctgataggagctgcaccctctctcataatgagcagctccctcagggattagggtgacaagaggtgacaacagtgagacaaggaagggggcagagcagctcccgttagcagctacagaaggctggagagaaggcagtgggtcatgggctgtgggccaaaagccatgggctgtggcatccccgggatccgtccctcccatggtggaggcgagggcccctctgagaagcctgtttgggagcctctttattgccttctttcagctatcctgggatcctaatctactgttcccaaggaaaccacaaacaaacactgctgtgcctgccccacacctggctacgtgggtgcctgggtacactggcatcaataaccttgtccccaagccagcaggtccacaggacagaggggcagagggacaagtgcttgccaccaagtcatgactgtgtccttgggaatgtgagtgtgtgggtgagcgtatgtgtgtgtggatgagtgtgagtgtgggtgtgtgaatgtgggtgagtgtgggtgtgtgagtgtgggtgtgtggaggtgagtgtgtgtgggggtgagtgcaggtgtgtgagtgtgggtgtgtgggtgagtgtgtgtgtgtgagtgactacatgtggtggtgtctgtgtttgactaggtatattttactgtggatatctgcaaatatattcttttgtgtgaatgtgtgtaagtttgagagtgttgtgagtttgcatatgagtgggtgagtcagtagttatgtgcatgggagtgtaaaagtgtagggggtgtgagcgtgtgtgcttgtgagaatgtatgaacgtgcatgtgtgaaactgagttttgtaagtgtgtctgtgtgtgtttctatgtatgcctatgcctcatgtgtgtgtattgatgtgagagcgtgtctgtgtgtgtctccgtgtgtgagtgtatacctgtatgtgtctctgtgtgtttgtgtgtgtgcacacacaacaaagcttagccctgcagttccatcccccaaggtgaatgaaagcacttcagctaacaagtacattctgccttagaaagtgctttcatccaaggtgcactggcccggccaccattacccccagtgctaacagacacagggcctcgggtgcagatcttcctcagtaaggagtgagatcaactcttcaaacctgaaccaatccctctctgcttacttctgggagatccaagtcctgggagaaataaaggacaactcagttctcctcgtgcttgaccgacattgttttccttttgatgaacacaataaaactccaaactcagcttttattgttgtttcttattaaatttcactttgtaaacagccatatagaaagtgacatttttccatcagtttctctaaagccgtgtgggtatagctgatgcactacatattctgtataaacatgcatattctgtataaagagaataaatgtaaatttcaattctatcttttccaaatcatcaaaaattccagtcatggtgggtcacgtgaatcagcttcctagaacctcacagaaacatgaagtaaggactgaagagaggccgggcgcagtagctcaaacctataatcccagcactttgggaggcccagatgggcggatcacctgaggtcaggagctcgagaccaacctggtcaacatggcaaaaccccgtctctactaaaaatacaaaacttagcagggcgtggcggcacgtgcctgtaatcccagctactcaggaggctgagacaggagaattgcttgaacctgggaggttgcagtgagctgggatcgtgccactgcactccagcctgggcgacagagcaagactccgtctcaaaagaaaaaaaaaaaagaactgaagcgagcaccctcaagtgtcaagcatgcttttacacacccggcagctacagggaaagcctggaggcttggctcctctaatcgtttcttcctgcttgttctccaggtcattctgcccacaggtgaagtctctactctactctggtatcaagcaggcctgggcaaaccttgttcatgtcaggattctggaggggagaatcagctcaacaataccaacccacagcaatgaaacgggcgttccacaaatgcacacacaccacacaacaccgaatgcaaatccgtgggacagcattcaggtgcaaaacaagtagaaactgagtagagacaaacgggccagccactgaccttgccaaaccttgcagacaagggagaaagcaattcactgagttaagccaagtacagagacatcaccttatgcacaagttctatcatacataaaattactttaatcataatagttttaactctaagataagttgcaaagactcagaaatgaagtttacttttattttatctttacaaaaacaattctttttaaagaaacttcgtgatggcgccaagatggcagtactttctttcctaagtcataaaaacagtcagaggtaacctacctctgaggccctgaactagccagggaaaaacagatacggacgccaaatatttgctgaccaccaggaccttacgatataattgggggttgggactcttctataatctctacacggagtagcagcctggttgcaaggagggtggagcttttacgaagggccacttctattataccacagctttgacttcttacattgtatgttactgatcaataaactagcaagatctttaattcacccattagttaagattgaaaaaggatgcattgttcatgtgtttatattaccattattatcatttattacaagggcagggtaaggagaataatcacagaaggaaagtcccctcattcccagtgctgacactgacccaagtgtttatctgcttaaataagcaacagtcttagctcgggtaaggggcggctgttgtaacaacataccacagaatgggcagctgacaccacagccgtttatcctcccatagtcctggaggctaggaggctgagatgaagatgtgggcagggtggttcctcctgaggcctctctcccgggcctgcagatggccaccttctccccgtgtcctcacgtggccattccttgtgtgtgtctgtgtcccagtctttctaaggacaccagtcatactggattaggcccatcctaatgaccctatttcaacctaattacctctttaaagaccttatctccaaatcctgccatactctggggtcctggggatttggacttcaacatttgaatttggggaaacaaaatgcaaccccccagcactaacaatcaaaggtctgacaggacgggtggagacgtcaggtcgacacagaacgttctgggcacaccaacaagagctgggtcccccaggtgaggccgggggctcctgacatgccgaaggtggccttactcatcattcaaggctgcttttccaatggtgcctggggacagggggctaggtagagggttgaagagaggcccagggtcagattttcaacacaagcctgcaaacaacagcagatctatacaaagaatggcagtacaaaatgaggacattcgagactttattaactttctctgcttccttcaagagctcaccctaactttgcttctgtgtctcctttgtcaggcttgaccctggaatccctaattaggttcacattcctcaggaagctctgttatcccactaagcgtcaaagcccaatttagcctgctctaatccccatgagaaaacacccgcccggcagacgcaattaaaccttctcagcctgcgggctgagaaccgggacaggagcggaagagaaagagaaggaaaattcccagaatcaggtcattatatttttccttacagttaacaagcagctagtgaagatcatgtctgtggcacagtaaaatgaaaaaagaaaggctcaagctttcccagtccttggtcttggcttggtctcggctcttctcacctctaggggcctcagtttcccctttcaatccaactctatggaatctaataatttttagacaaaagagtagtgcccctatcccagatgggcttagctgaacctactggaaccttctttttcattctttacttaggctgtgtagctgtttaacattggctacctttacccagttgaggcccatggcccacaaggcagggccaggccttcgctggcctcaggcaaacaagttaccactggtagggaatataatagatttaaagcaaaagcatagtatcctgtatccattatgtcaccattatttgtctcagatcagaaatcaaatgtgaacctattgttggaacaatgtccaggggattctcgaagtggctgaaaagcactttcaggatcacttgcatgctgtatacacaagtcccagcaaagggcacagcacaggatcgctcgggggcccaaacgccttcctgcagtgagtctgtcttacaagaccagggctgagcagggaggccaagcatctcatggtgcagccgaggcccgcagaggcagaatcagggtctacagacccctgaaggccaacacttaccacagtcctacgccttatcttttcaaaaagagaaagaggacatctggtgattgataaaatgctaatggcttgcaaaaaaagcaagaagaaaaactcataaatcataaatccaacctaattgcagaaagattaaaaggtagtattgagttgatgaaccgtctttttattagagcattataatgccaaggaccaagatttaactgcatccacattactggatccatttccacaaggaaaatccaggtcccaactcatgcattcctcaccagctacatctgatcagcctataattctcaccggccacctataattaataataaagtaataaagtactgacactgacatttgtgagtaatttacattttaattcatcagaagagactgatgattacctctacaataacatccctgcatgctattgcctgaataagtttagtaggttgtgttttcaaagacggtggcatcacacagggtcttctgtaaaggaactctgccattcccccatcaagaggtagagtctgtccctgttcctcttgagtctgggctcgtcctgggtttgccctgtggcctgctgtgagtggtggaatatggcagaactccgaagcctggccttagacagctgcagttgccgccttcgcctggagcatcccattcttgggcccagcccccataatgaagggaagcctgaacagccgcatggagacacctacaagggggcaccgaggtgcccagtgccaatcgttggaaatgggcatgagggcgtttgtgaccttctggccacccagtccccctgtcagcaccacatgaagcaagcactgcccagccagctcacgaatccatcacagcttgttggtttcagccactgagtgtacaggggatttgttaggcaacaacagagaacagaaatagtgtgcccagcaatgcgcacagccccagcatgcccagacgagtgtgttgggcaccagaatgccatccttcagtgctctgtgtcgggaagtagaggaaaggggctcaaaatcagcacttgaaaaagccaacagcagcaatgaggccatgagctgtcacagatgaggagatttcagccgccgatggtgggggcaagaggccgacagagcgcggctgtggcttcagcacgaggcgggcagacatgacccaggacactagccagtgggcagagaggcagaggggcagcctctcgtccatctacgctgcgattcaccaaaaaatgcatcaggctgaacatgcacggtatgtggtgttcttgaatgtaagcttcggttttaaacaaatatgtattttaaaccatatatatactgtttcaagccccagagtgactggacagaaccgaaaaagctctgtctttgcatccagagactgaaattagggcaagccctctgcttctcccagctggctctgatgaatttacggagactgtcctctgtgaactcaattttcctcctcatctgtgacatagggataatacgacctcgcggggtggatgtgaacctcaagctcataggaaagtcttgacagtgggactatatcaaatatacactgtcagattggagtgagggtgaaaggggaccccacggcctttcaaagacagcagcatagttaccgaaggccatctcagtcggccatacagactttgcctctctcctgaaacacgaactccatatttttcagactaggcatttcctggacaattttctgatgatgaggctgcagcaatgagactgattcatgataatacttaaccaggggcaaaacagacatgtccctcgccccgtcctgttcacctgaaggaaggcagggaggaaccactgcccaagaccataggcctgagtgggacggtgaaacccgagagtcatgtcctacagagatggccccgggtgtatgttgatgtgtgcatggccccatcaatcacagccagttcctgagagcgatcctacaggctcctggaaggacgggtccagatgccatgcctgacaccatgaacattctaaaacactcaactggtagtctaagcaaatgaaggaacgctttttgattttgctttgatttattcatgtttaacatacaagttaaaatacctgactctgaagaagctgtaggggcctactgagtggggaccttaactattggcaccagaaatggctccctttccaactgtgtgccagtgactcctaatcccactcacgaatgacagggagtcatcatctcatgtccaccctacactggctttctgtcatggctctggccaccccacagtgggggcagcccctcaccacagctctctgtttggccagcagcaggaaggctgggtttggagcccatgtgcctggtgcgcaggccttcatggaggacacagccgcatatcggcaggctgccctgcctgccgcacggtagactccagggcctggcactgtcagctccccacacctgatctcttcttatcctctttcctcacctgcagccaacatagtccaggctcaactcccttgcctaaccctacctcccacctgtgagcctcagcccaggctgctccctctgcctggaaaaccacctgcccacctcctactgggcaggtgcctgtgcctcaaggcccagtggcaaggccccttcttcaggagacacacaaataagatgtgcttttatttctgcttcaagagaagagcacagaaatgttatgaccctctgctcctgtgattttgtaatatcctcttcttattttaaaggaaaaggtccaaggaggcagtaacactaaaacaaagcacagttttccgaggcttttaaaatgaggggtgggccccacatccaccagggagcaggcaagcaggtgtttgtattttcaaccacgccagcctcatgctgagaaaggcggggttccggacatggagctctggagcaggaggagctcccactgcctgtgagagccaaggcccgttcatcaggacggcactgagctcacagggagcagagcctcgggcgatgacatcagctaatgccacccccagctcctgcttcttgggggtctgtggcatctgaggtttccatatgaaatcaatagcaggctcttcatatcaagccctggcttccactgacctgttgctaatgacaaggcagaggaagtggtcacccctagggaggggatgcccagatctcgaataaaaccaccctccagagtgaagcgcagagctctgacagtcaatgttcagtggtcatccgtaaagaaaaggaatagcacaaataagtgagctggtcacttcgccagactttgggtcagttgtctcaacctctcattcattcattcattgcagaatggcatatcaaatatcacacttcggggcactcggagatgagaaagaattagcagttgccttcgaaattcagtttaaaatggaagaaaaggtataaacatacaacagttattcagggaagaaaatggtaaattccacaaaggtaggcaccagagaaattttccctgaaatacattttggcaagagtgtttaacaatcacatgatgaacagtttgggttttaccaactgtcctttgctctaaagaaggctgacaagaggccgggcgcggtggctcacacctgtaatcccagcactttgggaggccaaggcgggtggatcacgaggtcaggagatcgagaccatcctggctaacacgctgaaaccctgtctctactaaaaatacaaaaaaaaaaaaaaaaatagccgggcatggtggcgggcgcctgtagtcccagctacttgggaggctgaggcaggagaatggcatgaacccaggaggcggagcttgcaatgagccgagatcgcgccactgcactccagcctgggcaacagagcgagactccgtctcaaaaaaaaaaaaaagctgacaagaaaagaaaacatgagaaaccctaagagctcacaacttatcaaatcttttaaaattaagcattgagctgcaaatggccaactggccaactctaatgtccacataagcatatttcatgaaacccaaactagttcctgctggtctgaagctaaactgccacccctgttcacaaaatcttgataatggcattccatttaactctaatgtccacataaacatattccatgaaacctaaactggttcctgcaggtctaaagctaaacttccacccctgttcacaaaatcctgccagtggcattcctctctgcccagtgtctcaaattcaaaacctaaggattactcacaagccgtgcctctgacccaccgggtgggtatgccaatcctaacaggtctacctttaaaatgcccacaagtctacttcctactgaccccacccattgttcaaggttgggccactccagctcttgctgggcagtgctaagctttctaaccaacctcctgaggttcaatcgactcccctccaaatgctttttagaagtaaagaaacctctgaaaaagcgaaaggttttagataaagattctgaaagcagaatttctcacatcacagtattgcaaccattcagccattctatccactccacctcccctgaaagacacagttgtgagtttgttattctaaagaccttctgaacagggggcagtttccagtgataagggagggttaacagctcagatccttgcacaccgctttattaagaacagaaaggaagcctgcgggcttcggaaagttccagggtaatttggagttgagggtgcacagacacacacacagtgcgcagaaaggcaggagttgaaatgcctagaaacacacaaaaatgaactccgccagctgctcccgggaggcggagagagggcgccccgcgagctatttctgtgcttgacagaaaatgggagtaggcacttcctgaatccctgcctaaaattaactgctttacaaaaggggggaaggggaaacccatggtgaaacaagttttattttacaattcaaaatctggaggtggggatttgaatgcttcgttatgggttttggccccgctgataaaaatgtggctgaaaaaaagaagaaatgggggcttcactaggaaacctacccttcagaagtagccccacaaaaataaagccagcggtttgattagaaacgttcttctccccggcgcctgtagtcccagctactcgggaggctgaggcaggagaatagcgtgaacccgggaggcggagcttgcagtgagccgagattgcgccactgcaccccagcctgggcgacagagccagactccgtctcaaaaaaaaaaaaaaaaaaaaagaaacgttcttctccccatggaacgtgaagccatgtctcaatgagaggcatgaaggcgcatgcacagcaacactggtgcagtcgccagagagcacaggcttcagtgccgcacatcaactaagtgcctgtcctgtggtctagggggctgagactcatggacacacacgctgacaacatgagagggcagcgtctggggcaggggctgcacgagacagagtggggtatctggaagtatggtgggcacagggccacgacccccgccctgaggacgaggcctgcagaggtctctcctagcctgacagggatggttatgtcccaacaggggcgggcttccaacacctctcccagcctgaactcaggctctggaagacctgagtctgaacgggccatagagaggtctcaggaacaagatcccactgggaacctacactcagagccagaatgcagtctcccagccagagccagggcccaggactgccagaaagtcccggagataagcttctgcagagatgacattgctagatgccagggtgggtggcatccatgtggaagaatgactgtagtagaaattttaaaaagatgcactgcatatggtgtctaaacattgaaagagaacaggccgttctgcagctccccaactgcagcacaccttcctcctccatctcggcagagggaaggggtaaggacagaccactcaggagagcagtggacgaaaccacacacattatgacaagtggatttctaacctggacagagccagaggcagggtcagagaggaagagctgtgatccagaaggagcacacggtgccacagggctggggagaggccccgatgccacccagcccagaagcccagaggtgaagaggccctggattgaggagaggagaggaccccagtgagcctggaggaggggtgacaggataatgggaggaagcatacattatagactctgagcagttcaaaaactgaatggtggtctgaaaaaaggggtagtaagataagcacgtcaaaaaaggacatcactgaacaggatgtgagctcacacaggggaatacagagtttggggtcttctagaaaggggccaagggctcctgcagatggcagccagagtcagcagaaagagcacctggggccacatgtgtggaaggagggacgtttcccctgtgaccagagctgatgggcaggaggtgctggagccaaatggcattttcaggagtgtttcaagctgattaatgtcaggctggtagcttggaagcaggcggggggaggtgaggtattttcaccaggggaatcagcagaggctgccaatcagcccgctgcacccccagcagggtataaaccctcatctgcacaccaccggccagaacgtgtttcaagagaagcgggagtaaaagcgatggtggccaacgcaaacagagtctgagtgggagagtccacgcacacgcagtacagaacgccaggcacaggtgagagaggcggagggctggggatgcatctgtacctgctcgtcaggggcttgtgggaaatcacatcagaagtccaagaccaagcaggcagggacacctgcagcacccagctctgccctaggcccagataccctggctgcagcgatgtgggccaggactacggaagtcctctgtggggtgagccaaggcagggtgagcctgtgcaaatgcaggaggctggggggagtagaaagaagggcagccagtcaggggaaaggtcacagagctggccagaaccaaggcagcatcgagcaagaggcacttggattccagtgtcagaaaatattaagcccacggctctgccattagccatatggaaccactttcaggtgggcctcaggctaagtctgaggcactaattaagcccactaaatggaatttgtttgcttaaaagagcagaccccattctcagaagaaaatttagaaaatatatatactttcttgtcatttaacagttaataaataaaatgcatagtgatttatgctagcggtaggcaacatttcatgaaataaatctactagcgtcagtaccacaactgcagaaagagtagtttccagcaactgacactgtagacatctacagtgattcctaatacaatgatgcagattaaggtattaaaaggggaaaagagcactcctgcagaagccaccaggccctgtgcttggggagctgttgaattcagttctccgcagtcctcttagtaggggttaattcctgttttatagaggaagaaactgaagcccaaggtcacatgggtaagacaaagcagagtcaggatccagacccaggtctgttattcattcttctcttttatgagtcctcaaagtttcagaagctgcttctgagagctacacatgcaaatttccattttgtacttctgttctcccaaagaggccaggcaagagaaaataagtattcgcctagtacagagtttcacgtatggaacacacacacacacacacacacacacacacacacagagcaggaaatgttcaccgcgtgctcttttcttttgtttttgtttacactggagcgacgtgtgcccatggatgcctggccttgctgctctgtcccctgcccctcgagctatatggggctccctccaggaccgggctccccaccctggtctatctgacccagtcagggcagtcactcaaacattcattactgtcaccatgaaagtggcatctgttttgaattcaggggcctcatcttctctgggtgtcccactctgtcatcagagcctggctgcatgaggtcagctggccccttctctcctccgtgacacccctggtaaacagacacccaacaacatcccgcagggtggaggtggggagtgaaccttaaccaacagcacgcttgtccaaattatttctcaagtaatggaggttctgcagggagagcttctttctcaggttagaactggtcaaaagacacagaggtggggttcagaagaagatttccagggcacctcgaaagccctagtttaatcaataaaacacacttgcaggcacggggtgcccttgccaacagcctcctaccctcccatgtaaccacagtgccatggaaagttaccctcatttcacagatgccgagagtcaaggcagacaggcctggcctgagccacgtgcaggatgcagggacccacattctccctccggctgcaccttctagcctcctgcccaggacacagatacagatgctggctgcagagctgctaattaggttactggccacgtagttaaaatgatgtggcaaataggtgcagattcattccaggtatgtgttgtttcatctgttacaacacaatgtggaatgaaaactgatgattcagagaaaacacaggatacattttaaaattatattatttatttaaaacaaatatcttgtttcaaaagatcataattctcttttggcctctttttggggcagggctaggacttcctacacaaatatagcttacacttatgccgcactaaaaaacaaacctgccatcacagggcgagaacttcactcataaccagacagccaacatggtcccgtcagcccggccaaaggtcaccaccagtttcaaagacctgtttcctctggtgtaaagtggcgaactcagtgacttcccagcctgtggaatgccagcagggtcaccataaagccccgcagatgccgagacggtgcaaggagcagagccccacagggcaaggccccgagctgctggcagctggtgtcgcccagctgacgcacttcctcagttgacagtggcttggtcctgctggccaccttcgagtccaagaaaggcctagaagtccacaatgaatgcctctgattgaggctcagattactagggatttagaaaccttaattcttttgtacaaagtataattgtgctgacatgaaaagccaaatgtggcttgctgactttgagagtgagcctagagcccacatggtggccttggctgatgggattcacacagtggggccacttcccagactctgggagtcaggagtaatagttcccagtagaaaaagagacacaggtataaacatgcctctagtaaggtgttaatgtgtaaagtgactttctaattaaaatgagtcaaaaatgattggtgaggacagcctaccagaaaagggatcttacaggaaaaggaataaaagtgtcctcaaaaagagcagaatttaaggatgcttcatggttcttctgacagtagtgacaactagcaaaaaagaaagacatggaagccaccaatcagtacccaccttgagtaggtgaatggagggtaaactgtggcacatccagatgacagagtgttattcagctgaaaagaaatgagctatcaagccaagaaatgacagggaagaaatttaaatgcatattatcaagtgaaggaagcccatctgaaaaggctacacatgtatgattccaaccctatggcattctggaaaaggcaacactatgaagacagtgaaaaggtcagcggctgccggggtgcaggagagagaagcgcggcacagaggatttctagggcagcgaaactactccatacggtactgtcatggtggatgtcacttatcatgcacctgtccaaacccatggaatgtacaacacccagagtgagccctaacgtagactgtggactcatcaatactggctcatcaattctaacaaatgtgctgttctggtgcggcgatgctgacggcaggagagtgtgtgtctctgtgcgtgaatatgcatgcgtgtgtacatgtaagcacgtgtgtgtgagccctcggttctttcccctcgattttgcggcaaatctgaaactgctctaaaaataacatcttctaattttaaaaaccattttaaaagctgtcaaacattaaaacacacacacacacgcacacacacacacacttggcaaacataggtggagacctgcaatcatctggcagaatcagactctcatttcgtcctgtggggctgcagacagaagctccctgtggacagcacgctgcatctgggtccagctctgtgcacggccgagagctaccctcaggaaatgtctgctgaactggctggcttaaaaattaactgcctccgcccttagagcaagaagtggggagggaggagaagggatgcccgtgtaaacatttactgagacggcagagagaggcagagcccgtgctggccgcgtgagctggggcaggaccatcgcaggctttagcaagagatgcaactgctcggtcccagccctgtcacctgtaagagggagcagaacaagcctcctcagacagaagtgtgacgagtaaatgacagagcatatctaaagcactcggcagggtcctgcagatccctcaacagcgctgactgagtggcattccttctgcacaggctggacatggagagatgtatctcatgacatccctaaaaatcctatgctcaaatgaagaagctgagttcagagggagtaaccatcttcctgaagctattgtaaagggtacaaataggggcaggaaagagatgaactcacaaacaacaaaagagcttttacacgcagggccagggattttccttttggttatgaaaaacgtattggtcctggctgggctcaatggctcacactagaatcccagcactctgggaggccaaggtgggtggatcacttgaggttaggagtttgagaccagcctggccaatatggtgaaaccccgtctctactaaaaataaaaattaaaaaaaaatagccaggcgtgttggcacacgcctataaccccagctacttgggaggctgaggcagaagaatcccttgaacccaagaggtggacgttgctgtgaaagatcgcaccactgcattccagcccgggtgacggagggaagaaagacaaacagaaagagagaaagagagaaagggagaaagggagaagaggagaaagggaggaagagaggaagggaggaaggaaagaaagggaggaagagaggaaggaaggaagggagggagggagggagggagggagggagggagaaaggaagagagaaagaaagaatttattaggccttgttactagcaaattcagatcattcattcctagtgaagaccatatgaagaaaggccactacttacaccttttggggaggtcaaagctgacaccccaaccttaaaagctgtggcaatgagcttcaccagattccatcctccaccaacagcccagggagcaccaaccctgctgaaggtggggacgagagtctgcagcctccgtggcctgtgtgctggcaggaaagacaggcccctgccctgagcagagcggagctggctggtgggatgctggagagtggaggctctggggccctagacagggtaaggtctggacatggaagatgagacaggctcaaagaatgcagtaaccgagagctcagggtcagcaaagcagcagctcccacagcctccctccttgtgcacgggtgagaaggtccaaaacagaaacgcacagctgcgacagccgaggcccctgcagggttgcaaagagctatgggaattggggagagatactgcccctgctcactgtctcgtgggaggactgggagtctcggacaagatgccacggatgtatgagcagagccttcatggggaagaagaggcctgagccatgcgggagtcagagaattctcaggcatcatttcatgagagagaaatagagatgcagcccaagaggagtgagccccaagccaagcgggagagacgctcaactcgtgttttagagaagttggccctggagctggagttcacaagaggcatagtaggttctgtaggcatacgagcaaggtgggctaaagtcacccacacaaacctcagctccatttctgatacatgaagatggcaaagcaccaaaaagaacacatggaacagcaaaaatcagaactttgaaatgcaacgcccatgaattctgggcccagaagctaggtgacaataggtaagttgtttcacctccctggggtctcgaggtttttcatcagacaatggggagagggggctggagaggtcaatccctgggacccagcaggcccgtatcccactgcacggcagctgcggctcttagcatgcagagaaaaggagtgatctgaagatgaaagttaactgccagacagaagttaatggttgaaacttatcagttaggccactgagcgtctgttgacgcccaggatgaatgtctagggacagtttctgaagaagccataaactctaggtcccgtgttttccatggcagaggaccaagtctttgccctgggcctgtctggtggaagtgaaaaagctcctgcatcagccgcagccaggacatggggatccctgatgggagagcccagcaaaggcccccagggcagcaggcgatgagggcagcagggggttccgctgacttccccaggacctcctgtagtctcagcttaaaaagagcagcaagcctatcacaaagttctctctccctcaagcagccagctggagagcggggaaaggctcctggcttggcaagtgcccagacgtagcaccgggacagtggaagaagatgctgaggccacctgcaggagccaagaggctggacagagcctgggacctctctcctcttgctgcactctccttctacagactcagcaaggaggcaacaccagcactcctgtattttatatccaagaagggtgcaaaccgaggcacatgcagagagagaaacagcaagctggaccttcgcagccaggctgcaaaggctgaggatgagccagggggtctgagagcattggagcccaggtggtaggaggttctgtgtttttcctggattaaagggggagctgcgcatcgggaccctgtgcagggcatctccccaacattactcctgcgcatgttcccctcactaactcctgcgtatggtccctacgtggggtcttaagtttacaaaaaaattatctgcaggtccatttcacctctgatgattcaagatgatactcaataccctacacaaagtgcaactctaaggagcaaatgtgtctgcaagtgggcagaggcggaagaggcatctcaccatgatgccaggctgcaggtttcaaggataggattcccatgcctccatctgcttgcctaagctccccttcatttccttcaggggggcaccacctgccaccctttcctcccccttctcccctccccaacatctgctttcctacaactgcttcatttctcctacttcttttttcactcttgccagtaagtcaagtgacagccaggaaaaaagcaagtcatgatgcccacacagctcatgtggctcacatgaataagcactgcattccaggaagcaaaacagttgaaatcccaaactttcaagtgattgtacatacattatgtgacttccctgaaacttaagtattaacataaccaacagctaagagaaagttatttttctgtttattacagaaacctattattcactttttttatgcaggaagaaagtgaggctcagggcctatctaagtccatgtgggctgctataacaaaatattgggaggcttataaacaacagaaatatacttcccaaggttctagggttgggaagtacaagatcaaggcaccagcagattcagtgtctggtgtgggcccttttcagggttcatagagggtgccttcttgccatgtatgctcatggcagaagaggtaagggatctctctggggtcccttttataaaggcactaatctcatttatagacactccaccctcgcgacctaatcatctccccaaaggcctccatttccagctaccatcaccttgggggtcaggtttcaacacaggaatctgggggagacacaaacatcaagaccatagcaagggggactagaaaggcttcaggagacaaaaagccccactgggatccaagtccaggtctctgcctccatccatccactgagctgcatggcctggcctgagaggacatactgtccaatggctcaagaagagagtgatagcagtcttttggcgcttctcaaaatgtcccaacgatggctctgcctccctgcctgaggcaggtccccagctgctgtctcggtccccatttctgcaggatggtttctccacattgtcagtgccacagaaggggctctgagggcctggatgggaggagcctgtgacaatgtcactgacagcagcagatcaacagcaccaccacacaccagccacatgctccagggcatgtgtggagcctgtagacacaggcgcaagtgctcccacacagaggggaacaccatcgagggggtttaacacagcacacgctaccacccagtcttgggtctgatgccagaccaaagcctatgagctgaaccaaggcttcatacttgcctgagcaatctgagtgcagcgtctaaggagcccactgggcaatatatgtaaacacagtaatgaaggactcaaaagccgagtgcaataatgtgggagaagccacagccatattcagttcctggaagaccgagcggctcccttagccacataccctgcaggagcagctggggagttatggccctcatatccccaacaacgacggcattatatttttggaatgagaaggtgctttgttattgccaggggctttctcccctgtggttcaaagctgtattataaaaaaaatgaacacggatatatttccccacactgtgatctgataggaataagagcttatccatccctcagcaaactgccaattgctgccgttagaaattccatattcagtgatagttaaggattttggaatacactttgaaccaaagaattcaatcccttaagcagccggcgacaggcttcatttaagaaatggaaggaacaacagcaggctcatctctgcggctgtggctcagaggtggctgggcccacaacagagtcaggacaagcagcccaccccctcctcctactccgcagccgacccaaggtgcaagcaatgcggacaaaggcaccatacaacaggggtgagggacaacacatcccagtcctcctaggggagggggaagctctccaagtctgaaatgctcccccaaaggtacaatcttcccactcaccactgcattcagaagcactgctcccacaccactgaaggtgcacagcaccccaggaaaggagcctatctgtggacaaaaaacctcaaataaaccacggtcagaaatcagctacgcctaggagtgtgtgaacaagaaatgcccactcctctggaaaaggggaagccctctccagagcagggtggaaagcaagaggagaagcgctccacacagcccccaggaggcccgagaagtgcaccccacatgacatctgaaggaggcagccagcaaggaggtgtggccaggtcacaggggctgctggtctggggttcaggaagggggcagcaaggccctgtgccatcctctctgctcctgcacgtgctcggcattctccataatgaagactttaaaaagtctcttgggagaaaagaaatagagctatactagtctagttcttccaactttgtgtgtgtgtgtgtgtgtgtgtatttctgtgcacacatatgcatgtatgcgtgtgagcacaaatgtgtttgtgtgcatgtgtatttatgtgcatgcatgtgtatttatgtgcatgcacatgtgtgtatttactcatgtgtgtgtttgtgtatgcctgagatcgggagggtcggggaaaccagccgccctagtcctcacatggaaaacagacccacatgcagtgagttcatggtaacatgaagtcagcttccagcatagccttccactcggagccgaaggcagggctggaaatgatcaaaacagctgacccatgaggtctgtaacagtagcaaaatcccaagactctaaaactcctcttccctggacctacagccatggggacaacctgtcagggcacctacagagcccccataggcagggccaaacagtagatggggcaaaacactgctgacaccccgactgcagacccaaatcatacttggggattccgtaagtacagccaccatccccaggagatctgaaggtgcgagcaccaagacaacgtagaaaaccatgtgcttcttccttggggtgtctgtcacttcccacacggcacttccaggccacctcacttccccactcaccaaaaccctaagcccaacaggacatagccaggcctcctttggtcatagaggccatcgggcaattgaacctctctagagactcacaaacctcagtgaacatcactaaaccttactccagggttcccaggtttccgtggcagctgaaaaccccaatccgtctatgcacaactatctccaaaatgaggcagaaaagtctccaggccaggggaatgccctggacctccctgctcctgccctctctccaccgagaggcagtatgacaaggcagtgagaaaccagggaccatgtgccactgagaaggagctgttgatgtggccaggggacaactattgaattcttatctgaaatcaaattcttaagaattattttccataatcaaaaccgtggatttcaaagctctttggtttatccttgagatgaaaagtatacaccgtaccccagccctggctttcctaaagagttttctttccgtggctgcagtccaaagaggcccccccacacatatcattcaatgaaggccaagtcagctataaaaagtcccatgggaaagcaacggaatgcttaccttggcttcacatttcttgtggcaggaatacttgcaggctgggaaaaaaaaaaagagaaagaatgtgtgtcaagcagtctctctagcaagaattcttacatcttcaaaccctctcaatccttcagagtctctggcttgaagatcccataggtggcctctctctggcacgagagagatttttacatatgacacacggcagtgtggacagaaggcagtgaggacatggtgtgcaagagcagagttacaactgttgtctgttagcaacagctcaggtggctcaggtaggaatgtcttgggagcacggtcatgagcagattggtttttcaaggggtcatgagcagattggtttttcaaggggtatgtacgtccagccgaactggatccctaaagaagaatagtgaatttcagcagcagaatgcattcgtgtgtgcccagaaattatagctgatccctgaaaaaagaagagaaactggaagatgccccttaagaatcagaatttaaagtgtccatgaaagaccggatgggagcctttaaatttgtgagaaagtcgtgcatctggatttcggaagtgcttccacttccggccaacctgagaactgactgtcagaataaattcatgtctaaattcctataggagaatccttccagaggggccattgtgtgaacggagcgagtcctgtgtcccttcggaggccctaacaatgcaatgcagagctggaaccaatgcggatttcacaggcccttctgcccagaggctgcagctgtgatcatgaggcataaacctccccacgagcaccacgggcatgctgcaggcaggccttgcaggacagggagagagaaatgaagcaacaacacctaataatcccaacacagcctcctgtgccagctccaagggaacgtcgggtacatgccctcccttcccccacgtttgccagcccacagggacagctgtgggaggagggaaagagacctgggttggggaacagtgaccaaagcctcctatccaggctctgcccctcaagctgggtctctgcttcctcccacggagctatcatgggtcaaatggaatccttcaagggaccctgctttgaaactagaaagcaatgtccacatgcagaagtgtgtgggacctgaagaccaaggcctcagaagtcagggagaggggccccacatcccagctctgcgtgtcaacaccccgtgaatttaatcaatgtctcactccccctcctgcactctgttttctatgatgtgtcaaagtcaaaaaggtttgtgtagggttgaatgaggatgaaacagataaggtcacttgcccactgcctggcaattattagaactccagtagttacagctaggttgttatctttgtatgatctatatttttgaattgctgaattgtcattctataccttgaggtttgtaagattattcacaaagacatgtatttatcctacaccttctgatgggcaaaacacacaaaggtgatcagtgattttcaaatcaagagagacttgccattgggaaacaaggggcttccacacaagattaaaagtccagacagaaaccatccccagcagaggccagcacaaaggactgagataaggagaagggcggtgggcaggcctctggcctctggctgagtgagagtcaggcaaagaattctgcccacacacgtctagcagcatgtcacaggaccacgacatcatgcagcggttagccttccagatggcctgggtgacctcgtctcttggcccccatgctggtgtatagccccctcccacagtgaatcagctgggctgtgtgacagtgcaacctggcagaggagatggtgtgtgacttttgtggctaaaagacatcgtgacttctgtcctggtctccaggatcactcattctgaggacagccagatgccatgttgtgaggacactcaagcagccctgtggagaggcccccatggagaggaactgaggcttcccacaaacagctggccccagcttcccagccacagaagtgtgccacctcggaagctggtctccaaccccaaccaagccttcagatggtgcagcctctccagagaccctgagccagaactgcccagtcacctgtgtcccaaattcctgatcactgacacagtgggagataacagatgcttactgctatgttaaggtactaactttggggatcatttgtcatgcaacacgccaactcaacacaaaaaaatggccctggtcagtgcaagggtggcagtggtatgatacattcatggtgggtggcctactcggccaccagacagccatcggcactgtagggcaaaatcattaaattcaattatcatagtgaaatcatataaactgcccatgagccaagactacaatcctgagaggcagggccattgtttctggtatgtagacaagtgaccctcaaagttttacaaatgtttggactaggacttcacactcgattgtcagcagcatggataatcctcagagtagcaagtccaccgtcaatctatccgtggcccagctctggtcagcaccgcaccaggcagtgtacaagatactttcccgtatgttactgcacttgctcctcgtaagcacctctcggggaggaactgtaagggtgactcagccaagggggcagccatggtccatgaaggtgggactccagcccgtctgtgcatcaaattcagtgtttgcatccagccatactctccctgcctttctgacatattacaaaatatgaatcaaacagtgcccaggcccagcttcctatcctgccgcccacaggagacagccccctgcctgccctacccctgcctgccctaaccctgcccataccaacctcacctcctcattcacgccatcctgcacccacctcctgggcccggctcagctgcctccgttcctgagttgacacccttctgtgccactgaaccatcatggcaggtcatcatggcttgtcatatcatgatgatctccctgtgtccatctctcccgatgggctgcaagctcctcaagggacagcgtctctgttgtgcatgaccagggtctcacaatagcagcactaacacgagtaacaggcagctaatacactcagcacctaaaagtttgaactgcatgcgtattgccaaatttccaccacaccctggaaagaagctacctatcttcgcctgttttactaatgtgagactggggtttgtggatgagactgaggattcacgtgctggacaactgtgtcccaatcttgacctgttccaggtctgctttcagaagcccatagccagcaggcccacaagctatggagacctcattacctgatcaccacttagggattcggggctgtgaaggtgctggccagaagggaggctgcaaaacagaagaagaacttcgcaccaaaatccatctctgaagcacacaggcccagaagacaaaacgtatgtgttcactttgaccctcagccaggcagacccgcctcctttttggaatagcagttgtgtgagctggcagctaaactagccaccttctcaggggatgtcatttttatttgaaagaactcctagcagacaaaatgcagttattcagactcgagtgcttgtcattttctcaaaaatgaagtgagtctgtcatcataaaccaatgtcaaaatttgagatttcaagtgaaaattagaattttaaaagactagtacccaggccaggtgcggtggctcacgcctgtaatctcaacactttgggaggctgaggcgggcagatcacttgaggtcaggagtttgagactagcctggccaacatagtgaaaccccatctctactaaaaatacaagaaattagctgggcatgatgatgcatgtctgtaatcccagctacttgggaggctgaggcacaagaatctcctgaacccaggaggcagaggttgcagtgagccgagatcgtgccctgggtgacagagtaagactgtctttaaaaaaaaaaaaaaaaaaaagacttgtacccatcaccagggcctaacaactcctaggacatttctgttaaaatcaacaatattattaacaaatgtggggattttcctgagattgtataacaaatatgtcaacatttagaagttctgcgaaattgtcagtggaccaataatttccaaatgtccagtgcgtggtgttccacaccgggtaaaagatgcacttggtgtgcaagacaggccagtggattttaataaaacagcgtaggaaaaactctactgacacaatttcagattccacagtgaaactgaactttaagcaactgtcacttgagttctggtgtagaatcaaaatgaaatagctacaatggccggaaaagcctattaaaatgcctccttttccaagtagatatgtttatggggctagattgtctttgacgcttcaaaccaaacattgcagaagactgcatgcaagggtaaccagcctcttgattaaggctgcataacagaatcacaaaaaaaaatgcacctcctctcattttgttgttttgaaacatagttattttttattaagcttatgttcattttaacatgtaattggttcattaccattgcttttaactgacttaaatattttaaatactcatcagtttcccatttctaatagggtaaatcgtgatgaatacaaaccacactgacaagagccctttagggtcttctaggaccctagcagtgggtgcccgagacccgcagcgcgagggcaaccccgttcattctccttgcctgaggctctcagaatggggtaaggacccaactttgaccaacagaaaggtaagtgaattctcccaggggcttctggcgaaggccttcccactcctgtaaacgaagcaagggaaaatgcctcagcttctggaacctccccctctgagcacggagctggacccacaagaagaacctggagaacttgggttgcagaaccggggcccaggcacactgcccggagcctgccggccgctgcacctccccctgcagaagacacatgccctgctggctgggagaggctccttccatgcagccccgttattggctgccacggtgccttccacgaagctccatgtactttagacgccttgttccacctgttcccatggggaccagggagaaagtcacattctcactccgttgcacgaacagcaaactgcagcacagagcggaagctgcctgccctgggcgacagagcaggttaagcagtgacaccagctgccagcccagctctagatgggcagagcccacctcccagagctggactggaacacccagtgagctggtgtgcaaaggctcttctgtgcctggtgcaagaactggggctccacatgcatgagcccactaaagcaaacatctaccatgagctacacaccaggaccaggagcaggtgtccagggacctcaggagtctgaactcacatgctcactccagcccctctccaaggatccgtgccagtcatgtcccctctggcacacatttccccttctgtaattaggagtagaacagggtgatagccaagattcctctctgccatgaaaagaatagtttacctaagcaataaaaagataaaattacatatatatacaaacaaaatattaggtagctattgaaaaattatgatctcaaactatttcacatgtgagagttcttacaaaaggcaaggctaacagatatacagcactctgtgttgtatgaaataaactttgtgaccgacagacatgcgcggtggcctcatctataggagagaaaatgacactggagagagacctcacaactcagacagaaaggaggagccagacaacaaaactgggaaaactggttactccatgaaaaacatcatcataataataacagaaataccatgaatttcagatgcatcaatcatagaactgattcggaattggaaaagctgaaatgaattattagaataaaatatcagagaacatctttgtgactttggaaaagggcagacattctacaacaaggaacaagagtatgaactaaatgaaaagatgagtagatctgaacaaaccaaacattacaacttttgcgtgacaaacaggccacaaacaaacttagacaagcaactgactggaatgtttgcaatgtacaaagtggaaagataagaaactgaccttttctgaggacaaatgtcattagaaattggcaaaagttctgcctaatatcacagataagatttagtattcataatatagtgaagtctcagaaatttaaaaaaatgatttttaaatttattaattttcaaaatgttatttatttttttctttttagagatgaggtctcactgtcacccaggctggagtgcagtggcatgatcatagctcactgcagcctcaaatttacaggctgaagcaatcctcctgcctcagcctctagggtagctgggaccattggcgcgtgccactgtgcaggccaatttttaaattttttgtagaaatggggtcttgttttgttgcccaggctggtcttgaactcccggtttcgatcgattctcccgcctcggcgtcccaaaatgctgggattacaagcataagccacctcaccacgccctaaaataatctaatttttaaataagcaatgaacaaaggatttgaaaggctactttgctaagtaaacagaaatgctgcaggcagcttttttgtatctttttagatgttcaacctcatgtaatcaccagatgaatgaaaaacataataaaaaggagacatcacttttcatccatcaacttgcaaaaactgaaaagctgaaaaatctcaagtgagagggtcagtgacattccatgcaagtaggctccaccaaaagcgttttcctgtgaggagcctgaaccttctccagcccagcttaccctccggcgtctgagctggtgtgtggcaggccccttctcgtggctttgcctgaacactcggctccacagctgacagtctgcaaaccacacatcagttcccttgtcagacgaggtttccagactcatgtttaagaatcctggctcccgctgcagcagttacagcccagagctgtctggcttgcaaacgcccaacatttttatatgttgtcttggaactgctattcttcacaacgtctccacgagccttgggaatccaggccactgtcttacagggttgtcagaatcttttatacaacactcgaaacatattgaccaagttataaacaagcctgtgagtcaccctctgcttctcctagcatcaactgtcaagtttgccagcctctctgtgtcccagtaacaggctccacaaggcaggaggggactgattaacccacagcgggggaccgccagacaaggcctgcccaatgcccacattcactgctcaaccccatgaccccattgttgccttgttagttttaaataactaccatgttctcctgaagtcctaatactgcacctggcccaaagcaaaaaacacacacctaccgacctgcccgtctatctccaaacctttatctgtaatcacttagtgtattgctgactccgatggactcaaagacaggacacaaaactctcatctttctctcctagcaggtgcttaataatgttgggttaactgcgtggaacaacccattaccaaatctttcttacaaaactcccttcatcccactttccctctggtctcctttctcagctttctccttgcttcttttctcctttctccttgcttcctttctcaactctcatctcctttaggccttccctacagctgtctctcttgttgcagcacttctttattctgtgccatcctgtctcattccatgatagtctcgctgattccactattagatcccagaaaaccatctctcaaatggggagcatttatgcgtggtctgaccctggatcctccctggatctaccttcttccagggaccaagtcccacaaaacttgtaacttttggggccgaatctactcaattccagaatgccgagactcacccataacagcaccttcctctgtcctctgtgaaatacaaccattttgggatatcaatggcaactggaccatgttaggccacccaagggaactcagtgacatgtagtgagaacgggttgcctcagagtcctaactgatggtatgagcacaccagcaaggttttgaggagtgtaagaaaaaccacaactggacacttaaccccattgctcaatgtcatttctatcttttctttcccttacttaaagttccaagagtagagataacagggcccttacatgttaacataacagtttttaaaagatgaaatgttttctttctacttaaccacatatgaaatttgcatttaactaggaggttaaaatgtgaaagtcagggacctgaaagtccaagaatgagccagaaaaggaacggtagaaatactggcctgcatcacagaatatgcccctaacccttctccatctatcatcaccatcagtatcatcacgatcagcatcatcatcacaatcgttaccattgccattgttactatcaccatcaactacactatcactatcaccatcaccagtcacagcactatcattgctgtcatcaacatcatcatcaccatcattgtcaccattcatcaacatcgtcaccatcaccatcatcatgtcaacataatcaccagtgccatggtcaccatcaaccacaccatcaccatcatcatctccatcaattacaccatcaccactcaccatcaccatcatgatcatcttgaccatcaccatcttcaccaacatcataccatcatcatcaccatccccatcaacaccatcatcactaatataccatcatcatcaatcacgccaccacccaccatcaccatcatcgttaccatcatcaccatcaattacaacatcattatcggcataccattgccaccctcatcaccatcactaacaatatcattatcaccatcgtcattactgacaccattgaacactttctggagctcctcagtgttctttgtgtttcatgtgtatttaccctgctattcctcacaatgactctaagcagaaagaggcagagcaggaatgctggcaggctgtctccaccatccacctcacctccaccacgctctgctgcttccccagaaataagccaaagaaagaacacctctaccaaaacgtcacatcactgtgatgcatgatgacttacataatctatgtaaagggaataccttgttgtttccaggtagcatgtacacaaagggatcaaaatgcaaatgtatatgacatatgtgaattattagtagagaacactatgaaattgtctatttggggagtggtctctatatagtctattgagaaagagaaaatcctagagattaactactctaatgtacaaattgtaaagatcacggcactgaggaacagaaatagggtgcaactgtccagggccacagcttcctgtggagcagcccatccctgactctgccaggctcccatctacacttgcagtgactgccaggaccccatctcaactcagtgagcagagtcctcacatcctgcctctgtcccatctaaacttgcagtgactgccaggaccccatctcaactcagtgagcagcatcctcccatcctgcctctgccttgtctacacctgcagtgactatcaggaccccatctcaactcaatgagctgcagcatccccacatcctgcctctaccccgttctacacccacagtgactgtgcccggctcccagctccaactcagtaagcagcaccccctaccctgctaatgccccatctacacatgcggcagcacgtaaggagatgggccaggtccgtcctcctcctactacgctgacaagagcaatggctaaaatgatttcctgtgaagatacacaaacacacacaaataaaaatctagctcttgtgggtcaggagcagtggctcacggctataatcccagcactttgggaggccgaggtgggtggatcatctgaggtcaggagttcgagaccagcctggccaacatggtgaaaccccaactctactaaaactacaaaaattagccaggcgtggtggtgggcgcctgtaatcccagctactcgggaagctgaggcaggagaatcacttgaacccaggaggcggaggttgcagtgagccaagaccacagcactgcactccagcctgggcaacaagagcaaaactccgtctcaaaaacaaacaaacaaaaatctagctcatgtgttgtatcccaattcagcctggtgtacttacacaggctctttttccttcacagtgtcatggggtgtgccaattctatggtcctactggaggctggccaatgttgactgaagacaagaacgcccaaccttgcaatagaaaccctgctgtgctgttttcctggatggtctccacaagccccgcttcaaatcacactcatcttaccagggctaccagccacagcgtcctgcagccccacgcttgacaaaagaaacctagaggaaaggtgtcattaccaatctttacccccgaaagccacccacagggcaagcctcagataagtctcgtcgggaaagggaaggggaagagctcacccgcagggaccttcaccacctccaacaaaccagatgtttgtaaagatacaaagctaaccacaagttaatactcaccaaactaaatacttctaccttttattccctccttaattccaccagtattcattaatacccacagctgaaacattttgtaagcctataaatatgtcctggacacctacaacagggcagaaactgatctggacctggatactattgggaacacaaaaaacattcatgaatgtacactgcagtgcaagaggaaaggaaaatcaacaggaaccgtggattcaatcaggatgacctgaggtacaggaaagtaactccaggaaggtgcagcgggagcctaaaggcggagggagggttccacagtcatttctgtatcgggggtcaagaaaagtctgaagagacaagaagaaaaatagcagcaaatgggtgagaaggtgacagggagctgggtcacacagcctgagggaggccaccacccaaaaggcactataaaattaattgttgagggcatcaaccaatcaataatcaatcaatcaagaatcagtcaacaataatcaatcaatcaagaatcagtcaaccaagatagtcactctcacaaactccagtatttgcacaggcctttgtggcaggttgactggggttgcagagagcccaaggctcttggctgcacccagcctgcctcccacagcaccatttcctcagccaggtgcctcccaaaagggaagttaaaccctccagaccaccctctgttgaacacaaactcaggaatggggataaggctcaagatgctcccattcgagacagagcagccctctctgtgcgcccgtgtggcacaggtaggattggatgtcgccgcaaggtccctccgccgatgtcatagggcggccatctccatgctcttatctatttgctgttctcactctcctcacagatcctcacctccccacgccagatctgcccaagaacactgcaacacacttcaagacaacagcccctaaaactcttgaagttttcatccccagatattcagttttactctttctctctttctttccacgtaatgattttcttttctcgaaaaataatcactggggccaggcacagaggccgacgcctgaattcccagcactttgggaggcaaagttggcaggcttatttgaggttatgagttggaaaacagcctgggcaacagtaagacccccatctctacaagaaagaatataaataaataagtaaataaataaataaatcattatccccctcaagggattcttatcgtatgggcatggttcacgtgctcagacatgaatctgatcctcacacaaccccttgatgagtatcagttattgtcctcatgtggcagaccgggaaactgaagcacagagaggcagtggagctaaggtctgaactcacatcagcctggctctggagatcacaggtttaacctttgagcctctcagaaatcaatcgaggtggacttaatcttcacaaataggacactgaatcagctgcggcactgactaatgttgatgaagcactcaagagctgacagagtccttttacgtcccttgactcacatgttcctccaaacagcctgtgagtagggccagccaggcctcactgcccacttcacagtccagagaatcaagcccagagtcagtgagacccactgaggccccgcctgctgcttcgtctcagggcgccagctcccatccctaacattacttacataatctatgtataggacgaaccttgttgtctctttaccttgttgttaacctgccccccatttaagatatccccccccaacacaaggcacgggtgcaaaggagaatgtctctgcatctccatcagatattcaaagggatcatattatacaatattgcagaatgaaaggaaagaaagaagatggtaccaatccctcaaaaacatcttaagtctaactcaggaaaccctcttagtaattgtctccttcaaatacacatttggaaggaaacaagtcccccacctcactcagtgtgtgagcagaccccagcggtggggccactcatcaccatgtaaaccaggagcaccctcccaagaaccccagtcccccacacacatgggtgtgactgtccaggacttctttgtccctcactagcccagcagcccggtggcagatgtccacctgtgtgtgggtggccagcacctaacacagtaggcacctcctagacccatgctagccacagtgagctggctggaggggcgagggtgataggggatcctgcctgtccatgctcaccctaggttaggggccgtctggctgagtcatgcagaggccaggcttcgactccatcctctggaacagagctcctcacatttctttttttttttttttttttttttttgagacggagtctcgctctgttgcccaggctggagtgcagtggcacaatctcggctcactgcaagctccgcctcccgggttcatgtcattctcctgcctcagtctcccgagtagctgggactacaggcgcccgccaccacacctgctaattttttgtgttttttttagtagagacggggtttcaccatgttatccaggatggtctcgatctcctgacctcgtgatccgcctgcctcagcctcccaaagtgctgggattacaggcttcagccaccatgcccggccgctcctcacatttcttaacacttcaggcctgccagtgtcccagggttgctgatacccacgtgggctccgtgaagcacagcactgcctcttccctggcttcgaggatgtggaatcagaagttgccacttggccttgcccccctgccacacctaggcagaccttgaacacccagagagtagcattacatccatctgaataaaccaacagaaaacaaccccacaacttaacataaaattccagatcacagttactgcaaaacaaatacttggatttatgagcttggctacactactcagtgagttttaaaaatcaaaatccaccagcacaatcaactaacacaacccagacgtccctggcatgcagaaacctcaaatcctgacaacccagaccgttgagaaacatctgggaggggtccaggccttcttcccagccacagagttagaaaacaggaaggatttcagacaaaatccacgagtaaagtccgtgtggaggcggctgagaaaggctttgtattgcaacagaggagcagaatttagaggcagggaagtgctgcttcccatcggataaccaccaccgaccagaaattattcagatgaaatttggcctgggtgcctccttcccctttgggagcttctgggagattctgtcgtgttgccacctctctggatggggcaagtctgatgggagggctgagctcagttccccggtagaagtcaaccccagggtggggctgggcttgccctcagggttgggggactcaccacctccaattgttctggaaagaactttggaaataacatctggagccatttcacatggatttgccagagaagagcggatcaatgagccaggtgtttatctgcacaaattcatctggattgtcatgcaacttacattccctgtgcacctactgggctctaggccctttgctgagactcaggatacccaagaaacagcagtgcatcgcatcatagtaggggcagtcggcccaggggagcagatagattcataaacaaatgatcagaacacagcagttcctccatcgtcctgacaatgcccacactccctgccccacccacctcccagaattgcctgtccctcctctgtgctcccaaggaggctgcaaatacctctgataaagcactcctcacacgggatcctgttcctgctcactactccagcccactagactccgagcccttcgaagccttggtcaccgtgggcatcgcaatgcaccagctgccgcacctgctcagtaaaagtgtgctggtgagggttcaccctgcaagacaagacagcactccactttgggacggaggtgtctgccctgtgcacaggcatctggtgaacaacacagagccagcccctcatgcctcctgggctccagctgagggcagagaatcactgccccagtgaacatccggatggctggctagtcactggccatggatagttctggagggaaaagggcagatgctaggggacacagcggcagggcagggaggcaccttcctgaggacctggtgcttgagctgaaacctaaaggatgagggtcagcaggcagagcagcacagtccagcaagaggtcaaaaatgagccctgtgcagccggcctctcaaagcacctgggggagtcaggagagaccaaataaggcaggcacagcctcaaagggccaccatgaggatgcaggcacaggttcttcccgctggatggtttacagtttcccagagccgttctctgagtacaaacaggagaggagcggagaggcaaacaggagactggatctcaagggcatcccagcctgggcagacaaagggccagacccagggaagctgggttaggaaggaggaatgggaggtctgcacggcgatggagaccggggcccagcctccaggaagaaggccagcaagggtggagcagcaggcagggctgggggccaaagcctggccaggggctctcccattcagtggatctgggtcccaggtatcagcagggatgggatgcccgccccccaaaagtggggacaccatatcccccgccttctcacaggcaagcaggatcatagatttgttgcttgcattaagttagaaaactaaagcctctgtgcatcagcagcctttgcaggcctagggctctcgacgggtgacattccctggtgtgtctccctaaggcatttcagatctgcccacctctgagccgcaagcctctgcactggtagtccatcccacccacacccccaggccagcctcacagcctccacgtaacttccgaccccccagtactcctgctctgatgatgggggcttatctcagccgcctcagcctacaccatgacacctcctgtccacagggacccttggcctcaacagaccatggcacctcaggcttgggagcatccctgaacacctcctggtctctagcacacacattaacttaacataactgaaaaagctaatgaaaacaatcatgtctaaaagacttctgaaacatggaatcctgtatgttttttataaagagtttctaggccgggcacggtggctcacgcctgtaatcccagcactttgagaggccaaagcaggcggatcatgaggtcaggagatcgagaccatcctggctaacatggtgaaaccccgtttctactaaaaatacaaaaaattagccgggtgtggtggcgggcgcctgtagtcccagctactcgggaggctgaggcgggagaatggcgtgaacctgggaggcagagcttgctgtgagctgagatcgcgccaatgcactccagcctgggtgacagagcgagactccatctcaaaaaaaaaaagagtttctattgtttattaacataattcctagagctatgtgcataaaaacatgatgtctcctccagtttgggctactgtttaaaaattaccctaaactaggtggcttataaacagttgcttatttctcacagctctggaggctgcaagtccaaggtcaaggcaccacagatgtggtgtctggggaagacccacttcctggttcatagatggtgcctccttactgcatcctcacatagccaaaggtgtgagggagctttctagggtccctttcataagggccctaatcccacccatgaggctccactcacaaaacatatcacctccccaaggccccatctcctaatgccaccatcccatggagggttagaatgtcaacataagaattttggggagacacaaacattctgaccataacacagggcacacgtgaggcagttccaaaaaactatgccacagaaagaagaagacagacacttctccaacagaagtcctcaagatctcagtgcacatatgcccaagggcacaacactcaccacatgctaaagtcaacagcgccagaaaccagaggtgggcccgtcccttgagtcagaatgcctctgcctccaacggtgcccatggctgctgtttcctcccaatgcctccaccaagtgccttgagtgggggtccctcctcggggatggagcctgcaagtgctccctgaagggcggtggccctccttcctccagaaggcaaaggttttccttcatctgggccagttcctggttccttctcctgataatggacctcctgccatgaactcaacaggacatgcagcttcccaagcctaccacatcctcagcttctgccagttctctctgcaaaaagcagctgtgtgcttgccaccacccaccacaaagaaaggacccagggaccatggggacagaccctactgaagcccaccaggccagagggctcaaggcagaagagcttcaccatatgggactgctaagaggagagcaaggagtgagggaggaattcagacacagacacacaagaacacacatgcatgcactgcaggcacccaggctggaaaggtgaacgcaactcaccacaccacccccaggattcacagccagcaagctcagggcaactctttggggagaagctgaaccagcgccctctgagaggcggcacatccagggtgcagtgcagcactgcctgccagcacgaagcagccgtcccctggggaggcggtggtcccgtcctgcctcactggcctggcagaccaggccctttcacgtacacccctccccgagtcccagctctgcaccactggatctgcattttcatgcccattttagggttgagaaaatgggcttcataaaagcctactgtccaaaactgcccagggtgtgagtggcacagccagaacttgaccccacatcctgatctctttctactgcctctagacaagacatcccatcctagctgaggcgcccagagccacgaacagggacacagcaggagcaggtgcctgtgtgtccataatgcctgcatcctggctgcccctggaaaggaaccagcttaaaaaaggcaatgggaggccgggcgcggtggctcacgcctgtaatcccagcactttgggaggccgaggcgggtggatcatgaggtcaggagatcgagaccatcctggctaacaaggtgaaaccccgtctctactaaaaatacaaaaaattagccgggcgcggtggcgggcgcctgtagtcccagctactcgggaggctgaggcaggagaatggcgtgaacccgggaggcggagcttgcagtgagccgagatcgcgccactgcagtccgcagtccggcctgggcgacagagcgagactccgtctcaagaaaaaaaaaaaaaaaaaaaaaaaaaggcaatgggagcagccatgcatccctgcggtggaaagtaagctgtaggggaggaggaggtaaagaagaaagggataaaccaggcgtgagaagaggggtgaagtcacctaacatcatagctgtccatgagtgattttcttcaagggatgaaaaaaggtacatggctgttttttcccttgttacctccactgaccaaaaatctatttcaccagtgagaaaaaccagtgctacactgggttccctggagtagaggagcattagccaaacaggacaggagataatgctgcacgaggacagagctggcagccccgctgcttgtccatgttgggtacgtgtggggtcctccaggccaaagtgggccttgaatcctcggaggtgacgctctaggtgtctcgctgcctcccaccgaagcagaactccagagagttccaagaggaggcgggaaagcatcattaccaacagaaaccagtagatgggccacggggccaccacactgggctttgttctcgtgagtgcctggatgttgccagaagcgtgtgaaatttaaaccattatctggagacagcatgccttactgcatcttccttaacaaccaggtgacacacagcaagataagcctgttgaacatcttgtccagatagggcactatttattccctctcttctctttcaagaacaaaagctgctcctgtgtgcatgcacattttctctgtttctatctccctcaagataagataatggacgtcatagagcagctgaactctacaaagtggtctgaacaggagggatgctctcacatgttccctcacaatgtggaatatctgtgcgctcaagcaaatgcattcactcagacgcatgcacgcatgcacacacatgcaatcacaggtgtgtgcactgcttgtcctcatatgcatgaactcaatcatgcatgcatgcactgcacacatagccatgcatatgtgcacccacacactcaggcacatacacaccactctggcaggcctcctcacccctccgtaatatttcacacgccacatatttaaaataccacaaaacagagttcatttggaaccagaggatcaatctggggtccttccctggcccttctgagtgtgtgcaactgcaggacagaggaagagacacaagtcccaacccagggaaggcaccaagacaatgatcctccagataaagaaagaagacaggctccccgccgtccaagacgtgcttgcgcgtttcacagctggaggccgtgctttctccaagctcttctctttcgttggttccatttactctgaaaatagtcaatactacttaaatggcaggaacagaatactgaagtattaaaaaggatgtctgagatgactcttcagtaaactcagttctcttttatacaaagaaggaaaaattactcctcaagcagtataaccaacctagtgcagcccaagccactgtggtaagttgtgcaaaaggcctctgtgtctaaggagctcccccactggattacagctcaaggatgtgtggtgcagaggctaaccaaacacacatgcggcatcagccatgtggagctacccacagtgggttcccttcagagcaatcctaacaccagcaacaaacctaagtaccacaacgctggctgtgcactttaagcctgacttctgcccttggaacagcccttaccctaagtcctagacccagagtgaggagactttgcccctgtcaggggcagggccaggacccagctctgtctgacctccacctttgctcctaaatcagacctgtccccacatagcatctgacaggcagaagtcagttcatggggaaccttcggctgtgcaactttgcctgggacgtcatcacagggtaaggaagccgagaacaagcccaggtgtccctgctgatgccatgctgctcatgacagctctcccagtatcgcccaatggctccgctggcacaggaccagggctctcggatcaacaccaggccctgacagctctgattcccaggttctctgtgctgctggtttcatggttccaattcaaccacgactttccttttccttcttttcacacttgggagtcaaagttagagaccaaaattttaaaatatgagcatttctggccgggcgtggtggctcacgcctgtaatcccagcactttgggaggccgaggcaggcggatcacaagttcaggagatggagaccatcctggctaacatggtgaaaccccatctctattaaaaatacaaaaaaaaaaattagccgggcatggtggcgggcgcctgtagtcccagctgctggggaggctgaggcaggagaatggcgtgaacctgggaggcagagcttgcagtgagccgagatcgcgccactgcactgcagcctgggtgacagagcaagactctatctcaaaaataaattaataaataaataaaataaaatatgagcatttctatgagaatgacattcaaagatggggagactccttgggcttctatttttgccatgttcctggaaaggcacaaagcccctactggaccctgtagggtatgtgggacacagaggggctgctgtatttgcccacagacattttagagcaagcttgatggaggacgcctgtccgagagcatcagtgcaatttctcatcaccttacacctgcaggccccaaacacaaagggccaccacatttggctgacatggccctcctgaactggacaagctatgcaggggaatggccagtgacaggccacagcattcacagatgaccaagatatcacctagtgcagtgccgtttgcaagtatgggcttaaaacaatggctcaaacctgtaatcccagcactttgggaggctaaggcaggagaatcacttgaggccaagagtttaagagcagcctggacaacataatgagactgtctctaaaaaagtaagaaaattagctaggcatgtggcgcatgcctatagtccagctactggagtggctgaggtgggaggatggcttgggccaggaggtcaaggctgcagtgagccctgatcatcccactgcactcctacctggatgacagagcgagaccctgtctccaaaaaaaaaaaaaaaagttttgaatcacaggatgtcctatcagttggctcagagtacactacagcccgtgttctctgccttggatgcagatctagatgaattacacaggtggctccctggtctctggcttctacttagcgaccagggtggccggtacccaccactcatccaacacattcttcagcactgacttctccaaggggccgaatcagaggaggggcaccccagtcttctcacccacactcaggcctttgaactgtaaaagaatcccaagagccccttagaggcccctggtcacatcctcaacccattaaggtttgactgcgtgcatcgttccatcacaggcaccctactctaaagtggccatcagggaccatctgctgggggtctgcagggaaggaggcactgagggggaggtcctaacagcacagaagcccacaggctgagactctgcacattttctagaggaaatccccaaccccgcagatgaaatgatgccaaagagcagcccccgcactctccaaggacctggtcctcctagtgactccctctgtgtggtgtaccccactggtccgccaagcagcccctgccccccaccactcccacattcattacagtcacacctctcttactagatttattaatgtgcagtcacaaaagaattggcaagttccattcattacttgacgtctaaatatctggtacccaagctggtggcttagtttagtgacaggatctgaaaggggccataccaaaatgaacccgaaatctaaagatagaaacatttcattcgcaaacttgagtaacagatctgaaagtcaaactaaacaacctgagttactgacacttcagagcagacctgagaataaatgattaatttacaaattgctgcctcctctcccatcgggaaactctgctctttctgtaaaaatgtcctcatgagcacttatctatgtaaatacggttggcccctgctaagtaagggggtagggggttgggggacatataaactaagaaggggaattccatgatttaactttcggaaactcctgaaaaaaagttttcgttttgtttcttgtttgttttgctctggattaatcagtgagagaatcataaacacagacttacctcggcatgaaataccttgaccgtcaataatttgtttgcaaactccacacactttggattttttaaaggccttgttcttaaaagcgtgcagactcgaggttaattcttccggctgaaaaagtaaaggaagaaattgtcaacgtttcatctcatagtttgtttctttttccttttcatttaagggaaataataaatctagtggaattgtaaagagcaaaaacaggaattttaccaagcaaacagagaacaagaaaccatcttggtgatgctaaaattcccaagacgacccacggataccatgttagcattcccaattccagagtcctagacggacgttcactctcacccaactcatcaatcaccacatggggtgcctagaaacattacatcaaccaacatcattatgtgaaaatgcactcccttccagacttcagccgtagagccacctacttctgtgacaaagtaatccacatacacttctagactctcaaccctttttcttctggaaaaagtaattagctaaacagcataattatgttatgaggaagtcaactggctttcctggttcaaaggtgttccagaatcaccattaagctcttgagcctctctgagctctcctgcagaagaagagacagtccagcctgtgatacacatgtggttcttcctcaaacacaattacaagcattagcacttggaaaaactaaccactcagctacctattcatgtttgtagagccaaggctctcagctatatgataaccttataagaattcaatttgcttttagagtcaagcactaatcatgtctatttgctgatatgtgaccgtgtattctatcagtacttaatatccatatggattcagtgaggccattactcacccactggaataattaaatttatttgaaaagatgaaatggtatttagaatgtggaataaatggtacaactactttagaaaatggtttgacaatttcttataaacttaaacatacacctaacctatgactcagcaattccattcttatttacactaaagagaaataaaagcctatgtccacaagagaaagaaaggtcataacagctttatataacccaaatgtccatcataataactattctatatgctagaaagttaagtagagatctgaaaaacataaaaagatccaaatcaaacattcattgaggaaaatgtaagaatacagtgcaagatacactggatgcgattactggcagattagatcctgcagaagcacaggtgaatgaacttgaagacatcacagtacgaacctcccaacgcaaagcacacagagatgagacaacctaaataaacaaataaacaagcatcagtaagctgtgggagaactttaaccaacataacatatgtgtaatggagactgacggagaagggcagggaaggggggatatttgaaaaaataatggctgaaactttttcaaaccaggaggaaaactataaacccacagatccaagaaactcaagaaatttcttggccaggctcggtggctcacacctgtaatccgagcactttgggaggcagaggcgggtggatcacctgaggtcaggagttccagaccagcctggccaacacggtgaaaccccgtgtctactaaaaatacaaaaaattagccgggcatggtggtggtgcctgtaatcccagctactcgggaggctaaggcaggaaatcgcttgaacccaggaggtggaggttgcagtgagccgagatcgcgccattgcactccagcctgggcaacaagagtgaaactccatctcaaaaaaaaaaaaaaaatatatatatatatatatatttctagcacaagaaatgtgacaggaactaccccaaggcatacaataatcaaattgcttaaacccagtaacaaagagaaagatcttaaaaacaaccacggggccaaaagacacattacatgcagggaaccaaccaataggataacaggtttctcattgttttaaaaaatataagtgagaagacagcagtataataggaaatactgaaagatggacacaaagaagggaacagacaccagggcctacttgagggtggagggtggaaggagggtgaagattgaaaaactacctatcgagtactacgcttattacctggaggaggaaataatctgtacaccaaacccccacaacacacaatttacctatataataaacctgcacatgtaccctgaatctaaaagttaaaaaaataaacaaaatagaataaaacaaaatactgaaagaaaacttgtcaatctagaatcctgtacccaataaaaatagctcttcaaaataaaagtgaaccaaaaacttcttaaaatatgcaaaaaaagatatacaattaaagcccaaaaaaaatcatcaccagctgacacctatgacatattaaagacagtgcttgggcaaaaaggacatggcagatggaattatggctttacaccaacagatgaagagcaccagaaatgctaattacacaggtaaatttatgagtttttcttattatttaaagctcaccaaaagataattaactgtttaaacaatagtgtaatgtgacatgtgacatatgtaaaagtaaattttctgaaaaaatagcacaaagttcaggaaagaagaaaaggaaatatactattgatgacagcggttgctaccatcacgctggctgcagcagggaggtgaggctggggctgcactctccatggagccggtgggagctccaccccttctgagttggggtgggaactccctgggtgccactgcagctgcccaaactgcagctgtagatccaagcctccctgcgctcttgagtggggccaggagcaggcaggatctgccccccggggtgcagctgcagccaccatccacggctgcagacctgggcctcccactccaccacacaggcgggagctggggaaaagcaggagctccctgagtgcaggcagctgcagccaccctcccaggcacagcacccaggcatctctgcggcctgcaccctcgggcgcatgggaagcccccccccgcccaccatccctgctggctcaggagtgtctattctggctgcctggcctgtctcctctcccggccccccacctctcatctcagagcgggattggggacaagtaccagggccttgaatggcagcggtaggcaaagtcctgggcagaagggggtgggtcctcagtaaggccccaccttcaggccagggagggcctgtaggctggggacgggctgccagtcccacagactggagtggggactcatggtgcctcttccagccagcccatggccgcccatggaccaatcagcaggcacttcctcccctccaagggcttttccatgttcagccagagcaagagagaggacagagagaatggagagaccacaagagaccagctgcacagaggagctaccctctctgccgagagcttcagagacctgcagagatgttgggacttccagctgcagagaggaactaccctctccagggcctcctctctgctgagagcagcagaggtcgggatgacctgcctacagagaggacactgtgggtctcctctgagctgtttaacacttaataaagcttatcttcatcttcttcacccttccccgtctgcctatctcattcttcctggacacaggacaagaactcaggcaaaggtgccactggccacagaggtttccagccagaaattggacaccccaaagatcccataagactattataaggctctcatagtattcatgaagtggatataatatcacttgaaggtagcctgtgatgttacagaggtatagtataaaccctagagcaaccactaaaatcatgaattataggtaataagcaaacaagagagataaaatgaaataataaaaattattcaattaatctaaatggcaaaaggaagtaaaacaaaggcagaacaaacaataggtaggagaaatagaaaacaagtagcagtatgacagattcaaaccttgccatattaataatcatatttatgtaaatagtctaagtatctcaattataagtcaacaaaagttgtcagattttatatatatatatatatatatttttttttttttttttttttttttttgagacagagtctcgctctgtcgcccacactggagtacagtggcgcaatcttggctcactgcaacttctgcctcccaagttcaagcaattctctgcctcagcctcccaagtagctgggattacaggcacccgccaccatgcctggctaatttttgtatttttagtagagacagggtttcaccatgttggtcaggctggtctcgaactcctgacctcgtgatccatccgccttggcctcccaaagcgctgggattacaggtgtgagccaccgcacctggcctttttttttttttaaaagacaaaggctagaaaaaagaggtaccttgctgatgttaatcaaagggaagttggagtggctatatcagacaaagtaggctacagatcaaagaacattaccaaggatatagaaagtcctctcataataataaaaggattgattcatcaagaacacctaacagtcctaaacatttaatcactgatatggcttgactgtgtccccgcccaaatctcatcttgaattcccatgtgttgtgagagggacccagtgggaggtaactgaatcatggcggcaggtctttcctgtgctgttctcatgataatgaataattatcatgagatctgatggttttataagggggagttcctctgcacaagctctctctctttgcctgctgccatgtgagatgtgcctttcacctttcgaaatgattgtgaggcctccccagcacgtggaactgtgagtccattaaatcctttttcctgtataaattgcccagtcttgggtatgtcttcatcagcagcatgaaaatggactaatacaatcacctaataaagaacttcatggccaagcgcggtggctcatgcctgtaatcccagcattttgggacgccgaggcgggttgatcacctgagctcaggagttcaagaccagcctggccaacatggtgaaaccccgtctctactaaaaatataaaaattagctgggcgtggtggcgggcacccgtaatcccagctactcaggaggctgagggaggagaatcccttgaacccaggagtcagaggctgcagtaggccgagatcatggcacggcactccagcctgggttgacagagtgagactccatctcaaaaaaaagaaaaaataaataaagtaggggaaagagtcctgaaccaagcagaagccttcacataagttctgatacctacactacaagctctgtggcccaggacaagtcacaacctctcttaaatagaaaagatatcctccccctcctgtctcttaacagctattgtaaatgaccaaacgctgtatcatctgtcagttcataggaatcactggggcagtttttaaaacagctgacccaggctccaccccagaccaattaaatcagattacctggaggttgaatcagaacactggaatgttgtcaaaccccccaccccagctccatcccgtgattctaatttgcggccaagacagaaccaccactgtatataaccgactatactgtaagtatctatatacatttaaggtactgttattatgtagttgttcctatgtcggtatctggttttttcaaagagattgcatcctttctgataacacaggttgtgtgttcagtgctctgcaaaagaaggataatgatgctgctaattatgcagttggtaacactagctaagtgcttctgtgtcattaccgtaatcaccactagtctacaaaccgtgatggtgagatgcaaaaccgagatgcagcaccacacagccaatggatgaggcatatgagactcaggcctcatatgcctcaagccccagtctcacgctcagacaagagtagcattcaaacacctaacaaacacatctctctattgcaatgcagcagctggtacgtacttttcactcgtattgcagttatttgtttatatgccttctctcctgtgctatattgcaatttcctagatgcaggacaccaggctctttcccctttgtcctcttagggccctgcccagcgcctggcagacagtggaccatggaccctcaattaatatttgttgaccaaatgaattagccacagtctgtgggccaaggaaagatactgtgacctttcattcctcacaaatacctttattccaaccagggagaaagaggcactgttttcctgcagctttcttgcccactggtccacagctagaaaacttaaagagggaaacagcataagcactgttgcgagggctcagccatttgaattgctggatctctgaggagttcatttaggatagtgtaataacatctgctcacgcttcatctgtacataacatctctattgtgaaatgagaccagacgggattagactgcccttgttttcacctgatactgtgctttcatttctcccaaagggggagaggaggcagcaatgctgaagcatttagcaggctcagttcaggaatctaaattgcacttaattgttaggaacaaaatgttggaagggtagagagcaggctgctggttccacaaggactccctgagggggacacagtaattagtgctggtcttgattgtgaggtctcttttgagaaagaaaaatctctgcaaaattgaacagggaggtgctccacatgaatgctccactctgccgaaatgcaaaaccgcagggatctctcggataggttctcccggctaaaggtcgccctggcaaaatggttacacacgcaaaagtgcaaagctgcatcagcacaatcccagctatgttttcctttcaggaaatattcagctccaccatagtaagaggatttaggtaggcattcaggcacctgggaaaccttcagaggcattctggagaggcagacactgatcaaaaacacattcccagcccaactttactctgatgttaaacagccaggaacacttccgggcctcggggatatttcccagcccacagggggccggtatctggggcaagagggacaccctccacatccaacacatattgttcccacacttccaggcagcagcgtttgaccactaaactttaaaagggaacgcagtacacctcaagttaaccagctgaaattttgacagtttttcaccccacagaaccttacaaaagcttcagaaaaacaaatgcaataacttagggaaagggaggctgaacctagcggggagccaaccagcaccgctctgtttaattcagcaataacttagggaaagggaggctgaacctagcggggagccaaccagcaccgctctgtttaattcaaacaccgtgaaaggccgtcctgtggaccacagagcaccgctggaacccatgcggtccccagggaacctgtaaggattcctacatcccagcgcatcccccacttcattgcagagctaaaatgccctttacctttgcaagaaacacgcgagggatagcaggtctgcgcaatggccagtatcccaattccattgcagggaaatgaacccaagaagccttttcaagaggcagttgagttagaaagagctaagcctgaaccctcttccacgcttaccagaagacgcccccactaggcaaagctccactggccctctcgctccttgtcctgcgcgtgcacacacaagggtacacacgcacccacgaggactcaggcacggaccagcgtacacatgcctgcacacacagacgcgcgctcacaagcacacacgcgtggacgtgcagacggggtgcacacacactgacatacgcgcactgacaagggcacacgcatacacatgagcacaagcgggtacacaccagcacagcgtccacgggcaccagtgcacacccggcgcagcccacgtgcgtgcagccctgaaggcgcccgtgcctcgcgcccctggccatgcacaccagctccgggccgcactcacctggcgccggcgccggcgcgaccgggttccgcgcgcgaaccctcccggtggcccaggggtcagggcgcgcagcctcatggctgcccctgccgcccgcggggagccgggctcggccgggcgagggtggccgctgacccctccccagcggctatctggggggaggatgcctcccgagtcccctgcggacacaagtcccaggaaatggccaacacgggaggggccaagggctctccgtggccgccggcccaggtcccagccgcgcgccgcagcctccacggccactcctgcccgtcagaagtcagacgccgggaacaaaagccaggcgcgagcgcacggtcccgcacggcgtccctccatctgacacgaattagccctccctcccccgcccgccccaaccgcagctccgagcgagcgcggaggcacaggctgagccgccaaacactgggaaagtgggtgaggaaacgccttccaggcggggggagcaggatcttgcagccgccatctgattggaattaccgacgcgccgcgcttggcgcagggttcagctttactaggatttcaaacctctccgagaacgctggcgaggtgcttaaaagaatcaaaaccgggcaagctctggctttcggaatttctaaatcttgaatattatccagtcaactctgcatctgtaatgagcagtaatctacactaccctgataatctacactagcaaacagggcatttggagtggaaagcaggtaaacaccgaggcagaaaggctttttttctaatttgcttcttctactaaaaaactaggagcctggccttgcagagagggacacgcctaaccaggtaaggatttcaagcaaatatcaaagcacaggaccgcccggggccttgcacacctgggggctgggctgcacctccctatctcccagcctatccctccctcaccgcaccccccccaccccccgccatcctgctcctggcaaatcaggacaattcacagcacatctgaagtcccgtcttcctttatgggtctgcgattttagaaggaaattagaaacccgaagttcaggaggtgaagatgacagggtgatgggagaagatggacaagccaggatcctgaagaaagggtcacttagaaacgccaggaggagaggcgggcaagatccacaggcagatccctcctttcaatgcctgtcggacttcaccagccttcccggggcagtggatcttggctgtctgcaagaagctttgtggcaagtctaaaactaaaagaacatgttcaagatgaagccactgcctgtggtctacggtgggcagcggaagagacccctgcctcagagcaggatagggggccttctagtctcaggccagctaaccctgtactcctaccactggccttcactccaggcccagcctaggagcagtgtcccagagctcagcctttatggctccaacactctaacttcagatctacagctccacttgcaactccacatgccttggatgtggggagcagtctgggtgggctaagtcgtggcctttatggctgacatatgtgcaaattccagccatcaattcaactggctgacgttaacctctcaagttctggcactaaatatccatctttctgtttctgcagtagaagagcaaagctgctcttcaacttttaactacaaaggaaaaaacctcctcctagaacacaccattctgggttccaattcctcactaaatcatcacctggcagacaagcaggcattctcatttccccctgtccttcaaatgacaccattattcacctttttctatattcattccttcattcatttttctgtatacattcatcatttttttcctatagcatatccaaactttagtcttttcaaacatttttccctgagaacacatctgtatcgtattcattccagattgcttcacatctgacacaataccaggtacatagcagtgcctacaaacagctaagaacaggatatgctgctgtcatggtttacccagggcaaacacgcccagaggtcagctggatctaccaccgcccttaccatggtgcccacaggaaccggccaaagaaatctgaattcagcaatgaacagatagcccccagcaggataaaactcctccaacctgagtaccaggattcatactctctggggtccacccaggaacaacggccaggagcacaggccagcccactgcctatgcaagccagagtggaaggcaaatggttgaaggtggctttttattgcagggataccctgaatctgctcttacttatttaaaagagtagccattcagaaaactcccacacttcgttactagtaacaaatatcgtgcgtgtgataaacctccccagtgaggacaacaaactgatttttcactggcaagaaacagtgctcaatcctaaggcgaatccgcattcatcagcaggccgcctctccagcccctctccctgcccccgactctgacctcctcctgccaggcttgcaatctaggctcttacactccagggtccttctgctctgcgcccttgggctcacttggggcttctcccaaggcagtttcccattctcctttctggctgaaaaccgctgtcctgggctcagttgaagatccgccccccatctgacctcccagactggttaatcatcctccatggctgagccactcaaggatggttggggccctgaccctctagtgtggtcataagtcttgtacctccaataggaagtcctaaccttgtctgggattttccacacacagcaccaagcaggagcaataaacactggtgcaggaatgaaaacattctcctttgctgtatttccaccacatcaacaccggtgttcactgcctgtctcagaccacacccttctgagtcctcccagaagtaagctgtagctgagggtctggggatgcgaagggactcagaagccagggcacagactcctccaggcacagaccctcacctcaaaacttgggtggcagactggcctcactccatcttaaagccacagtgagctctgtgctgctgcccagcttccaattttcttcgtgctttgccacaatcctctgtgctttttactcgccaggttgtctcaccctagcttctgactgcacttggttcccaggaacaaaacaaggttcttcccaggaacaaaacgaggttcttcccaggaacaaaatgaggttcttcccaggaacaaaacaaggttcttcccaggaacaaaatgaggttcttcccaggaacaaaatgaggttcttcccagggaggatgaattccagacggctaaggcagacatcagcaaaccagccatcaggaagagaggctacatctcaacctgggttggaaacccagctggaactagggacatgagcccctccatgagtcagactttaacaccaagtacaaggttccctgggggagagctgaggggccactcgtgcccgttttgtcactggaaactggaggctgctcctatgagtccattccctcacacgatcatgcattcacccacagatacgtgagcaacgtgtgtgctcgatgtcagaggaaatacagcggctggctcaccccgcccctcccagagggacgatctacacgcagtgttaggagggggcacggagtccacagatcatgggaagaactccatgaatggcctgtgacttgaagcagaagcagacactttccagacaggaaaagaggtgaggagaggcaagggtggtaaagcgccgtatttttggtgaactggccaaaggctgggtggctaatgcacagctgtgttgggacactgagggtagacagggctcaagaagcaagtacagggtggtgagcaggattgcacaaagcagtcacaaggaaggaggccccagtaccgagctgggctggactccaacgtcacagggggctctaactggcaaaaaggaaaaagcatcacaggtgtatgttcatcctggaggacccctggcagtcctgggaggacactcgggagaaagcaggagtggacatggaaactctaggtaagagaacctcagcctcgggcaacagccctagaaacacagataaatgtacaggggagaggacggccatagcagtggagaggtgacgggagattggtcatgcacaggatgattgagcataaggatctgtgagaagaaaaatgggaggcaccttcgggaggagcttgctagtctagaatgggggacattatagtaagccctgtgttgggagacaggaatcagatattggtgtgactcagagtttccaatctagagacgtagatacatctagaaatcaaagtagatgtgaatgtgtgtatacgaaccagtgcacacacacacatgcacacacacacagagatactcccagatctgtccttggagggtgcggaggctccaataccaacagtcaccccccaatgagcctgaaatctcttctttttggccagaaagtaagacagtgctcacagaacaatgggttttttaacaaaaagacacaggggccagcctgaagaggctcccaccaggcaaactgtaaacaacttggagatcaaaatagtgataatattggattatgacccattgaatacaatacaaatccaagactctttgagtccctactgatagaagcaaatgaccgaggccgggcgcagtgactcacgcctgtaatcccagcactttgtgaggctgaggcgagcggatcacaaggtcaggagatggagaccatcctggctaacacggtgaaaccctgtctctactaaaaatacaaaaaaattagctgggcatggtggcaggcacctgtagtcccagctacccgggaggctgaggcagaagaatggcatgatcctgagagacggagcttgcagtgagccgaaattgtgccactgcactccagtgtgggcaacagagcgagactccatctcaaaaaaaaaaaagcaaatgaccacagagacagtctcagagaggcaatgggagtcctgggagcaggttattaggaagcgtaaaggtctcagcttccatgcgtcgtgggatgggagactcgggagttatgtgcagtggagagacagaatctaataggctgtcactggttgatctttagagagaatacatagtctctaaatactttcctttatttactataaaagggaaaagagtaagtcaacaacagagaaagcttcagtctccacctaatcaaggggtcaaggtgaccatgaccttggatgggacaagccatggtcagcgccacctgtgattcagagatgagaatatgcattaccactgggtgtttctgcagagaggcatcatctaaaccaaatcctcaccacaccttggccagacaacccaagtgaggggtggagagtccaaatccttagtccctctgacgtgtgctcacagagccactgtcctggcaggatccagccctgattcccgattcctagcctcagtgctctgaaattggggccaccagatactctgggcagatgactcctagctctcctctacccactacatgcccgtcgacacgaaatctgacatggccagtcccactgctccatggcttgagggtgtccgagtgtgagggagtttctatgtgccacctaaagcacatttaaaagcactttacggccgagcacggtggctcaacctgtaatcccaacactttgggaggctgaggagggcagatcacgaggtcaggagttcaaaacgagtctggccaacatagtgaaaacccgtctctactaaagatacaaaaaattagccaggtgtggtggtgggcgcctgtaatcccagctacttgggaggctgaggcaggagaatcatgtgaatccaggaggcagaggttgcagtgagccgagatcacgccattgcactccaaccacggggaacagtgcaagactgtcaaaaaaaaaaaaaaaaggcactttgcctctgatattgaaaaagactgccttcagtttaaggaatttctgacatcagcaagttgttgccagctctcatctgcagaaattgagcctggccctctctccttgtccaaaggtgggaacactggtcactgggcagcaggaggcccagacactgtctctaggggcaggtcttgtacctgggccctgtccaaacacagactttgggaaaatcctcccttttgtctctttccctgtgcagccagcttgtgctccatccgaaatccagaagggacagtgtaacagtgtgcctcccagggcactcaccctctgggacattcaggaagtgttcaggcacacttgcatctcacctatccagcaaacatcttcacacctgttccccagggccatgctggagggggaagaccagcagaggactttcggtacgtcaagtcccaggggctcaggatatgtgcatggggcacctgaaagactggagaggtggggagctgacttccagtccctgcggtgagggggctttcgcccaggctcttagtgacccagcgacatcctaggagacaaggagtccaactcccagagtggtattaatgatcaaagatgccatttgtgaagtgcctgaccctcaagatggtccaaagctggagttacccactcgggtggaagcaggacttgaaagcagtactgctttgtcctttacacaacactgtttctcatgaaaatcacagacactcagtagataacgtgatgaatgagagtccactggccacagaggagagtgtatttattccaccaggttaaccaaaacgtctccattggctacaaagttcccgggcacgcagcctgtccccacccatgggagtcccctggggtgtgcaggctgtcaatgaaatgtcattctgcgactgccacacttcagggcttcttctgacaaacagatggtgacttctgacatcctttgcatggtgtttttgcccgccctggggaaaccagcatttgtttccctctgctctgactcgtcacagagttccttccccctgactttgagaagtaaataaaaaatgctttccttacaaaattcccctccagtgggtgcttcttccctcttctctgctcaaaacagagctgtttcattacagactgtgcacaggagagcaaaagaaagtgttaaattaaggtggctctccccagccccctccagctaagtccctggtaggatctcgcccccttccctcccttcagaggagcaggaagagtcagaggctggtgccaagaggagcatcttccttccttcacctatccatgggtcgggggtgggggtgcccagcccaaaagataaacaagggcccacctgtctccacctctcacaagcacggagcacacctttctcatggtaaaacggacccccacagctacgggctctctgtgtgcctccaaaatccatatgttgaaatcctcacccacgaggtgacgatattaggaggtgaggcctttgggaggtgcttaggtcatgaggggagactctgcatgaatggggttaatgcctttaagaaagggaccccacaagacccttcacccattctgccatgggaggacacagatagaaggtgccttggatgaaccaggagccagccctcaccagacaatctgccagagccttgatcttggacttccagcctccaactgtgatagcttccagaactgcctgaggtcgcagagctaaataaccacaagcccaagtccccaggtccagcttacagacctactgctaccaatgggtgtcccaggacccaggcacggatcagtaggcatcccagcacttccaacaagccagtttcctcctgtcaaatgagctgccccacctattctaaccgaaaatgagaacataggaaactgtctagttaataggtgccctgtgctgaggacatcatgatttacttttccactccttgccaagcatttcttcaccatcaagttgactccaagcagaagaaccctgcagagttagttgtacgaaaagcctggagatccacgatgttaggacttactctgccactttgagcacctcgaacactaaaaacggagagaggtatgttcacttcctccaggggggtaaagaaaaaggacacagttgttggtgttgtgcctggccttttaaactcttccgtgataatacattgagatgcgtaagagggcatttttttttttttttttttgagacggagtctcgctctgtcgcctggagtgcagtgtggcacaatctcggctcactgcaacgtccacctcccaggttcaagcgattctcctgcctcagcctcccaagtagctgagactacaggcatgcaccaccatgcccagctaatttttgtatttttagtagagacagggtttcaccatattggccagactggtctcttctagaacactgaggaagagctagatggtagtgcatgccactggtcacgaaaggggagggctttctacactcccctcccatagaaatctctgttactgtttgatgtggacaaggcgcccaaggctctaggaagtttaacaacctgctcagcttcaaaacctgcaccagatccttaaacagggtgctgacagcaagaggacccagcctggtctcccctcccttggggggctcccatgggaaggctggggcagtgggaggcgggtcacccacagatagccatctcagttaccactgtcctttcggaaacctctctaatcgacccccgtcctttcacacctccccagtttcttcctgaccgaaaatgccccaacattgcctgacttagatcagaaaatgaccactggaccacatctggaactgtgggtaatgaagccctaggggatcccacctgggggcagcctgagcagttctcagccaacactgctcctcaaatcccctgcaggagctggttaaaaacataccgacatcacacaaactccacccctaccacttacaccacagtcaggggactccacagtcttgggggaaccctaggcagtgatatttcttcacagtcttcccaggagctctgatttgtagttgggttaagaagcacagagagccatgagatctggggatagaggcaggtgccctgctctcctgtagcctggagcctcccccaggaggcctggactgaggtggtccagagagctgcggcggaccccgaccccactcctctactcactgcctgcgggtttattattaattattctgggccacagtttcttcatctgctaaagcggatgatcaaattgcaaccgacctcaaaagcttctaatgaggcgctgaggctcagaccttaaccatcttacctgagccacttgtctcacgtggcgtccacgtccggcaccccctggcctcacacacagtcaccgcacagcagcactgctgttccggagctggactgagctcccaggacctgccgtcaccgcaggagagctccttccttacagtcttcctgcgtcccagccctgtgcacatccactgaataagagcctgaggaaaacccctccccaggtggcccaggacggtgaggtgctgaggctgggagcctgtggcaatttctacacatctgttttcagcttcctaaaaggttcgatgtattgctcttataatttttttaaatatcactaaagtatacttacagcatagtactcacaatcctcttatcctccttatttaaaaaaaaaagtttttaaatgttattcaagcaaagaaaaaggcagttcaagtcccacctcaccactgaagcttctcatcccatgtctgcagtgacagccatcactgtccacccaggctagcagggaacagacatgggcttgcggcataccccactcatactataaactacgcgtgtgccaagaccacggtctctcagtgtgtgcgctcagcacccgcctggtaagacacggctgtgctcaacaggcgctgcggatggaatgactaaaatgacaaagacagacgccaggttttaaggtcacccccttgactaccacacccctcagtcacgccctgggctgggcctttggaacaccctgagctgtggcctcctatctgctgccctttgagtttctgattagatggtttacaattatactggcagggttcatctgtccattcattcattcccgagtttatagcctaggagggagcagagagaagataaagccaaggaggcagtggaccctccagggtgaggagggagggaggcagtgtgtgtcgggctccagtgtagactgggccttgaccaaaacaggtaagcagaggctcaggagcaaagggtgggagtggggcggagggcaaagcgaagaattgtgttgacttcaactggactaagaattaagagagataaggggcctgtgtcggggagtggaaggcaagtgtgggtgggacgtgaaggagtaaccagcactcagtggagccctggggacattagatttggaggcatgcttctgctgaaattgctgaaattgctgaaattgcagggggcagcggcacacactggacacgaagacacttttatcaatggggttccgggagctgctcctcccagacctctaggtgtccactgttagtcaccagcacaaggtactggggacaatcctatagttccatcagatggccaggtccacattgtgcatcttccctgcatgaggtagggaagatgaaggtctgagggacagcaagccaaggtcacagacttccaggagccctcagcatggccccacgtctacgccgccatccacccctccacagtcctttctcatcagtgcatagctgctctgtgcagcaacacgcacaggagctaaagcctcccaacaaacctcagcccagaagaaaatggagaccactgcagttcaccagctcatgtgcatcgctgccaggtgccaaacccagatgcacatgcacagcgggctccagcattgtccccagccaccctggctctcattctccaactcctgacggagtctcactctgtcgcccaggctggagtgcagtggcgcgatctcagttcactgcaacctctgcctcccaggtgcagacgtttctcctgtgtcagtctcccaagtagctcggactacaggcatgcaccatcacacccggctaattttgtatttttagtagtgttgaggtttcaccatgttggtcaggctggcctcgaactcctgacctcaggtgatccaccctccttggcctcccaaagtgctgggattataggggtgagtcaccacccaccccgtccctccagctcctaaccttcacgtttttcttgcctgtgccaactttcccagtggcatacagcctgctgtaacacatcccatctttgaaaacacaaccctccttgaatgcctacccagccttcccatacctggcctgtctctctgctgttccccttataggaagccttcctcaaaggctgactatagtcactgccccttaccccaaggttcatgggctccagaatccatgttcaacccatctcactgcaactttccataagtcaccacctagccatagcctgtcagacccagtaagggacacctgtccctcattttattccaatcccagccgcatttgaacacaccatctcctgatgcattttcttccctggtcgctgtgaccccgtgccctacctcactggtcctgcctttgcctcctttggagggttttatccccttgggtacttctaagtttcagggtgcctgggctccgacctgcaggtcctccctgtgaatgcacccccaggccggctgtcacccttcccaccacctgtctgccggctgatggtcctgaccactccaagcttcttctcccctgacctgctgagtcctgagcaccacctgctcccaccttcactgggccatccccgaagcaccgctcacttcaaccctccaaataagaactcccagttttctccccaacatgtcctccctgctgctcggtctgcacaaatagcaccacttccccacacagtcaagtctcaaccttggggctccttctctttctcttacagcacacagccaatctgtcagcaagccctgcaaaataaagccccaaaaaggcccagttccccggtctccactcccaccatcctggtccacccaccactgaactgaccatctctgtgcatccacaggccaaccaaatggagcttcttaagacaggaatcaggacatgacaatgtagcacaaaaccctctccagcttttagaatctacacccttaaaaaataaataaatgaaagttcttttggccaggcgcggtggttcacacctgtaatcccagcactttgggaggccaaagtgggcaggtcacgaggtcaggagattgagaccatcctggccaacatggtgaaaccctgtctctactaaaaataccaaaaaaacttagccatgtgtggtggcgggtgcctgtaatcccagctactcgggaggctgaggcaggagaatcacttgaacccaggaggcggaggttgcagtgagctgagatcacgccactgcactccagcccggcaacagagggaaactccatctcaaaaaaaaaagttctcttcatgagcccacagaccaatgtgatctagcccctgcctgtctctggcctgctctccaacctcctcagccaggtgctgcctcaggacattggcacttgctgtccttacaaacgggctcacttcccccagatccctgctcagtttatgcctctcctgcatgaggccctagggaaaagtccatccaccttggtcttacagtcatcgggtatgaaaaactcacctctaagagggcataaactctagtccatctgtccatccggttcagagggatccccctgcctagaacacagctaaggatttgctgaatgaatgaatgatactcctgatgggccctggcacacagaccacctactggcccattccaggtttttcatgctctgaccagaacactgcagtatcaactctacccacgtccccgccctcccaccccatccccacaacctagttacttcgtttggctcttgacaggggtgccagacccatgccttggtctcctctcccctcttccatccctcccacccatccccactcagctaaacattggtccccaaatgcaacactgaggtctcccctgcgaggccttctcagggtggatcgggcaaggtcttctggccccaggcctcagggccccacaaaagttcttacatcacagggaagccctgcaccctcaccctgcccttcacctatccaaggcccagacgcgagaaggggtccatgcctgtttgctgaattaatgaaggaaggaagaagggaaatgggaatagaaacacggccccatggttccatggccagcaatgtccacaggaagccttgatgtatggagagggcttggtgaactgcacagccctttgcaaaagataaacgcgtagaacaaatgggtgagcagccagaccacaggatccgtcctgtaaggcggtaaccttggcttgctgtccctctgaccttcaccttcccaacctcatgtaagcaagatgctgtccctagttgtcccacagcaagacagctaggaccaggagatagaagcacaaagacacatttgcagcagggtctcaatgggcaaggcacatgagaacaaaatctctatgttctcatttcaaacacatatcacaatggtcaattctccttcaaggaatgtgttctaaggcaatgaccatgcctggaaagatctacgtggaagggcagggtacagaattatgcacaacaaaaaaggctggaagcagttttaatagccagcaactgggctctggtcattttatggtactaacatagaatgggattcgaatactatgaagtcactaaaaataataatcacatccatattcacttatatggaaaacgcccatgggatattaacaaagttacaaaacaaaacagacctaagttttggtcattcctaaacagtcttaccccactcctgaggagtcatgccaccccaaagagacagaattttgctgtggagtgactgagcacatctcccaagtctgcacccagccaaggaacatgagctcactcagaaaaagggcaaggaggggctcagcctcttgggagcctgggtgaatagcattcaccagacctgtgggaagcgccaggaagatcttcctaaaacacccggttccttcaggaagcatctcctcggagtgcccctgcttctttctcaaatgggcaaggtgggctccctgctgcacagagggcagacaagctctagcacctgagctcccgggcagaaggctggcctggtgtccacttcctgccgctggactcgggaactgagcaaaagcaggtggctagaccctgggcacgtcctgaaggtggaggcccagtggggcacagccatggactggatggttctgtctcactccaggtgtttccttaagcaaatggggagaccacggaggaggtgggtgagggcacaaaacgtcatgtggctggagccctgggtgtggccacctcaggccaaagggaaggagctagagttccagcatagccaccaggagcaggggagcctttggctgggtcagggttcaaaactacaggcaaggagacccccagtggaataattcatgccttggggagcactttgaaaagtcattggacagtctacaatgagaactacgaaaacattcgcactgcagaccctgctctttccacacctgtgaatctcaactcagtaagtgtccacagacaggagagaaacaacaccccacacaggcaaagttaagtcagcagaccaaggttcacactgtgcacatgtgtgttagataagtagagagtaagaagtgtgcaaattcatggaatggaagtatggctgttatcaccctaaattcttgcacttgcagagactgaaataacagggaatgacgtctgctaaggcacagctggagcggggcaggggtggggtggagagggaggctacaaaaccgtgtgtccaccgggagcgatccttggcctctctgcaaatgcacttcttgtgttggagtgcttttacaaggaaaatggaaacatttaaacagacattgaaaaggggcggcattcttacccaccatatttatctgcataaacctccccacgcccatcacattcttctggcacacctaattcatttctttttttttcattatttttctcctgaggctattttggctgcaagatagattctaacagaataacagggatttaacaaataaaaggaatgcttagggatgcgttaacagtaatcttgccaagccaggaagccgtctagagcttggcacatgagtgaaggcgagaaacaatttgcctggagaaacaagaagaaaaataacaacaaaaaatcactctctgcctccgttgcagaaatcaacaagacacacacaggcagacagacctcgttttattgtgctttgctttattgaactttgcagatactcagttttttttaacaaactaaaggtttgtggcaaccccacgtcagtgccattttcccaaaagcatgagctcacttctggtccctgtgtcacattttggaagctctcaccatatttcaaactttttcattattattatatctttcatggttatttgtgatctgtgctctttgatgttactattgtaattgttttggggtgccatgaaccaaatccatataagactgcgaactcaatggataaacgttctgtgtgttctgatgctctggactgctctttccctctcctcggacctccatattccctgagacacaacaacactgaaatcaggccaattaataaccagtagtgttgaagtgaaaggaagagtcacatctcttaaaagctagaaatgagtcagcttagtggggaaggcatgtgctcagacaggctaaaagccaggcctctcatgccaaacagttagccaaggtgcaaatgcaaatgaaaagttcttgaaggaaattaaaagtgctgctccagtaaacacaccaatgataagaaagcaaaacagcctttttgctgttacaaagaaagtttgaatggtctggattagaagatcaaaccagccaccacattcccttaagccaaagcctaatccagagcaaggccctaactctcttcaattctatgcagactcagcaaggtgaggaagcggcaggagaaaagtttgaagctagcagaggttggctcaagaggtttaggtaaacaagccgtctccataacatagcagagtaaggtgaagcagcaagtactaatgtagaagctgccgcaagttattcagaagatctagctaagaccattgatgaaggtggctacactaaacaacagatttcaatgcagacaaaatcagccttctattagaagatgccacctaggactttcatagccagagaggagaagtcaatgtcaagcttcaaagcttcgaagcacaggctaactgtcttgtgaggggctaaggcaactaatgcctggaagttgaagcaaatgctcatttaccattctgaagattccagagtcctgaagaattatgcaaaatctatcctccctgtgctctataaatagaacagtaaagcctggatgacagaacttctgcatacaacatggtttattgactattttaagctcactgttgagacttactgttgagctcactgtggagacactactgctcagaaaaaaagagattcgtttcaaaatattactacctgttgacaatgcaggtggtcatgcagcaactctgacagagatgtacaaagaaatgaatgttgttttcatgcctactaacacaacatccattctatggcccatggatcaaggagtaattttgactttcaactcttacttttttttttttgagatgaagtctggctctttttgcccaggctggagtgcaatggtgcaatctcggctaactgcagcctccggctcactgcaacctccacctcgaggttcaagcgattttcctgcctcagcctcccgagtagctgggattacaggaggctgccaccaagcctgtctaatttttgtatttttagtagagacggggtttcaccatgttggccaggctggtctcgaacgcctgacctcaggtgatccgcccacctcggcctcccaaagtgctgggattacaagcgtgagccactgtgcctggccctcaagtcttactttttaagaaatacattttgggccaggtacagtggctcacacctgtaatcccagcactttgggaggccaagacgggtagatcacctgaggtcaggagttcaagacctacctgccaacatggtgaaaccctgtctctactaaaaatacaaaaattagccaggcatggtggcgggtgcctgtaatcccagctactcgggaggccgagacaggagaattacttgaacccaggaggcagaggttgcagtgagctgagattgcgccactgcactccagtctgggtgacagaggaagactccatctcaaaaaaaaaaacaaaaaaaaaaacaaatctggaaaagattcaacagtccagatgcctttaagaacatttgtgattcatgagaggaagtcaaattgtcaatattaacaggagtttggaagaagttgatttcaacccttatgaatgatcttgagggttcaagacttcagtgaagaaaggagctgcaaatgtgctgggaacagcaagagcactagaactagacgtggagcctgaagatgtgactgaattgctgcaatcgcatgatcaatctttaatggatgagaagttgcttcttatgcataagcaaagaaagtggtttcttaagatggaatcgggccgagcacggtggttcacacctgtaatcccagcattttgggaggctgaggcaggtggatcacaaggtcaagagatggagaccatcctggccaacatggtgaaaccccgtcctactaaaaatacaaaaattagctgggcatggtagtgtgcgcctgtaatcccagctactcaggaggcggaggcaggaggatcgcttgaacccgggaggcagaggttgcagtgagccgagattgcgccactgcactccagcctggcaacagagcgagactctgtctcaaaaaaaaaagaatggaatctacccttgataaagaagatgctgtacatattattgaaataacaacaaaatatttagaaaattacacaaatgtggtcgggcgtggtggctcaagcctgtaatcccagcactttgggaggctgaggcgggtggatcacctgaggtcaggagttccagactagcctggccaacacggtgaaaccctgtctctactaaaaataccaaaactagccgggtgtggtggcaggcgcctgtaatcccagctacttgggaggctgaggcaggagaatcgcttcaacccaggaggcggaggttgcagtgagctgaaatcatgccaacacactccagcctgagggacaagagcaagactttgtctcaaaaaaaaaaaaaaaagaaagttacacaaatgtaattgtgtaaatgtaataaagcagcaagagggtttgaaaggactaattccaattttgaaaaaagttctaccgtggataaaatgctattaaacaccatcacatgctacagagaagtctttcatgaaggagtcaactgacgtggcaaactttatcatcgtcttattttaaggaattgccacagccaccccaaccttcagtagctactgatccgtccaaagccatgaacttgtaggcaagactttccatcagcaaaaagattttaacttgctgaaggctcagatgattgttaccattctttagcaataacgcatttttaaattgacatgtacattgtttttctagacatactgccattttcacacttaatataactacagcttagtataatcaacttttatatgcactgggaaactaaaagatgtgtgcaacttactttatctcaatattcattttattgcaatggtccagttggcaccaaactgcagtatctccaaagtaagcctgcacacacataatacacacatgcacattacatgcacatagacacatacatgtaggtgtgcatgcatgcatgcacggtatacatgtgtgtgttcatgtggacacacatacacttgtgtacatatacatttaggaacgtgcacttacatacacacatacgcatataaacacacacaaaggcggaggcaaccagttggagttcagtgtgtgaatcccatgttcagattctccttgaacccacatgccctcttttgtagaataaccctgttgacaattgagcagtaagaggttctagtaaactgcagaagatcctggagacactttaaaatcaaaacgtgatttttaaaaaattacctttagtaaaacaagtcagctactctaaggaggttcccagatagattatttagagtcctcatcctgagacacactaagggccaagaccccctgagcaggggtctctccaggccatctggggacaactctgcacccccatgaatgtgggtgttctgcctgtcctggggccctaggagcctccggcctgagtctgggcatctgaagctctgaggtagggaaccgaggacgacagagggccccacatcccttaggcccaatccacaggcgagcatgattattattttgttggttgtttgacttttctttccctaagcccataattgtgacttcctcccaacaagttcctccggtcagtgggtacatctgagtcacactctgggggcaggggcgagtgaagcttcccaagctgagggaagcaaagcagaggcataacagctgagatcttcaggggctgcaaagtgcgggccccaggccagacgctgcccgctctcactggctgggctgaggggaatgcaacctcccataaacccaaatggcaaaactccacaagtctttggtacagtgagcatggcatgcaaggaaggaatggcacctggcgattctcaatgcaacggtgctgggcagaagggcaggttgcagccaagaggccctactcccagccctctgtcctccagtccctgccaccaagccatgccccccacagacgataaccaggagcagcgggggcggggagcaacagaacctgacctgtgcagggtgtgcagggtgcctagtccccatcttccaccagttggtgatgcatccgaatcctgatctctgcctggagcacatgaggaggctcagatccaccttggacaagtcctgcaaatgtccagggtcagaacaatccttaagaccaacagtgcgtctgggaaagtttacaagcgtcctacgtaagggagaggctgacttttcgtctttcctcagggtgcagtcacgggtgatatgcacagctttgtcagaggctttgaaaaccagcagccgccaaggctacttccaccagaaccatcaaacctgcctgcagcgagctcacaaatggacctttctgtcccaacactactatttaacccaaccctcacccatctagggggtgctatcttttaatctttcaaatacaggaaaggaagagtcacaatgtggaacgaaaaaaatggtcctgtccatttctgcaatgcctttccttgcaacacatacagaaatctatcttaagtaacaaccaggtaaagcacccatatgggtaaataactgaaggttttatgggaatatgacgtggcaactggcagaatactctctgggatttttcatcctagtttgtttttttaagtgccaactgacttctctgcctactaataattggaggcgctggggacatttggaaatgtgaggacattttaaccatcaccaccactggggtggccactagcatgtagtgggaggaggtagggaggccacgccattcctagagcaaactgtccaacaatgaattattccacaccacatgccatgaaccacgccttactggattacatccacagttcaagaatgtgtgtcatggaattctccagaggaagtctccaaactggaaggatggcctcttttccagagggctgcgtagaaggcctgcggtgagcaggcctcgggacatctctgctgtctgcccatcgtccctctggcaaatgacaaatgacgagaacttctgcaccactcccacccccaccaaggaggcctgagcacacgaggcaggcccaggctggccctccactgtccacccccatgtgggtgctgacgcctgtatacaggacactgcttcctgcaggcaagaatgagggagcccgattctagcatcagagcctcttgtaggttcccaacataaaaggaaacagggtatttgccgtcctgataagagcaagctacagcaagccggtgccgaggaggatcaaagaggctgcgccacctcctaggaatgcttcctcggcctgcattgttttcttcttttattcttaccccagggcaaaaagcaaagctcccagtctgtgcctcatttcaggctaacttgacacttggcagagggtcccacaccctcctccatgcaagagtgggtgcctccaccaaccccaacccctttgtgtccatcagcccaacttcaaagaggccgaccccagcacctccccaccctgcagtggagcacacctgcagggaccaagaaaggcccaggttttcattctaaggacttggggttcaggcccacctctcccatcacctacttgcaaatttccaccgactcctgtttcgtcgatggaaaaactgggacaaaataaccacagcctccctgggcaggtttcccacgcatgaggagaggacaaggcccactgcctggggcccccctcagcagagggtcccagctctgcctccccagggtcccactctcccacacagccaccctatgggacattcctctgtgtacacctgcaggaaaaccctgctcagggtccaagtccaagccctccttggttatgtccaaggccatgagcaggaggaagctttgcatgaccccctcgagcccttccactcacctggtaatggcaaaactggccgcaaatctcccagagccgaaatctccccagagggagcccaagggaaagcactggaaggcagaagcaaatctcgcaacgcccgtgtatatagacctcccatgtcactcttccaaccccatgtttaatgcatatttaaatatacagacaggcaggtcgtggtggttcacacctgtaatcccatcactttgggaggccaaggtgggcggatcatgagatcaggaatttgagaccagtctggccaatatggtgaaactccatctctactaaaaatacagaaattagccaggcatggtgacgcgcgcctgtagtctcagctacttgggaggctgaggcagaagaactgcttgaacctgagaggtggaggttgcagtgagccaagatcacgccactgcactcacacctgggcaacaaagcaaaactccatctcacaaaaaataaataaataaataaacagacatcaagacacatgttcagatttttaataatgggagcgggagaattctccaagggacagcagaggtggcttcacaacattgcatcttaggaatgtgcccttggcgagttccaagaactttctggtgcagggcggtgcctcagcctcgtcacatcatctttacgcaccccaggactatgcagagaatggagaacaagaggcagggatgggggctggaaggggctaaaacaagagccacaggagccaatcttacgagaggccagccctcctgctctacatctctgaggcctccatcaaagttcacagcatcctatggccccagtctccctggggcccttgtccatctctgcactcacctccttccactccccctcattccaggcccaagctccaccatgcatcttcatcagggcaatgggcagcctggggaccaggacacgcagagagagctgctgtagcataggacaaggaaaccctggccttcacattcggcggtcgagcagccctgatgatctgatgaagctacaaaccctgagaacaatccacacacactacacctagcatgaagggattcacgatgctgctgagggccactggggccccaaggtaggaagctgggtctacaccacctgctccacccccgcaggactgcaagagccggccgcgggtctccctttgcagcccacctcaaactgggcttttctgcatcattgccatggtcagaatgtctgtgacccgcccccctacccccaattcctatgttgaagacctgaaccccaaggtgatggtatgaggagctggggcctcaggaaggtggttaggtcatgaggctggagcctcaggatgggcttagggcctcataataatgaccccagggagctccctcacccctctaccatgtgagggcacatagaagtcaccatctatgaaccaggaaacaggccctcaccagacaccgagggccttgatcttggacttccagcctccagaactgtgagaaataaattcctgtcgtctatcaattgcccaatctaaggtatcaggttgtagcagcacaaaccaattaagatatcactctgtccaaaacctggtgttttcatgtcttccataaatctgcccaaccaaagccctaaacctaacttctcacccggtggcattctccccagactcccttgtccacctctctgctgctgtcaggggcaaccagtccttggccgactctgcctgtggtcccgctggctgctcctgcaaccctcgaactgggatcccagcacagacatcagcctacaaatgaccccctttccaggggcaacagcagccccacctctcagcacccctaacttgctcctctcaaacccacccagaacagtgtcctttctgaggtcctggctgggggacttgggaatgtcctggagcctggagcctccaagtcctcagtgaggaacccaggcgccaccagatccatctagaaacaggctgtaatccccaagcaaccctgtgtgaccttgtgtgacccccacatcaggcaggccatgggtgtccccatacacaactgccagacccctggcctctgatgtcaggtcacagtgactgctcaccccagggattttcaggtgtgacttcatgaaaatatcactgtaacaccagaagtaaactgaggcacagcgtggtcacctctttgtctagggtaatagggataggacgtggtgcgacgctggttgggcaaacttcagagggtaagctaggacagatgctcatgcctctgtagtcccacacacctaggtttattcttctgtagctcgagtgcaatattctagtgctttgtccttgtgtctcagagttggacacatggagcacaggatgctcaaatccctggcaccttattcttaggggcctgaatcttatcacactgcctttggccaccactgggagtgttagagactgttgtgttccacttctctaatgtggtgggtgcagggtatgctgaggactatgcagggaccctatgggaccacccacctcaggattcagcctcagaaacttctctactttccagaataacttgtttctgttcattatctgtttttcttaactcttttttttaaatcgcttagataccaaaaaacaattcaaaaccattgtttccctcatcacaatggctactaggaagctcatagccaaatcatgcagtcacctcagaagtgtgaggctgtgtcattccttaggtgggttgcaggtatcagcaaggggccaatttttaaaataaaatttgctgaataagtaaatggaagagtcaagcaacattttagaatgaaaaacatggccacaatatttctctcccaagactcgtcaaaaggtggaatctatttcctaaccctggcatccgagctggtcttgctttggccaatggaatagaacctgaggtgttgcctgcagcttctgcctttgcccttgggtgacctgagataaacctgctaagaagcaggactatgcagacagaaaggccaggctgtgaagacctgctgagcacagctcccatgcagctagcccactagacctcaagaaagaatttgttttcctttaaaccactaagttatttagtctgcttcacagtagatagctggttcagccacttagtctactggtaacctgaataggtcaatccttactaacagcccaaggtggcaagtaattgaagcacagttgcaatacagtttgataggtaaacatttctccattgcagtaatgatggcaaaaattccctgtgcaccctgaccatccaggggaggagtggcctcccctccctggactgacccagtgtatgtctctgacccggagatcattctggaaatggaaaagccagctcatttttcctcaacagagttctgcaaaaaaaatctttatcattgatagttatcttaagtagactcaaagagatggaattagatttatttggtcaaaggtggataaacacttgaaaggtcacacccttcagtctcatctgctgccttttttttttttttttcccatatggagtttcactcttgttgcccagtctggagtgcaatggcgctatctcggctcactgcaacctccgcctcccgggttcaagcgattctcctgtcgcagcctcccaagtagctgggattacaggtgcccaccaccacactcggctaatttttgtattttagtagagatgaggtttcatcatatgggtcaggctggtctcaaactcctgacctcaggtgatctgccgccttggtctcccaaagtgctgggattacaggcatgagccaccgcaccaggcctagtctgctgccttctactggagtgcaacatttcacaaaactctgcaaccaagtttatgggacatccttggagatgctggtatggcagtggaattctttttggtggaattcttaactacgtacaaaacaagtaaagtcagtctcttggctgtgcatgggaaaaagacttttctctctgaagatgacatgggtaagaacagcatggataaatcaaggcacacggaagatgggtttcaggacaactccatgagtgcctggggataattcaacaacaacaaccgttgggagccaagacacagccccacccccagctccgggcccagccttctctggccatacccttctttagctatgcccgttcttgtttatgtccctaacagcgaagctaggcaaaactccctgggcatccccgggccaggccctctgcctgggcacacaaggatcatccagagtgagtgaggcagatggagtggtcacagccaggagctgcatgggcacctgccagaaacacagaacccctcctgcctggagccccccttcaaggactctcaaacctaggccaacgacaaagatctaaagtccacagccctaccatctggacggtgagataaatacataagaacagttcctaagctgagggcagctcacactttcacgaacgtctcctgggtgctcactctgaaaggtgcccttgaagaaggccttttcaccagttttggtagaaaagcttcaggacccagtgatgacctcctgggtcctgagctagtcaaccatggggcaggactcactagcaagactgagtgcccaacctctgaagccaggatgctcattccctctggaggacaccaatcctatcctggggagatccaatctcacccccagggtgtcatcaaagtcgacttacagaagctctgccccgcttctccagaaagtggctcacctttgtgttccacaagcctagtgatgaacagtgtattatctcatgacagccctgggttgaggccactgagcagggaggacactgttggtggcttttcccacacccacttgccaaccagcataaatcttcccactgccccagaccacagtcacagtcacaatcccaattccttgcagtggtcattaattttatgcatcctcttggctaggccatggtatccaattgtttagtcaaacttcagtctagatgttgcatgagggtattttttacatatgattaacatttaaggccgggcgcggtggctcacgcctgtaatcccagcactttgggaggccaagatgggcagatcacgaggtcaggagatcaagaccttcctggctaacacagtgaaaccccgtctctactaaaaatacaaaaaaaattagctggcatggtggcaggctcctatagtcccagctgctcaggaggctgaagcaggagaatggcgtgagcccgggaggtggagcttgcagtgagccgagatcacaccactgcactgcagcctgggtgacagagcgagactctgtctcaaaaaaaaaaaaaaaaaaaaccatttaaatcagtggactttgaataaagcaaatgactctccataatgtcagtggggctaatccaatcagttgaagcccttaagagaaaagacagattccgaattctgctccaagctgccttcagactccagactgcaaccttgctgggcgtggtgactcatgcctgtaatcccagcactttgggaggcggaggcaggcagatcaggaggccaggagttcaagaccagcctgaccaacatggtgaaatcccatctctactaaaaatacaaaaatttgccaggcctggtggcacacacctgtaatcccagctactcgggaggctgaggcaggagaatagcttgaacccaggacgcagaagttgcagtgagccaacattgtgccatcgcactccagcctgggcaacagagcaagactccgtctcaaaaaaaaaaaaaacaaaaaaaaacaaaaaaagactgcaacctcaagaacggctaaaatttattcatatatatatatgcgtatatacatgtatacgcatatatatatgaacatgccctgttggttctgcttccctggacaacctgactgattaatatcactaagctcttggctgcctccccgaccctatcctcattcagctctcagtttccacagcaccttcttttcctctgcagacatgtccccttctcacagcttggtccacattcacacgtggctacctacttgctcctgagttcataggaactcctcgttgtaagaaaagcagactgtcttgcacacaaaagaagctcagtctgcatctctatggtgaagaatcaaaatccttaaccagtagagcaggctataaagacactggcctccagaaatgttgatttttttatttctatttttttttttttgagacagagtctcactctgtcacccaagctggagtgcagtggcgcgatctcagctcactgcaagctccgcctcctgggttcacaccattctcctgcctcagcctcctgagtagctgggactacaggcgcccaccaccaagcccggctaattttttgtatttttagtagagacggggtttcactgttagccaggatggtctcgatctcctgacctcgtgatccacctgcctcagcctcccaaagtgctgggattacaggcatgagccaccgcgcccggcctttttttttggagacagaggctcactctttcgcccaggctggagtgcagtggtgcaatttcagctaactgcaacctccacctcccaggttcaagcgattctcctgcctcagcttcccgagtagctggaactacaggcgcacaccatatgcccagctgattttttgtatttttagtagagacggggtttcaccatgctggccaggcttgtctcgaactcctgacctcgggtgatcagcccgcctcagcctcccaaattactgggattatagataggcatgagtcactacgcttggccagttttttatttcttaaggtaataagccagtaggtgggggacaaagttaaatataaacaaatgctgaaaatacgcacaaatttacactagttaacaccaacctcgctttccaatttcgcactctgctggatttcttaatcttaggcaaaaattcacattgggggttcagggagctaaaaggagttctcctaagtatgagaactgtaaatgcagcttattcctcacacgggcgctgggaggctttggaagagcaaccagccacagtctgatggcatgatatgcgtggattactgcaaagccacatggaactttaaagacatctcaattaacagcttcactggggtttcagattagtatacatattggaaaaaagattaatccagatgagtggttctaaaccctgccgagccgcaacccaaagtgtctgacgcaggaggtctgtctggggtggaacccagaactggcattcctaacagtttccaggggatgctaatgctggtgtcaggacctcactgtgagaactgctgacttaagatagcactcgtccaaaaacatggactcctcaacagagccacccaagcagctgcccggctggtaggtgagcctgggcaggcatctatcatttggcagtgatggcagccacattcacgtttccactgcagttacaatagcgtgctgcccaaaggtactcagggtgctcttacagagtcagggtttgagaaaaggcacacatgtttgttttgtcaaatttgcaaactgcctatggaatcaacaaagtaaatacgattttctccccctctactctcccttttactctgaagagcttgctccccaagcaaaagggattgctaagtaacagtctgattatgtgcaagacaatagtgtttctaaagtgcttaaaaacagttaagaactaccactgcataactcctaagggaataactgattcaggcaaaggccatccttgtatgttaaaatggctgaaagttgttaggaggcagtatcaaaggtaagaagggaatcgggtctcaaccaagtgatctgacttagcgggccaacagcaggacaaaaagacattccatctcatggccgggcacggtaactcatgcctgtaatcccagcacttagggacacccaggcaggtggatcacctgagtgcaggagttcgagaccagcctggccaacatggtgaaaccccgtctctactaacaatacagaaaatcagctggacgtggtgggtgtgtgcctatagtcccagctactgaggcaggagaatcacctgaaacagggagggaggttgcagtgagccaagatggcaccactacactccagcctgggctacaaagccggactccatctcaaaaaaaaaaaaaaaaaaaaaaagacattccatctcttaatgtgaggcaagcaagtagaggtacctcacacatatgtaatcattttttaaaaactgcttatcctgaatctaatgaggagagaagaaccgtacaaattcatactgtgcaacaatctacaaggcaaagtccaggaagaaataacattgtccctattttcagatgtcatgattatctacatgggaaatgcccaggaatatacaaaacaaaactttgcaaactcacaggatacaaggtaaacatacaaaagtcaattgcatttctatgtactagtaatgaatacacagacacagaattaaaaatacaaggccattcacaatcactttaagacgtgaggccaggcacagtggctcacacctgtaatcccagcattttggaaggccgaggcagatggatcacgaggtcaggaaatcgagaccatcctggctaacacggtgaaaccccgtctctactaaaaatacaaaaaattagtcgggcatggcagggggcatctgtagtctcagctacttgggaggctgaggcagacgaatggagtgaagctgggagacggagcttccagtgagcagagatcatgccactgcactccagcctgggcaacagagcgagactcggtctcaaaaaaaaaaaaaaaaaaaaagaagtgagacacttgggtgtaaatctgaagacacacacaggacctgtatgccaaactacacagatgccaatgaaagaaatgaaagataatctaaataactgaaaagatatatcatgttcatgaactggaagtcctgcaactggtgagtggttgagtaaactgtggtacatccctcgtaggtaacatcgatcagtaataaggaacaagctgggcctaacatgacttattctgccagtcgccccctaaaacaagaggctcgggcatccggctgattctccagcccaatgtgacatgctgatttctaagctgcctccactttgctgtctgtacccacaggcaccccggcaaaactccactctgggagctcccccaagaccctctgagaggctgccctgccatcaagctcttgaaaagttggcacagggagccccatttttctcaaaggaaaggccagtgattcaaaacactaagccttggactccagaggaccctggggcctgcaggagagggtagggagaggcgagccaggccacagcagcaggcacatagtcctgagcaggccacgggatcgtcttccttcaccttcgagatgcagctggaagaactgggggctccagagcaggcagaatggagacaagcagactctgggtctgagaggcgtgatcggaagccccttgccctgccatgtccaagctgagatggtgggcaagctacctcgccctgcattcaccttctgagcctcagtttctacagagttagtgagggttaaatgtatctgagacacagcaggcactcactgaacatgagctgcatgaaaggaatgagtgagtgaatgaatgaataaaggaaggaacaagtgaatctccccgcacagggcctcacacacagtcaataattcatgccagttacttccctgcctgcggcctccactctgcggtgtgcatcttctatgcatggcaacaagcctgaggtctatgagcggctgctgtgccatatcgcattcgtgcagctgcaaacagaacagtgcgttatggaaaccccggcagatgtgggggagtcgtgagtggcacccacgtgataccctgccatgtgttttacccagggccaaggccaaatgccaactgtttgacacaatggccctgaagtgggccgcagcctctttgaggaaggacagatggatctgctgatagagcgataacttgtaccgggacacactatctcctcctcactgtggctgtgaacaaagcccacagtattcacagcgtggctgccatcaccacacccactcctcctccaggcagggatctgagcagttgctcatctgagaattgatgtgcttcaggcacgaagcctatgtattatatgaacccaaacatctctccaaaatttggctagtgtcttacgtgcactcagtccccgatgcagtatttgtgaacacgatctgggggtctcagcacaaagcaaaaagggggagaggagacattttcccaggacaagtctgctggatgcccaacatctttataagaacaaaacctgcatttaaatattacacaagggtccaggcgcagtggctcacgcctgtaatccgagcactttgggaggccgaggagggtggatcacctggggtcaggagttccagaccggcctggccaacatgatgaaaccccgtctctactaaaaatttaaaaaattagccaggtgtggtgatgggcgcctgtaatcccagctactcgagaggctgaggcaggagaattgctcgaaccagggaggtggaggttccagtgagccaagatggcgccactgcactccagcctgggcaacagagtgagattctatcacaaacacacatacatacatattacacagggacggggcgtggtggctcacgtctgtaatcctaacactttgggaggccaaggtgggtggatcacctgagatcatgagttcgagaccagcttggccaacatggggaaacctcgtctctactaaaaatacaaaaattagctgggcgtggtgatggtcatctgtaatcccagctacttgggaggctgaggcaggagaatcacttgaacctggtaggtggaggatgcagtgagccgagatggtgccactgcactccagcctgggtgacagaacaagactctgtctcaataaaaagaataggtcgggcgtggtggctcacgcctgtaatcccagcactttggtaggccaaggcaggcggatcacctgaggtcaagagttccagaccagcctggccaacatggtgaaaccccccctctactaaaaatataaaaaattagccaggcgtggtggcaggcgcctataatcccaactacttgggaggctgaggcaggagaatcacttgaacctaggaggcggaggttgcagtgagccaagatcactccattgcactccagcctgggcgacaagagcgagactccgtctcaataaaaagaaaaaataaataaataaacattacacaagggattacacagtgctggtggctctgcatcaagactggaatccattttccgaggaagaaaaaggaaatgattcttgccatttggcagtacagatttgaaggaaacaaaccccacaacacactctgtccagaaagaatattcttttgtgctgaagtcacagctccgtaggtgcaactcttctcaggaaacctgcatggactcctggggacatttgtcatcaactttcaataacacaacaacttgcaatgtggctattttccaaggaaatatcagtaggctagattctcaagtctgtaagatgagttgtaaatggttctcttctgcaagttaaaggaataatttacaaagcaaaactccaagaatgaaagttgtggccctaataaaaacatgaacaaaagcctgggaaaatgtgccggcatttccctctctcctcgtaagcaatcacttctagaatgttttcatctagatgtgtaactatcccctcccatagtgaagtgtgcccagtgagcaccggattgggaggccagcccctggctgtccagaggatggaatggaggctctgagtgatgtcacaccttggcaagtacacgtagctaactctaagctccttctaaagctcttatcattttttttctttctttttttttttaagcagcagcagccttcttgtccttggaggaattcagatttaatgaggacagagagatacaacgaaaattacacaacccaatcccacagaatgtgagcagatgaaggccatggctaactgggcctcagaacagagggccaggcctctggtagtcagcgtcccacctggaccactctggaagggacatagcctgggaaggactcaggaggcccacagctccactcccttctcagtcagtctgtcttggggggcccaacgtggaggaacttgggccaatctgaaaaacacttcttttggggtcagagctctcaaaagggtgaccaaccacagatgaaagaaaaggaatcgaaggctaacctggtttccactggaaagaacctcgggtacacagtgtcgacagctactcctaacagctcagtgaggtccgtgctatcaacacagttttcagcaccacttcagagaagtttggggaccatcccagggccacaaagagaacaagtggcagggacgagaaggggtgccacctgggttcctgcaaagcctgctccctttccgcttcacccccagggtaaacaggcaggacaacgcagccacaggctgcacccacgctggggacttcctcttgtttgctcaaagccatctggcagtatgggaaacggaaaagctggtgtccccagagctgacaagaggcgaaaccgtgcagaaaaaccagtgtgtacaaatgaaaggagaggcagtacctccagagggtcaaggggactccagacaatagcgatcacagtcggccaaaagcctctgtccgctcccactcattcgcccagctcatcttggcattgaaaacggaagccgggtctgtctggaaatcagctggaacctttttggctacaaagctgaactcagcaccaacagcccccagctggccgctcaccaagagtcctggtcacagactcacaggccaaggtcggcattaagcggcccagtgcgtgtctagccctgtcagcatgccgctggccacacagctgtgcttgccccgtgcgtggtgtcccagggaactatgctttggaagaactaacccagtctgtgaagagctagcctggcaggagccacagcacctcccactcctctcaccgccagggcccacaggtcctggcagccagccatcagggagaggaatgcaactccgcagggcatgaccacgcagaggggccacctcactgctaggtgtgaggctgcagagacctccccatgggctccgcacagacaaccagacacccgacaagctgagctgatgtggaatgggcatgttctaaaagaagcagcactgacaaacatcttttactcacaaatagcccggcagccgagggaccatttggagtaaggccatccctccagggcgttctgagaagtcactacagtcataaatgggagggtgacacccagagaccggcaacggcaacgcctaggtcgggatccaggtttgggagaaccattcgcgcggtagtcacacacacactatgcttctcacgcccactgctgcaaacaccttcgtgggaagaggaaaatgaatgatcgtgtgttctgttatcctgtgagaagagtgagcctttaaaaagtgaataaacaccattccagttgtcgcaaaatctctactaataataagcaaaatgccttaaaagcacagtatgctctcgatgacctatgttttggattattcctatttaatggaggtgggggtggggagttaaagagcaacacatgatcgggtgcagtggctaaggcctgtaatcccagcactttgggaggccgaggcgggcagatcgcctgaggtcaggagttcgagaccagcctggccaacatggtgaaacactgtctctactaaaaatacaaaaattagcggggcgtggtggcacacgtctgtagtcccagctatggaggctgaggcagaagaattatttgaacccgggatggggaggttgcagtgagctgagatcgtgcctgggcgacagaacgagactccgtctcaaaaaaaaaaaaaagagcaaaacatagcaactctgtgtgttgcgggttacctgtctcactcaaatttttcatcagaataatctggttacacctgaatccttgccagtggaaaatgagaaaggcctcacagggatatgtggggagttgccaccagggctgccccagaaatcaagggtcacgtgtggcccaggcttgggaaaacatttctcaaaccacgtggtcccaatgcaggctggatctccagaggtggggcccacccaccagtccttccctcggaaagagaccacggccccaaggactgaagcccaaccaagtaacttaactattcattatgctaatatgccctttgttgaggacccaggagccaacgccctgatacaagccagcagggcaatgccttcacccacctcacgagcaagcctattcttcccttatgggctgtgctcttggaaatttctgtgcagactctctccacctcccaccctggggacaccctgccgccctccacgctgcctcccaccagcccgctaggtcgctggggcattggtctcaaatctacaagcgccatggaaagttgtccagggctttgccacagttctccgaaagggtgaaacaccctaccttgtgtctttgtattcttctttgccttctgcaaatcccctttgctactccagaacacagcaggtggccctgcccagggcctctgcccacgctgcccctccatcgcgacgggtccttctgcaaagtcgcccaggatttagtccctcacctcccccagcccagcatcctcttggaaagaaacaccagttgactccagatagagcaacccaccaccccgtctctgggcctgcaggcctgcccggccagggacctcaagtaatccagaggagaaacattaggatgagtctgcctcctccttgagcccccaaatcccaccaattctgcaaatgcccacgttggaaaagatgccagtaattctggttcaacatgttccaaggaggggaaaacgacagcctgctgttgacattcctgatttggaattgtgaacacattcttagagggtaaaaattaaccaccatcagttggggaaggcattatggggagggcattatggctgcacttcaaggactgatcacaagaaccgcctcactccaactgcccagggcctgcatcgacgttttaacagagccaaaccagagcgagcccagttctggaccgttccctcagaaaagcagccgaggaaaccctgagtaattgcactcatagatcataggctctggcatgtggttcccagactgaaccatttatccaaattaaaaccattctccagaaacaaaatcagacccttttaattgaaaataaaaccaagcaaccccgaaggctcttttttttttaaatgaaagacattcttcctgctttctcatcccattaatcacagagtttacacaatctgtcaaaatagcttggtaagaagtctccctcttccttttcctgcaggcctggtttttaccctgggggtgataacctagccatgtttaaggacagcgggtggacaccgtgagaatccagccagcaccctatgtctcaactgcaatttgaccatatatactaaggagttccaaaaagcttgtgctcaccaaaaaaaaaatggaaagcagggacttatacacccatgtccatagcagcattattcacaacagccgaagggtagaagtaactgaagtgtatcaacagatgaatggataaacaaaatgtgctattcatacagacacacacacacacacacacacccccacacacacggtattattcagccttaaaaagagagaaatcgtgacacatgctacaacatggatgaaaccttgagtacagtattctaagtgaaataaacaaatcacaaaaaatacaaatactgtatgattccacttgtatgaggcacccgatgtagtccgtttcacagggacagaaagtagaatggtggttgccagggactggggggaggggaacatggggagttagtgcttaagggacaccgagtttcagttctgcaaaatggaaagagttctggagctggagggtggtgatggctgcacaacgtgaaggttcttaatgtcgcctaactgccgcagttaaacatgattaaaacgacaaagttcatgttatgcatgttttaccaaagcttaaaaaaaaagatgtttgtattctttgatgccaaagagtctgctagaaatcctttcaagagcatgactagctacgatctgcccaaagacctatgtgcaagcataacacaggatgtaaatgatcaatgaacaaatagtgaagtccaaatatcatggtacatccacatactggagtactatactgtcatcagcagtcatatttatgcagagctatttctggattgggaaatgcttatactgccacattgactttaaaatgcaggatacaaaataatacatatggtatgatctcagcttggtaaattaaaaaagcacagaaaacatatggcacacaagaaggctaaaatatgaacctctgtggaggtgatattagaaggaattttttcctttttccttagcatttctctatcttttccaagtctacaatgagcacatattacaagaaaactattttgtagaaaaatagtcaaaaagcaaattaagaagcaaagatacggccgggcgcggtggctcacgcctgtaatcccagcactttgggaggccgaggagggcggatcatgaggtcaggagatcgagaccattctggctaacatggtgaaaccccgtctctactaaaaatacaaaaaattagccgggcagccaggcgtagtggcaggcgcctgtagtcccagctacttgggaggctgaggcaggagaatggcgtgaacccgggaggcagatcttgcagtaagctgagattgtaccactacactccagcctgggtgacagagtgagactctgcctcaaaaaaaaaaaaaaaaaaaaaaagcagcaaaaatatgctcattacttgagagtcttctgctactctccgagtaatacagataaaaaatgtgcctccctcctgcgtgcaggacaagagagaaatgcattcttcacccacgtagagccctcctgtctcccttagcacctacccaagacatggacacaggccccctttcctccagccctgtccacccggctctgcaggtctttccagaggagacaaactggaaacacctgtccttgatctttggagaaaaactcatctctatcacgctggcctcccctgtgtcaaccacttagcacacagctccctcccagtggatcagattagcacctccaagaatgaggaagtggttctccagaaggaccacaaggtgcttttcaggcccctggggccatggaaattcagcaggaccaaagtacactgggcctggagcccaaaaggaggaaacaaaaccccacgtggctcccacccctgagctccggaaccagtggaggagcaaacctgtggaggaacgacaaccccaggctgcaggtgacaaatgacaaacacagtcacaataaccccaggacctctcaggacaaaggacagttctgccccaggtttgtgggatgccagagcctggcctatgtcactgcctcctgtgcgtacctttgatctacctcccaaatggccagtgatgaaaggggtaggcgcccagggacacctctaagaaaggtgatggattacaaggtggagaagaatgccaggaccaggcccctttgtttgcagagccagcccggcgctccagggaggaatgtgcacaggccaggacgcagatgcccctgctaatggcccagtgtgccccagggcccactctcctgcccgcctgccctgcacagccagatgtgggcctgtgccttttattgtgtggctccaagtgagtgaaatgttacacactgcagctgtgttccagggtgatggggagagcgcagattcctgaatcctccagcgagaaataatcccagggcctggagcagagcccgggctctcctgtaaaaagaaaagcaactgcagacggcagtgaacggccttggccagacacttcccgaggactttctttctttcagtatcgccacgagtgtattccagtgtattcaaagcatcaacgaattggtctctacttttcaggagcagtttcataaactctacacacaagaggtgccacgtcacactgtggctgccaagacacaatgaaaggaggtgacacactttagtccacctggaggtgtccccggtgtccccaggggcatggcctggctaggagtggcacttgtaatcgtcagcagggcacccgtattcatccttcctgggtgccgacaggttgccgctcgcttgggcagctggaagaaagattcctaaagattcttctgatatcttagaaacaaagccaggcctgcaaagggcgtattaagtgctattatctttccccaaaagagaagaggaagaggaagggcagacaatctaacatgaaccataattagagctgagggaggaaggaagagtaaagaaaggcccagccttggggtccgaggaagcagctggggctggcgcactggctgaggtagacagcaggcacgccgcagctcctgagccttggcctggccactccaggggctgggctgtgggtggggactgcacaaacccctcatcttggcaagaactccaagcattgctgacggaccgggattcagatccaaggctcagtatcctcacaacacacacaagttacttgagctcgctaagtctcagcgctctcttccagaaaagggagaccatcaggatggcatacatgcacggttcagcaacgatcagactagggacagaaagtgcccaagccaccttgggtacttgagtagtaaaaggaagggggtcttgttagccgcgttattaggctgagagctggcgggctgtttgcagagggctcccagggcttcctgcccagcgctggggtggagacagggacagagaggtctctcccctgaggggtggctctgaggagcacttccctagctctgggagcacctccctctgccagagggaattttctagatcacagacatagaatccttcagtataatctttcattcattttgcccaggagacaaaagagtagtagactactgccttctaaaaaaaaaaaaaaatcggccgggcacagtggctcacgcctgtaaccccacgctttgggaggccgaggcaggtggatcacctgaggtcaggagttcgagaccagcctagccaacaaggtgaaaccccatctctactaaaaatacaaaaattagctgggcatggtggtatgcgcctgtaatcccagctacttgggaggctgaggctgaattgcttgaacccaggaggcagagattgcagtgagctgagatggcccgactggactccagcctggactccagcaagactccatctcaaaaaaataaaaataaaaaaataaaaagaagcatgtgagaatcctccccttccctgacacagtgaggcattccgagggaccctaaattgtgtgcagtgcttcatccccaagttgatggcccccatcctcagtcaccctcattttcactggcctcctccctcctgtttcgcagaggcaactcccagcgagggtaggaggcaacaggtgagggataccaggtagagctgcgccaggtgcatggggcagggggttgggggggggcggtggttagaggtgtgtctagagggccacggtgctcctggagtacactgagcaggacaggagatgccgccatgcagacaatggagacacccgagggaccctgagctcagcactacatcccacattgcagtgatggatgtgtaccaaacacattcctgagtcacagagtacaaacagaaagctcacgaaacttggagagtctagttttctgcttttacgagaaacggatagacatcaaggaaaccactgttcctgcccgagctgcactcgaaaagccccacggcaggacacgggcctgcatccggattcaacatactctaagattcaaaacgccctcaatctaggagaatttagtcctgctcagcagcattttggtggcagcgatttttcttgtctcagcgttttaggagcagtgaggcagcgtggaaacgacacaactgtgagccatgatccctgtgaagatgaagccacgcaacacgcccttcactgtgggggcagaaagaaagaactgtgttccatgttgtgatggtttttaatactcttgctgtgaggaagagagtaactaagttaatcaaccacctacttaattaaccaactaaccagcatccctcattctagatcaacaaggatagcagcagaggattctaggtagacaggactggctctaggtcattccaggcacagcttgcaggggttagctgattccccagtgatttctggggtcctacaggaaggacccggggtcccagggtcagctgacctcctggagagcttcagacgcccagacccacccttcccatgatagctcctgctgcatggggcaaacccaccagatcaacccgcaagacaggaggcccctccctgggaaatctatgggggccgctgtgaggaagcctcgaagcctcaattctaagcgtgctgctgaggcactcagcaaatgtctctggcttcctagtaagtggcagggatctaaacaatgctttctgccctcaggaaggtggaaagttcctccccctctcaagttcatacacagggacacagggagggaacaagaggcttcccctgaacaggggtggtttacaacaggctgatcttaagaaaggaatggggcacatagagtcagagaactgggctcattcagatccctaactgttcccagactttaagaatttacttggtattttactcatctgtaaaatgggtccttgtgtagagtcctaagcagatataagctgcgactgccaaatggtaggtcagcccttccactcactgttcttgccatactgcctcctcctcaggtctctgctatccccttcagcaacacctcctgcagtggaagagcatactttgacaccccctctcctgccctttatttccagagtcacatttgcaaacagctcactttcaaaacattaggtgccaaagagacactttgttaaaaaaaaaaaaatcaatttgcattcaggaataagtagtgccctggggctactagtttttctatcttggtagttttttaaagacataattcagctgagctgctgatagctatggcagcctcagctgaggaatcgctgtctggacatgcattagaattcagtcgacagacgcgcagcagcagccaggaacaggggtctgggaccctagagtcctgtcccagaatcccaggctgcactaccaccatgtttcatttcatctcggccaagttacttagccttcctttgcctcagtttactcgtctgtaaaatggggtaatcataatcccaactccctccaaggaatgtaatttgggtgaaatgaaatgaatgcatgcaaagcatttagcacaggcaaacactcaatcggtatgcctgttactttgtcttcggggtcaccattactattcctaaggtcaggagtcgggcttgctgccagttcctcctgtcaattccctgtgtacacaccccccaccccctgtgctaccacacccccaccaggacccagtgcacctccatctctgtgtaatggccttgcccctccaccctccagctgcagcgactccccaccccctccctggccctcaaggcctcagcacagaaaagcctttcttaatacttgttgattgatttgcaaatataacctcacaggccccaaagagagaagaaccagaatcaccagaacaagtaaacctcattcaaaagggaaagcatgaaagcaatttaaaaaattaatatgcacagaccaaagcctcaagaaaatctaaaatgtcaaagggttggttagttcagaagggccatgcaatattaatacaatgagttctgcattcatacttttcagtatattttcagagtcctccatgatcatgcattcaaatagtgaaaaaaatggggggaaagccaacccggaagatcaaagtgtgtgaatgcgccccaaggaagcctgggggcttcccagggggttgtgaccaccctcagtagtgctctctgctggccccacaccctgatggcgctttgagtttttcaaccacgctggagttcgggtcatctgctgacactgtctggagaatgcctgaggaacgcctgaatctcttcccgccacagacactcaaatcactccaagcaaaggacccgggactcacatgtcaggccgctgcacagcaccgacacagagacccctgggccgtccgggaccctccctcctcctgcttgtcagcgacagctcccgcgtgccaggaggcacatgccacacagctggcccccagcctgggacagcaccccccaccccagaatatccccccaccccgaggtcccgtccttcagggaaaaaaaggaagcgcgtaaagaccccctgcctcccacccaccaaagggaaagggaaagagacgcactggagagcttgcctagaaaaagtaggagaagggtcttgagcctgcccattgaagcccctagctgcgctctccacctggagtctcgagacggagtcctagggagcaaagtccgctcggtcccgacagcgactgcgacatagctgctccggtctctgccctcagtccagggcgcccgggcgccacgggtcccactcgagtggtcctgcgccccagccagtccccaaacccagccagtcagcgcccccgtccccggactccggcgaagctggcccgcgccccagcccctgtcctgggactcctgccgagcccccgccccccacgcgccgcaaaccccgtacccgcgcgcaccaaaccccttgcccgtgcgcccccaaccgggtccccgcgctccctaacctgggttctcccgtgaccccatccccgcgccctgagctcccgtaccccgcgctccccgaactctgtctccgcgctccccgaactcagtccccgcgccccagctccagatctctgtgctccccaagcctcgttcctgcgcccggagcgcgaaagcccgcgccgggcccgaaacaaagaggaccgcggcgcgtggccgcgtttcctccttccccggccccagtacctgggggagcctgaggcgcggtccggcagggcgatggccgcaacgaggctgggctccgagtagcgcgcgggcgggcccgtcctcctggctggctgccggcgcccgcggcagggccccctcgaggcggcgcgggcaatcgccacggccggcccccgcgcccgcgccccgagcctggcgggtcacctggcctcatcaccctaacaatgcagcgcgcctccaggcgcccttcaccggggtcccccgccctgccgaggtgcgccctgggacctcccttcgctggccgcagagaggacctggaattatcagacccattgagcagcccaggctccaagtggtctggaggcttgcaggttccgccgggccggtgttagagtacctggggaggcgggttcggatcctggttcctgcacaaccagttcattctttcattcagcgcctgtgattaaggtgctctccgggagcaagacctaccctccctcctgtagctcatagcctagtgggagtcgcgcatacataaaggagcacagccgctccggaaagcctagggtgccgtagaagcccctgaaatacccagctaatgaagggaggaggtcagggaagtctttagaagtcacatgacttcttaaaatgcgccgggacaaatgagcagaatttaggcaagccaggggaaaccagaaaaacgatcccgagcagagagattctcagaggaggaaaggcctataggttgtccatcctgactgtccatccctgagattcagatggccctgaactcagtcgcttagcctcagtttccccatttgtgagatcgggggaatggaaaaagtttgcagaaatcagaagtgctcttcctccagggaggtcacaagagaaatttcatcagcggtttgtcctgtggtcctttccaggaaaacatcctccccgccagcctctcacagaagagacctagatttcatctgccacgtggagcaggcggtctcagaatcccacccggagcagggtccagggcaagtcttggaggacagtcaccaagaactgctttggattcgggaacagagctgcctaacccatccgcagccctggggtcctgccctgttcctctggccccttcagggcagcgggggaagcagggaaaacagcctgtcagagatggcagagaaaccgagcaagaataattatcctggaaaagactttcagaagtaaccaccagaaacttcgagtccccagatccaaacagctgagaatgtggggcctgagccacgctctgactccactcccaccacatgaggagaaacaagagctgcttttctggaagacttgaacaacccctgctgtgctctggaaggtagtgtcatttctcatccccagactgatctgggtatttattcccaggcaaaggcttcatgagcaccatgccccagcccctagagatgaggcaggcatttttcctacactctaggagacaccaggtcaagagtcaatgagatgagtcaaggggtgccagggaagatgccataggggaaggtggggaggaggtcacagccagctgggttaggaatgggggtgaggctggtactgttacgatctcctttgtcct

SEQ ID NO: 626 - DNA, 38294 bp, Homo sapiens
  source 1..38294: mol_type = genomic DNA
atgaagggcaaaaaaaaaaaaaaaaaaaaaaaggaaaatacgtgagagaagagcctttcaaacctgaatgtggaaaaactttcctaatgataaacagaaatccaggaacgataaggaaaaagatgaacacgtgacaacattaaaaaagaaaattttacacgggacaaaatcattagcaacataaacaaatgataaagcagggaaagaacgtgcagtgtatatcgcgcagttaccgtctataacgtgaaaagagccgaggagacaaaagaaaaaggcagccccacgggaaacacgggcccggaatgcaaggctgtgctcaaactcgctcctaaaaaaagaaatcctgactgggcgcggtggctcacacctggaatcccagcactttgggaggccgaggcaggtggatcatgaggtcaggagatcgagaccatcctggctaacacggtgaaaccccgtctctactaaaaatacaaaaaaatcagccgggcgtggtggcgggcgcctgtagtcccagctactcgggaggctgaggcaggagaatggcgtgaacccgggaggcggagcttgcagtgagccaagatcgcgccactgcactccagcctgggtgacagagtgagaccctgtctcaacaaaaaaataaataaataaataaaattaaaaaataaaaatacaaaaaataaaaaataaagagatcctaactgcagctgcaccaagacagcactgggacagagaggccagaccggcgatggggacgcccggcgatggggacgcccggcgatggggacagggcaccaggaagcaggttgggatttgggcaggggaggcgggtccatctttgctcaggagtcccacgcccaggggtcttttccacagaagaactgatgccatcagtcatagccacagaggtaacggctggaagtttgctgtggagtcaacactgcagaaaggccacattcaggtggaggcagggaaccggcgggcatgcctcgggggttgggcagcagagagggggcagacaccccaccgtgtccatggacgctccagcaacgcgtccgtgcccgggtgccagggtggctcggggtctctagagtgctgctcacatttatgggcgctttgctccctaagcatgagccagtcatcactaggggctcagactcctgagatgggggtgccacggtcccagtgggctctctcagaacggggtcgtgttccacgctcactcccagatggaaatggcctggaaatgaaaaggcaccacagaaccacccagtggggagagggtgcctgggctggaagagcagacccacgcccactgccactgttgagggaggagcacctgggacttccctcctctaattcaatctgggaagcaaaggccaggcttggtctgaaggtgtaaggttcctgctcccagtctgttgacgagtgaactctgattctgactgattcgttactcctgcgtattgtgaattaagttaaaaaatactcgggaacaaacatggtaaaccttcccttaaaggactttatttctctatttttatatggatcatttattaaattagaagactaaaaagtaaaaatatattttacaatcaaagaaaaatctggacaatggaccccagtaaaataatcagaagcgcacgttctgagaccactcctgcctggcaccctgcagggtagcgcccagggagcatctgcagaggggagaggagaggagggggagcctccggcgacctgtcttctatctccggagccccgcctgaggctccaagatggcacagtcaggctgtccttagtgaccgctgccacggagctggcgatcggcctgcatcttcaaacccaggagcaggagcagcagaggctggcaaggcctgggccctcagacaccaggggcctaaacccagctcccaaacccactgcagcctccccttgtgagctggcagacaagcctgtccttctgagtgtgacgacctcatccacacctgacacaggcgggggcgggggagggtgggggttgtgaaccagctaattctggggaccgctcggaggggctcagcaagctgcttctacagtaagccacttctacagtaagccttcaaacaggaaataaagcataaaatgaaggaaagaagaatcttatttaattaaaggccttgcaaaatgtgatttgtctattaaaaaaataaagcgcttgtgaaaaagaaaactaagagatggcggcaagcgtggtcatcggcaaagggttgctctccctccagcgaggctggcccccactgtgtgggtccctcgggcccccacacgggctgctcaagggctggcagcaggggccacgtcctctctaggagacacccacagagccacatgtgcacgcgtgtggcagtctcactgcaccccagcaacgcgaaggcagaaaccggtgctggtggccacacctgggcgcctggacaccgaagcccccagcacagtgaggcctctgagtgtggcttgtggtctgtcctgggttagagttgttaatatcacggaacataccatctagaacgttccagtcccgcctgacaccttcattcccaatggagaagaaatctacacaggcgtaagaccaggccatctgagacagggaatcccaggggcccctccgtctgagtggtcggcgtctgctgaacaaataccatgtctttcttcttcaaaggatcaaaggcctttaggacccacagctgaagaaggcgcctgctgccagcatgtccctcccccacggccaccacacacttcaagtttacaaaaataaatatttatcaacagtatatttgacaaaaaccacccccaatcgatggcagaaagcagtattttctagctggcactgaaacttaacctatttttttgagggagaaaaagactaaaatgtaagcactaacttcctccttctgcatcttccacagaagacccacttgtgggcattctctttctgtccgttatcagtgggtttacatccgaaggccggcggcaagacacttgaaccacaaacaccagacatgcaggtgtctcaatggcatgcagattatttaaagtgcatcacttgtgagaagcttctcaaatttctgactgtcataaccaggtgtcacctaaaatctgtcctgtaggccaagatgctacacgcagcgcccaggcagtcagaggtaagtgagcgcctcccgcctcagaaagcttttacagggccacgctcgccaggctttcctcgcccacgctgaacccacgtcctgggcacagcagctcccaagctgtcagcagtcggctggcagtgccaccacaccctctcggaatcatgcacagtgctgcctctatcacctctcaccccagcctcgcaaggcctgttgagaagagaagctccctgggaggacacccacggagctggcacgagcgcagcaggagagacggacggcagcctccggcgggcgaaggacccggcttcagatgcccgctggctggcaatcaggcagagcctggccaaccgtgccaggcccccttcctcactccaggtgtgggttcattctgccttcaggccggagtctgtcacaaggctggctggacagtggccaggtgagccaggccagaggccggccccacaccatccacaggaagctgctcagctcaccagacccaagccctgggcaggggccaggctcacagcaaagcgcgttagggcaagggcgtgagttttcgtctgggaagttctaaaaaaaacccacagtgtgagggattgtgtgtgccttaaatcaacagctctattccaattacatcacatcacaaaatgccatgaatggaatcggaaggcgctccaccacctccaacaccctggcagaagcagctgctctctacagcaagagcattttccagaacggcatgagaaggagagacgcacgtcccagggacaggagagcgcgctgagacctcccagcacgagatgggaggggagcccccgccccgtcctggaccgccaggaaccgaaaacccacatgcacccaagaacaggtgtggacggggcggcacagaagtccacgggagggggcgacacgggtgctctttcacgggaatcttgttgggacagcattccttggggagcgccgggtcggcgtgtccaaagagcgggggcaaaacggcatcgaggcagaggctctatggctcctcccccatctgcagcagggagttgatggcggcatccttgttccctcgctgggcttccagcacggagcggatcacctcctggtccatgttggggaacatgtcctggatggctttcaggtcctcctcgctacagcggggctgggcgttcacggcggccgggggcagggccacgggcaccatgccggggctacagacagcgggcatccctggaagcaaagatcaagtttggtaaaaacgtcggaaagttccagaagtgccacactagctcctgctgaaggaagaaaacaacgcatcccaccggcctccctgaggaaggggccacctcgggtctcagcaaacaccagtcccgcaagacaccctggaaaggcaaacccccaaacagcaaccccaggcacagccacggggaaggtgggcagggccctctgtgacgcctccttcactaactcatcttccttccatataaaaatcaaagtttgatctttcaaatctcacccgagtctgttttataactagcaggctgggggtggtgttttgatcccttcagaactcgtgaatttgcactgcacacgctcgtcttcactgaccagtgggctcacagagtcctctgcatctggggacggactacacggaatgtcacgcccgctgatccaaacactgcacggtctgagcctcttcctttatcaggcattctagaagatgcttttgcagcttggcaagtgtgtcactaaactgtgtgccggtggggaacaatcaccacaggcactgaagacctcagcaaagctgcagccgatgcccagaatgacaaccccacacacacatacaaactacaccaagaaaatgctcacaaaactcaaacaagtggggcagcaggtgcggtgtacagtggaccctcagtgcactggggccaccgtccagggttcctggcatctccaccccacagctacgcaggcccctcgccccatgtctgatgcgggaggacacactgagatgcaatctatcgagcaggagacgcacggcggttcagccactgcagcacacacacccctgaaggcaccgtgtggccggacttaagactcgcctcccagcctggtggccgctccctaaaaccacgagcagccctgagcacaggcagcgtgcgcggggctcagcgaccagtgaggcacagagcacaggcagcgtgcgcggggctcggcgaccagcgaggcacagagctcctcctgcagcagcagctgcagcagtgcaagggttcactgctcacccgttcattcacctttaaaagcacgaaccatctcccagctaggatcactggagcgctagagccccaatcttaggataggacttttgttcctttctacacttggaggatcctaaaggcagcagaagccacttcaatcctggcctgaaccaacaccagcaacaagacctgcaggggtgtaaacggagcagacagggcttgccaccaagcctcctgcacctgctgcaaaggccaggactcctcagcaaggaaggccaccgcttcccggctccttctaggccaggccgactcttcctccacacccacccctgcctcctctgcttctcggctctctcagggccaggcccacctttcctccacacccacacctgcctcttgtcctggccactggacacctcacctcactggggaagcatcatccccatgctcatcagcctttcggcaatgacggaaaacgaaccgaaccatggccaggtggggacgtggccaccctcaccaccctttcttcttcctcaaacaagacaaaggcttgggcgctgtctgtcctggagggacccctgggatccccgtggctttttgggcgccccggctggcaggcgggcaggaacttggccatcacctgtccctgcccatacagctccccacagcatggcaacaagaggaatggggctcggccatcgcctgtccctgcccacacgtctccccacagcgtggcaacatgaggaacggaggcaccgtgctcccactctctccagcctttaccagtctgatggggaagggacaggaggaggggaactgctgcaaaatcgatgacggtggctgtgacgctgcgacgtcacggcctggggtgtcccgagaaacctgctctgctgacaatgaggggatgtggcgccgactggccctcaagtgaatcccaacagcacggccccaacacactcacttggggagcaggcacccccgggggaagaggtgggtgcttccacggtgtgggctgaggggcagtggcctggctcactcccctccttcctgcagggcagaggccatgtgcctggcctgagccggcccatcctggttaccaagcacggatgtgtccatcaagccctccgggaacggtgagcgtatgtgtcaaggctgcctggggacttcaggaggacagaccaggagctctggggcctggcggagagcaaagtccccaaaatgtgggcagagaggacgccatgggagcccggggcagcccagagcccacctgtagcggccctgggaggagtgatgggcggctttgctgtgtccctgccatctgccgcgctcagccccaccagccacctgcacgcacgcggacggatgtgcagcacaggacaggccccacctcacgttcttcacgctgtgtgaatctgctgtcatatcttggcaaaatcaaattctctactgacaaacacaaggatacccaggaaaaccaaaacttgtcccttttccattcaggaaaaattgctccgagaaggccctgatctcagaccacgcagcatggtaagtcccggccgccggtgggcaggggagcatcagccctgctcaggctgaaggcatgtggccctgggctccagacgtctcgcaccacagtggaaagacatccaaagagcaggtggggacgaccgtccagctcagagactgttccggaactcccaaggcttgttgctgcttctcactccacagagcgttatcacaaagaagaaaacctacgtgattctttgtttcaaagcgaccaagttagcgggttaataaacacaacagcagagagttccatgtgatagtttgtctcggaaacttttaagcatccaattctcattttgaatggaaccatttcgtattttaaatggcatgtgctgctcagctgcaaactccctattcgctggaattccacgtgcgaggggaagcatgcctgggccgctgggtgagcccttggctggccctctctggaactcacaggcgctgcgaacgccggctgctcccgtgcatggtgccaccgcgtgcacgttctctatgggcctcccccttgtccatcccagcagcggcgtccacctgcgtgttttgctttcatactttgtggacgggcattcatgtcctggtctggttggctccacagaaaccagtgggggttgtgcccacagagacgcaggccaggatgacgggagggactgcgccggtgaggacgtgggggcagcagagaaaagagagaagcactccaggcccgtgtgaaatggaggtgcacgagggaacagatggaaacagcgtcaacgggcagctgcagccacggtgagcacagaatgagctcatgcacaccctggtgctgcctatgcgggccaggctggggaggcgccggacgccccactttccaggccgattctcctcccaccaccaagcagaaggaggtggaaagcaacaggaggagggaaagtgaggagggccccagaggacagcgcggccggcaccaccttccacctcagcgcctgtcagtctcgtggggaccctcagggcagacccctggcagtggctgcagcccgagtgcccctctgtgccagggacagctgaagggacagtgcaggcagggctgaggcccagtggcacccgcgctggtctctcacgcacgaagaacgcacgggaaattgagcagttggctgctgttgccagcctggcggagagtctctgtccactctgcagctccgtggaagagaacatgcttcatgaggccacgcggtctccagatgcttcacgcctagatgtttccttaaaattgaggctaaaaaaccccctataaccacatgatgcctaccacgaattatttgaaatctgtaaagtatctaatttggtaatcaaaataatactttgtttaaaaaaatcaaaacttaaaactgttctcttcgggccatgatcatggcgtaaaagctttaataatcaagctgtgcttcgtgttccagcctcccttcctcactgatgcggtcacactttatttttgtgaaggagatggtctgacctcagcgccccggcttctgagttgctttgtgggggactctggtttttcactgaggaaagtggacggtcctcgtgagggctcagccagcattcagccctcagtctccagcttgcactctccatagaggtggcagctgggctcagacaccacgggaggctctcggggcctgagcccacctaatgtgcacagtgagcccccgagacctgcaccctgtgcgggggtctctgggcagcgatcagcaggcgacagctgaatgaacgagcggctgaaggggctggcgagaagcagggccctaagaagccgggctctcctttcctggcccactccggcagccccgtctcaccagagggcttggccaggccgccctgcgtgcacacaggcccgaagccacgcagccagcaccgcgtagccaggcagagcacgcggcacaggcttctccaccatgtgagtcataaacacttgaaactgtgggcgacacacatgctctggccaagatgcactttgagattccacttctgagaagaaaaccctggtgtgactccaccatgcttgcctagtcggcccgagacgccctgagcacgcagccgccagcctctccaaggtctccgcagacttcgcccttcagctggcagtggctgccgggaggatgggctgtgatcacaggtactcagaagaaaattagggcatcagcttccagtgaagaagggtgccttattcacactctacagtactgctaggataattaaaaaatacttcaaaggctcctaaaagcagtgttctcctaatgggaaccagggctcctgggagaaacagctaacgccagggctaaggccggaaatgcagagagcctggggcttcctgcagtgccaggaagcagggaggggcccagagaaggatcagaggaggccaaagaacaaagatcccgcctgagggggctccctctggccaaatctggaataatttgagtgaaaaaataacattcataagggattctgacccaaggaaaaaaataggaaattgtttaggagaaatacctaatgttaaatgacgagtcaatgggtgcagcacaccaacatggcacacggatacatatgtaacaaacctgcacattgcgcacatgtaccctaaaacttaaagtataattaaaataaataaataaataaaataggaaattgtttaggagaaatacctaatgttaaatgatgagtcaatgggtccggcacaccaacatggcacacggatacatatgtaacaaacctgcacgttgtgcacatgtaccctaaaacttaaaatataattaagataaataaataaataaaataggaaattgtttaggagaaatacctaatgttaaatgacgagtcaatgggtgcagcacaccaacatggcacacggatacatatgtaacaaacctgcacgttgtgcacatgtaccctaaaacttaaagtataattaaaataaataaataaataaataaaataggaaattgtttaggagatatacctaatgctaaatgagttaatgggtgcagcacaccaacatggcacatggatacatatgtaacaaacctgcacgttgtgcacatgtaccctaaaacttaaaatataattaaaataaataaataaataaataaaataggaaattgtaaatccacattgctggggaagtcggataaactcaggggctgacaagggcgggatcttcacgtggtcctggggtgcctcccacacaggacatattttagttcccggggaacagccaggcagagcccgccgtgagggacgagcaagtcacaccactagccctgcactgggtaaacctgcgctgggtggaatctgcggtggtggcatctgcctgggtaaaatgcgggggccctgccagcagccccggggaaactcagccctaccctgcaaggccacgtcagcagccccaccaggtccctgaccagaacataccctaggagcaagatggggacccctccaggccaagggaggcaaggccatggagggccagtgaccccggcctggatgctgcggactcagacgggctccaagcagggtacagccccaacgcgtcagtgtcagcttcatctagatggccgtactgtgccagggacgcccctgcttattggaaacgcatgcctgggcatgggggctgggggctccggtggggcgtcaggtggacgagtcctcacaggctctggcagatgttcctgcatctccttgggaacttttctatgaagtgcggggctgttccaaaatttacaatgtctatcaaaagaaaatttcaaagtttgtctagcctttcctaaaataaacgttttagagcaaacttgaaaggcatctacaaagagaattagggataggaaccagaaagaggtaagccaatcaatgttatctgtcatctgaatgctctttcagccagatacaccctggcgctgtatccagttgatggaactgcaccccccaaaaagacagccacagagcgcccggcccagaagttggaggagacggggaggatcctcctcacagccttgacgagtgagtggccctgcctacggggcttcgacttccagcctcaggaagctggagggcctgggtctctgttctttcaggttggccattggcctccaactcaggacaaccagacagaacttcactagccccatgaactgcacatcacagaaggcactttgaccccacgacggcggctctgggctgtcccagttacaaatcagaacctccaggagccactctggggggcagccagggcgcatcagggcccccagggcagcagagctcccctggccaggctccaggctcaggaacagctgtggggctcccatgctcgcccccgtttctctgccaaggtgctggctcttccacttacccagatgcccaccctcctctaactctgaacgcctcaaggctgcttctgcgtttctggctcacctgtggtcacctcctaggaagcattctttcctcggtgacggggtgcaggtgctacctctgctgggctggtggttttctttttttttttgagatggagtcttgctctgtcacccaggctggagtgcagtggcgcaatctcggctcactgcaagctccacctcctgggttcacaccattctcctgcctcagcctcccgagcagctgggactacaggcgcccaccaccgcgcccggctaatttgtttgtatttttagtagagacggggtttcaccgtgttggccaggatggtcttgatctcctgacctcacgatctgcccgccttggcctcccaaggtgccgggattagaggcatgagcccccacacccacccccaggctggtggttttctaagacactggacaccacagaggccctctcagacacacgctctgctctttcctctggagaaaggcagccctggcacctgcgcgggcggcttcacatggaaacagagtctataatgtgagcaagtgagggcgaggccatgctgttctcacaggcagttttgtccgagaatgtcctgaacaccagtggacagcccagagtctcccagtgccgtctcctccttcccatcgtcagggctgggtttcaggccacatcaggtgggtctagggcgaggtcccgactcccaaggtggcctttctgcatctgtgcaggatgctggcaggactggggtgctgaccaggcctctccactccagctgggctggacaccagcactggcctcacagcactctcgcctgccagcagctctgtcccgccccaaccccaaagcagcccctgagcacaagcagccggggcctcatgcagccccgagaccctcccctaacaccacctcccccaacaccaccacgcatccctagcgccctgcccgcaacttggccacttccatggcctgggcctctggcctccaccctccgtgcagagggaccagtgctctgcctggacaccagctccccagaacgagagaggccacctcagcaggagaaccagggtgaccacaggctcccccctagcacctcctctcaggggctgcggtctccccgcctgctaaagacggctgggcccatccatggtgggggccggtcttgcaccagcagctaccacagtcacagctggaccgaaaatgcaacagcatgaaaagcgacatcccagcttggtgttgctgcagccacaggctgctcactcctaacagtgacacacgacaacagacgcaacagcgcagtagagagcacgcatcacccaacaggagcgtgaggttcagacacaacggcgcagcgcagggcacgcgtcacccaatgggcgtgaggttcggacacgacggcacagtgcagagcacgtgtcacctgacaggggcgtgaggttctcctgcacagagctgggcacaacggggtttcaaagccacatttccacatctctgaaaatttcaactcacctcatttctgccaacaattagaaaaaaaaaaaaaaaacaattctattttctagatatgcaaacaaaattcaaacgtaagccttggcttcctggcctgaaaggatctgtgtgcggtcagcacgtctacaggattctagaatggatgacgtccccaccccggcgctctaagccccgttccctcctcccgcacctgccctaggccctggggtttctaccaggggagaggcacccagggagggagcacacgcacctgtgatgggcacatagccaacgccctgctggtacactgttggcatcaggaccacgggctggggtggcatcaccatggcagctggaagcagctgaaacacagcggagatggtcccggggtcaaggaggaacatccacccatcagaacctcgggaatcgccctccccacaattgccctccccacgccagcccagaatcgccctccccatgccagcccagaatcaccctcgctacacgagccctgagtgcacaggggacgctgggccctgctcccacccctgcaccacctcctcaaatccaggaggtgacatggctcgggcttacagacccccttctaactgggatgtgactgagagaggatggtgacaggagggacatcccagtgtaggtgtcgagtcggcctggggggaaccacactgcactgctgtggtgtctgagtttgaaagtgtcaacttcacataagtcactgcactgctgtcaactctgagttcaaaactgtccactgtggataagtcactgcaccactgtcacctctgagttcaaaactgtcaactgcggataagtcactgcaccgctgtcgtctctgagtttagttcaaaactgtccactgcggataagtcactgcactgctgtctcctgagttcaaaactgtcaactgtggataagtcactgcaccgctgtcatctctaagtttagttcaaaactgtccactgtggataagtcactgcactgctgtctcctgagttcaaaactgtccactgcggataagtcattgcactgctgttgtctctgagttcaaaactgtcaaccgtggataagtcactgcactgctgtcgtctctgagtttagttcaaaactgtccactgcagataagtcactgcactgctgtctcctgagttcaaaactgtccactgcggataagtcactgcactgctgttgtctctgagttcaaaactgtcaactgtggataagtcactgcaccgcggttgtctctgagttcgaaactgtcagctgcggataagtcactgcaccactgtcgcctctgagttcaaaactgtcagctgcggataagtcactgcaccgctgccgtctctgagttcaaaactgtcagctgtggataagtcactgcaccgctgtcttctgagttcgaaactgtcaactgcggataagtcactgcaccactgtcgtctctgagttcgaaactgtcaactgcaggtaaaatcactggagcgtcatgatggttctgtgtttgtatgaaagcgtctgttaaagacgtgtcatgagacatttacacatcgtcactcacggccgggacatgatttaaaatatcccagctttaacaaaaagggggtgggaggagccaagatggcccagaaaagcagctccctgctgctgcctccccgccgcagcctccccgccgcaccctccccgccgcagcctccccgccgcaccctccccgccgcagcctccccgccgcaccctccccgccgcaccctccccgccgcagcctccccgccgcagcctccccgccgcagcctcaccgccgcagcctccccgccgcagcctccccgccgcaccctccccgccgcagcctccccgccgcaccctccccgccgcagcctccccgccgcagcctccccgccgcaccctccccgccgcagcctccccgccgcaccctccccgccgcagcctccccgccgcagcctccccgctgcaccctctctgccgcagcctccccgccgcagcctccccgccgcaccctccccgccgcagcctccccgccgcaccctccctgccgcagcctccccgccgcagcctccccgccgcaccctccccgccgcagcctccctgccgcaccctctctgctgcagcctccctgctgcaccctccctgctgcaccctctctgctgcaccctctctgctgtcacatctgcctggcatttcccacagcaccatttttcagtaacagcctgaaaatcctctggttgatgatacagacgagacggcaggagctctgcgtcttggagcctctaactggccctcctgatgcccccaggagctgcaggtgccctgagaatggagatggctgggagccagggcgctgacgtgctggccccacagccaggcctcgacttcctgaccctgagcacagcagcccccaggcttccccgacatctccagagatgccctgccacaccacggccaatgcctgccctgtggggaggagcctggtgtcctgcagggcccagggctgtatctcagaccctggagggctgctcagctggaccctaagggcagagcttggaagggctgtgggggtcctccgaggacacaggggcctgcagtggagaccaccacaaagggttggctcatcttaggaacacaaacaacccctatgctgtttccccagacagagaacatgggcaggagcagtgggcagggcagcccctctctgccaccaaaccacccagggcccctgccctctgtcctcagaacgtgagccctgctgttttatgggctcagtgcctccaggaaagagacaagggtgtctgtggggcggcatagccccgacgtgctccaacataccccaatgcgccccaccccgcccaggcgtgcagctcaccgcgtaggacatgacgaggttgatcatgccctccttgtcgtccccctgcctcccgctcaggctgtaccacttgtcctccaccttgccctgcctcagggactccgggatggtgatgtgggtccaggcaatgcggtcgtccatggagaaggctctctgcgggagacaagagggagaggccccaggcatcagggaaggggccaccctgcccctgcagccgcaccatcgtgggcccgcctcgagtccccgtcttatctgtggaacagggctcccacctgcaccaacaccccatcgatgagacccctcgggcagcgcaggcttcacgatcgtatatcagcctccgtaggggacttcttccctctctccaccaggatgggccagggccagggccagggccaggtctggggctggggaaagcgagggccctgggctgctgtcctccttcagttccacttcagggacactggctgctcctccccagccctcggggccccatccttgctccaccggctgccacctgtcaagccccagagcagccggggtgcagactggaaaggacacggggtctgcctcccacagctgactctgcacttcccatgcgctctctactcttctgagggccagggaggggaaagcaggtagggacggggagagaaaagccgggaggaaaaggcagggcccaggcagggagggctggccgtctgctggcctggctgccccacactgctccccggcccccacccagtctctagcctcacaatgccacaggtgcgaggtgccaggaccacactgagcagcagcctcgccacatcccctctgaccttctgactctgcctcagaagcgctgcaggtgcagccacggacgggactcaggaccctcaagggtcacgaccattcgcaccaccaagaacagctttcccacccagtaggcagccgcactctctggaaatcccacctgctggtgagcggccggaccctgtgcgcccagcggggcggacacatgcacgctctgtccctggaaatcccacctgctggtgagcggccagacgagtgcccagtggacacgtgcacactctgtccctggaaatcccacctgctggtgtgcggcaagaccctgtgcgcccagcggggcggacacatgcatgctctgtccctggaaatcccacctgctggtgagcggccagacgagtgcccagtggcgggggacacatgcatgctctgtccctggaaatcccacctgctggtgagcggccagatcagtgcccagcggaggggacacgtgcacgctctgtccctggaaatcccacctgctggtgagcggccagaccctgtgcgcccagcggaggggacacgtgcacgctgtatccctgggtcatgcttgtcactggggatgtttccaaatgtaagtatgttcaaggagctggaaacaatccctttttcacattccttggggagagcaggaccctgtcatgcacccaatgaaacaccaggtggggagccacgcctcgaagccagccaggaacgtggctgtgttggcaggtgtgtccccacggcagccacgctcagccacgtgcagcctccataatagctggcacgtccctctcacctcatcgaagatctcgagatagaaagagtccacgcctgggggcaccgtgcagtggatgaccttattccagcggggattcttggcgccattgtgtgccgtgggcgtctcgtacaccgcgtagcccaggcgcagtcggcagtaggggtccatgcgggtcatgccgtaattcttggccaactttgcctggaatgaagccaatgtcaggaaaaggaggtgccaaccatcaggagagggtgggttctctaggccgtctgcctccctgaacccttccacgaggccttttcctaacacatagactacagccactcagagtcgcctgaacacggctgtgacctgcttcccaggaggccaggagcaagaagagtgagccacagatggatcgtgcagttctgagacaaagcacgtggctcgtccttgacagcagaaacctacgacgctcacagacacagctgaggccgccactcacccaccatgaagggcgcactctctaatgccctcctcagaagtggctgaggagggaaagaggaggaggtcccgggacagagctgagagccagagcatgacatggagtgtgaacctgcccccggagcatgatgacccgggagaggtgcatcctcgctctaggtgagagtgaggacacctgctgcacataattcagacgccacgtggctgctttcctccctcgtgaaggcagcagccctgcctgtgctatcggagtacgtggggttttggggactggaacttgtctttcttgtgtctcccaatcacaaggagccacatcacatgtagaccatgagattcgacttcaggccaggtgctcagctgggcagggacatttgaggtcctcggggtgggagtgaacgtgtgttcagaataagacagaagaccgtggcaagtaagatgattgttcagcaaacaaactcaacatggatggcaggttcaaatataaaacctaaaactgtaaaacctttacaagaaaaaaccaggagaaaagccctcgtaagctgggttgggttcagccctgcagctccggctgcctgtaaagcgtcctgcctggaatgcagacggcctccctgtaccactgccacccgctctcctgcagccaacccggctcacccccaggagctggtgatagagaccccgggagccatcccggccctcccacccacatggagcccgccagttcctccttcccagtggaacagagtccagacactgccccccgaccccctctgagggaacggccaacctgtccacaccaacccccctctgagagtactgccaccctgtcctcaccacccaccccccgaaggcacggccaccccatcctcactgacgcccctctgagggcacggccaccctgtcctcactgaaccctctctgagggcaccgccgccctgttctcaccgcacccctctgagggcacggccgccccgtcctcgctgaccccccgctgagggcacggccgccccgtcctcgctgacccccctctgagggcacggccgccccgtcctcaccgacccacctctgagggcacggccgccccgtcctcaccgacccacctctgagggcacggccgccccgtcctcaccgacccacctctgagggcacggccgccccgtcctcaccgacccccgagggcacggctgtcccgtccacgccaaccctcgccgcacagctgaactctcccctcctgtgcccacatctctggactgccaggtcctctgttttctattcttgtccacatacaagttccctcctttcacttctaatcaaagctgtggccggtccttttaggtcaaaactgccccattcttgggtccttaattttagcgtgtttcttgggtggccacagcgtactccggaatgctatggagtgacagttttccggaagctcctgggcgacaggcatgctcagcctctagcagcttccaattcccttctgctgcacacccacacatctgctagatcagctcttacactccaaactctgcccctgtaaactccttagcaactgccctattttctggagagtatgtagcaggaaagtctgagaccagcatgattttccaaagctttcaggtaactgtgctgtctctgcctagctgctatgacttatttttattaataactttaaaggctttgagcaaagccagctttctgggtggcacatgggactcccctgccagcatgcccgtgcctgtcaccgatgcctgctcacattggatcctgcctgcttctgccacactcagcgtcatcctctcattcccatctcctcccactgccctctgcactgtggctagaaaactctaggatgagcgtcctgtgacatcaactgctctgctgaagtgacctcctcgatgtttatggaagcatctgcccattcactatgactgcacacaaccacatgctgttctggtgcaggagacactgtggacaccgtggggacacacgggcaccgctgcctcccccacaacgggcaagagacgcacgtcagacagcagacaccgtggggacacacgggcaccgctgctttccccacaatgggcaagagatgcgcggcagacacacagcgcagcagacggcgttaccactgcagggagtgaccagctaggaggaccgggtatgcgggctgcaggatctggaggaagagctgcaggaagcgggaggagaacggccagggaagaggaaggtcaggagtgactagggtgaggaaaacatgggcccagctggagcaggctcggcaggacagtgcccacgagaaaggcccacgcgggaacggacctactctggccacgctgcaggggctgagcgggggcagtgggtgggtgcggggggctccaggcctggacgggctgaaggtggcgcctgtgctgagggtcaggcctgaagggcaagaggtggacatgaacctggagcaccagcagcacgagggctttgggcctcagcttccagagtgtggggcagccacctgcggacacgggggagaagccgggagggtggcccgagagctccaccttgggcacacggagtccggagtgcccacggaacacctggggaggccatgtggccatggtccgtacctagggatctggggtggagctgagtggtcggctcaggctggggccagcacatgggtgtttagacccacagggatgcagaagtcaccgggatgtgtgggcagagaggggaggagggctgaggaccagaccccttggcatcccactggggccccaggagacaacaaggggaagcagcgaggggacgcaagcagggaaccacctgtgtggccgcccagaagccaagagaagcaggaaacaggggctgagctacctggcccagtgaggaggcaggaatgtttcccaccactggagctgcgccacagaaggctgggtgagctcacgtggaggaaacaggctgcctgtggtgggctccagggtgcgggagaggaccaaggggggccagaggcgtgggcaacgccagggccacctccaaggcccagccagctctggagcttgaactgtgtgaggtggagtgccctgcggtcaccaggccctgccaggaggtggcggctgaggacgggtgatggcactggctggcctggtggcagctggcacaggaatgcatgggcttacgggagttcactgggtgggcagagggatcggccacaccagcacagtaacagctgcacaagcaagggtctgagacacgccgcgaggaaggggtgacggtgtagctgtgctcaccacaccatgaagcccctgaaagcaagtcttatttgtgaggtccacggcgattcttctgcctgctgtatttgtgcatttctatgaaagccgcgtggctcacagtgtgtctcctttccctgcatttctacgaaagcccgcgtggctcacagtgtgtctcctttccctgcatttctacaaaagcccgcatggctcagtgtgtctcctttccctgcatttctatgaaagccgtgtggctcacagtgtgtctcctttccctgcatttctacgaaagcccgcgtggctcacagtgtgtctcctttccctgcatttctacgaaagcccgcgtggctcacagtgtgtctcctttccctgcatttctacgaaagcccgcgtggctcacggtgtgtctcctttccctgcatttctacgaaagcccgcatggctcagtgtgtctcctttccctgcatttctacgaaagccgcgtggctcacagtgtgtctcctttccctgcatttctacgaaagcccgcgtggctcacagtgtgtctcctttccctgcatttctacgaaagcccgcgtggctcacggtgtgtctcctttccctgcatttctacgaaagcccgcgtggctcacggtgtgtctcctttccctgcatttctacgaaagcccgcgtggctcacggtgtgtctcctttccctgcatttctacgaaagcccgcgtggctcacggtgtgtctcctttccctgcatttctacgaaagcccgcgtggctcacggtgtgtctcctttccctgcatttctacgaaagcccgcgtggctcacggtgtgtctccttttcctgcatttctacgaaagcccgcgtggctcacggtgtgtctccttttcctgcatttctacgaaagcccgcgtggctcacggtgtgtctcctttccctgcatttctacgaaagcccgggtggctcacggtgtgtctcctttccctgcatttctacgaaagcccgcgtggctcacggtgtgtctcctttccctgcatttctacgaaagcccgcgtggctcacggtgtgtctcctttccctgcatttctacgaaagcctgcgtggctcacagtgtgtctcctttccctgcatttctacgaaagcctgcgtggctcacagtgtgtttccttttcctgcagtcttacagacggttttcgtgtgatcaaaatcggcgttcaatctgccgattttggctttcacttgaaagaccactaagcaaccacgggccggccccgaggctgaccgagggctgctctgtggggagggagggtgcaggcaccggcactgaggccaacaggaagccactcacgcagcacacaccaggtggcgggggtgccggccgcgcctcctccagctgccggcgggggtccgggaggtgtccttgggcgtactcaagcctggtggaagagccaggccctacacagagcagacgcccacctacacccactactcatcacttgagttatgtttggtagaacccggggtcaatgccaatatctttcacacagatcgttttcaacatcacacaggtttcaggaaaagcgggaatcagaagttctgtttgcccgcttaggaaatgcagtataaacgccgaaatccgaaatcccacccccaccgagcgcaccagccccaggcaggcaggagggtgccccaaggcccacctgtaccaccgtgatgttcagtcggcccacggtgcccactgcgcctccgtactgcagctgctgggccgcctgggcgtccagctggacctgccgctgctgctgtgtgggcgtgatgcggaggaagtcctgcgggagctcaccgatgtacacctgcggggccggggaccagagaggccagtgagtcagggtgggggcacaaagcagcccgacagcagctgcccccggcattcccgcggccccgcccccacccatgtccttatcaagtcctggactgtgctcagcctcagtttcctcatctctaaacggaggggtcaagggtgtccagcctggggcctggcccccagcggtacaggtgcagccctcactcaggagatccccaaatgcaggtttctgccgctaaaaatgggttcctgtcctcaaagcctgctcaggtgggttttcaggtcattttaaagggtctcccttgcaccatgtgtgcccacggcttctttctccttgtccacagctaaaggcagggccactgaactgcaggtcacttggtcaaacgaatgagacaaaagctgagcctcaggtctaaagtgatttggaaaaccctctgctgatatacttcaaatgtttccacatgaaacagctgaaattcaaaagtatcccagaagaacgcaggaagtaaatcgattccaaacaaccacgaaagacctccccactctgcatcctatgtctcctcgaccctctgtccaccactgccacttctgaggggaagagagaggatgggcccaggcaggacaatgccatcccgaaaccacccgcacacctgcagcggccgaaggggcctggggtaaaccatgctccacaggtgaaaggtcgctgatgaggccctgagcatgggtctggctgctggtggagtggggtggaggcctggttgctggaggagtggggtggaggcctggttgctggtggagtggggtggaggcctggttgctggtggaggcctggttgctggaggagtgggatggaggcctggttgctggtggagtggggtggaggcctggttgctggtggagtggggtggaggcctggttgctggaggagtggggtggaggcctggttgctggtggagtggggtggaggcctggttgctggtggagtggggtggaggcctggttgatggaggagtggggtggaggcctggttgctggtggagtggggtggaggcctggttgctggtggagtggggtggaggcctggttgctggtggagtggggtggaggcctggttgctggtggagtggggtggaggcctggttgctggtggagtggggtggaggcctggttgctggtggagtggggtggaggcctggttgctggtggagtggggtggaggcctggttgctggtggagtggggtggagacccagccgtctgcaggggccccggtcagcgccagtgccctgggcagttgttttcaggaaataccgagtggaacctggaaccctcggtgtgtcggacgtgagcttaggcaaagtgcacgtgctgaggccgccagaacgcctctgccatgcacaccagaaacccgtacctgcctgtgccatggactcccaatgacacggtgccaggcagggctccaggaggttctgagttaagccctgcacctgctgtgctctgggcgcctggcacttcaaaggaccccgagagggtctagctcctcacctgtgtccccatctaaggcctggagcgcacaagccagtcagcgctccacaaccaatgtgagtaaacagaagggacccggacgatccaggcaccgcttcgagcagttacggactcaggacccccaagttcgggaagctctctgcaggctgcaccccaacctgagcagccagcatggcgtgtgctcaaccgctcttctctaaaaagcaaaacacactttgtgcgtttccccacactttaccccgtttttgactgggacacgtcacgagtgacctttgccctgtgagagaagccgtactgcgagaacaagcagagcaccccggcttcacctccggagggtgtggcataggccagggcccggagggaccccctgcccttacggacaatcgaggagggtgcagaggtgcctgagcggagtgggcccatgccaggagtcccaggccagcctcccccaggcagcctctctcgaggcgctgtacagctcaacagcaagctctggctcaggagggcgctgagaggccccatggcacgagatgctaagcacctgttcctgttggcacacaggaaacactggggtacagaaggccagggcccttcgcctgcctcccagaaggattcacagcccagagctctctccccgggggacacctggccacacaggacgtgcttccctgccaaccccacagggccctggcacagcccatgccagcaggctctatgactagctctgtctgctcaccaggaacgggttatcttgcagaaacagactcgtgctaaccaagttctcaggactaacatacacaggccaaattcctgtttatttgtgacaactgcttcctgtgtgccacatgcacagctctgaggacatggcaggaaaagcaccgtatctcctgggcacacatggcagacagacaggcggctcgtgccctcctgggcacacgtaggggacagacaggtggctcatgccctcctggccacacgtgggggacagacaggcgactcatgtcccggagacagcagcatggagaagccagtcgggggagggtgtgggtggtcacagggacgtgtgggcgtggggtccagaggcctctgagggagcactgtgggtccctcgctgctctggatcctggttgtcccggtatttgaaggcgtccagcgctccatctccttgctctgcactctttaggtgtccgttaaagacagtgggactgctcattactgggagaaaataaaattatatccaaaggcctaatgatcaagtgtcatttttcaacaaggatttaaccataaaatggcaaataggaaaagagggtttttaaacataaaccgtgtggatagaacacgaaaaggggagaagcagctccctgcggatggagctcatcagccccacgcagcccggggaccgcagccagcgccatgtggcggggcaggtgcgcgtccagctccccgagatgacacacgcctcacatctgggttttcttcccaaaaacccacaccccaattaagagacatctgacaaaatccctgaccagtcagtcgtcctcaaaccgtcaaggtcccaaaaacacaaggaaagcctgagagacggtcccagattggagatggcagacatgatggctaaacgcaaggcagggtgctgggacagcaggggacagtcatcgaaaaaccaggacagccaaataaaacctggagccaacagtcatgcccccagctcagcgccacagctgtgagagctgttcccggggaggggagcgtcggccaggggacatgggtgagacacacaggacctcttcgtgccagcttttcaattcgtcataagactgaacactacaaaattcaaggtttttcagaaaaatattccatttaacctgaagacaggaagagcaagagaggagacggagaccaggcttcagtcctccccgtacaaatactggttacgcaacctgctgccccgcctaccagggagaggcggcttgcctgctgctgcaatgccctcgtttctcaacttagagcaaagcccttcaaacgaggagggagtgctaccagttcatgcttcacgagtcacaggggagagagtccaggtgctgaagtaaaccctatcgtttcagtgacgacactcggtccttcagtaaatgtctattttgaatttattttttaaattcagtgctaatcctaaaatttatttttgccatatgatgatggaggaactatttcaatggtcacataaaaatatatgctttaccctggttcaaaggcttggaaatatgaaaacaaaaatgattactcccgatacataatggatatttttctagaattttgcttccatgtacaagatgcacatactgagttcaacactaacaagtctaaatgcccgtgtgaaggccaacaattccacttcaggagccagtcccctgtcaatgctcactcgggcacgtgagcacaggatgcctgaggctgcgtcacctgtgccgtcaaaacgccccgtccaccagccaggcacatccacccagcgcatcgccacgcggcctcaccaggagccggcggtccctgccgcgaacacatggagactcgggggacggaggcggaggcggaggtgcggcacgacctgctgcagggagccataaggaggcctctgtcgacaccaactctggaggagcattcaggaatggaactcgagggaaacaggcagggaagattctatttcaatttatttatacttttatatcctgctagttatttttagaaactttttaaaaacattcgtgaattacttttaaaataaaaaggacagggtagggctctcatcccacagagctcacagcattttatcttctctgaaaataaaagctacttttataaatattagtctgttttaaatatagttttaaaatgtaacttcaaatttcttggaattgctgattctcctcccccatgtgccgctctcagaggatcacgacgcaagcctgtgactgacgaccattcctccctcactgacgccagagctctaaaccactgcagcgtacctttccacacgaaagaaaagaggtctccaacattcacttctatttaaaacaatttctcttcaagtctaagttttagttttggcacagaaataaagtcttaattcttcttttttgtcatgcaatgtgtgtagtcaatccaaagctaatttttctttttaagcacacaaattaaacacccactgtgaatattcctgttggtgacacgtctccaacggagagagccgctgcttccttgggccacactttctgcccgacacctgttaggaatacgtttccgactgagagtgccgctgcttccttgggccacactttctgccttgacagagccccggaagagcccagctcagcccaggacgtggagtcctgaacacatgcagtcctggcctcacgcctgccaggagacatcaccccaaggagccgcaccacagtcgcccctgaagcacggctggccacacgcaggcggcaggagaccagggtttcctggccacttccatgactggccccctgcggagcctttttaaaccttctcaccgttcccaccccatgacgctgcgaggctgtggaggtgctgtttgtgtctgtgtgccacgcatgcacctgcacttggcatgtaaacactgcaagcaaggctcaacgagtctcagcgctaacgccaggttagcataactaagtcgaacgaagttcaattaaaaactaaaatgcttctagcacttcatgactatgcgctgagcagcgctgagtgtaatttatttacataaattgtaatgtatcaaatcacacgtagaaataaacaacttatataaacacaataaaaaatatccttagtgaactgaagcttttgcttgatgtgagaaagtaccttttaactggctggctggtattctttcagcaaactgacatcattagcgatgggctaaatacgttctgtggaattaaatcacaaaatgtcgacgattctcattcaattctccaagccagagtctcacaccagcactgaggatcccacacaaacggcatccgcaggcgcctgcccaccctccccacccacctcacagcaggtctgagatcgcacatgtgtcgcgggcttccgagaactccgtatccatgtgctgggacacccagaaaacccagggacaatgaaatactaaggagcaagaaatccaggagctgtgctggggaggcacacacggccgccaaaccccagaagtttcctcccccaagaaccccttgtgccctctcagggtcaatatcacccccacattgagaacaagcgtcaaggactcctgaagccacaaagccagcccacggaggccccaacacagaagcccaactagtgaaactctgtaccctgagccctaggtttctccagttcctaacatggccatgattcaacgtgactttcagagctgggacccacagcaggaagacctgggctgggctcgtggctaaagggacagaggaagctaatgaaacagagagaaataaatcccccgtagtaggaacatctagggatatgggcggaagtcagtctcaaagcctcttgggcgaggtctgagtgtctgctaggaagggagccccagactcggtcagggccccaggactcacatagaacagcacagttggtccagatgaagctgagaacctggagcccaggtcatcaccagcctccctgctgtgtctgaggggctggccctgccttgaaggccctgcaaggggcctgctccaggccactgtcctacaggggatgtctgctgctaggttcacacccaggtcagagctcagtctggcccaggagaaatggcccatccacccgatgcccgcacacctgtgtgattcacatccagatccgggcgtgcaagagggcgggaacgcgcaccagggctgagacacagggccgtgggcagtcaggacagaccctgggtggccctggcggtccctctgcccagctgactgacccctcagtgcgcagggtttcagagactgaagtgccagcctgcacatgccccaggcctgcacactcacggccaagaggggagccccgtggaggtgaaggactcaccgacactcactggtggccactgccattgccctgtaagtttagcattttccaaaataaggctagaaggaaaactgcaattccccatgcccactcagctgctggctccctcacccaccacccttcacagcaccagcatccaaaagctggaccagtacctgaccctgcagcccctggcactccagccagcctcggcctcacgctccacaccagcctcctgacactccccaaaacccactccagccagcctcggcctcatgctccacgccagtctcctggcactggcatgttcaataaacaacccttgagcaaataagtggcatttcatgcaactgctcttggcaaggcagctcccacgccagtgtggacgggcagtggtgactttgtccccagttcccacatcctcctcccacggccgctcagcagccccctcccaggagccctcgctgagcactcattcgccgtgccttgtctccccttccggggccttcctcagacagggctttccttccctcttcctatcaccccctcccctcttcctttaattatacaaaacacaacaggcgcttcaaagccaacatgccgggaggttccctggctctgctaaagtctcaaagcaaacactagaatttgtgtaagggaagctgggagatgacagtattgaaacgaacccgtgtaagctgaagagcggtgaaagggaagagtacaggacagaatgagaataagcatagattataaaagctgactacagaacaagcgactttaaatggggtctctgccaggaactccactgcaggcagccttgcatcctaagtgctgggacggtcaagcaaggcagaggcggaaaaccccttctcattcagatgaaacaaaagccagtcaagcagcaggccaagggcggacagagatccagagagggacggcatgtgacgtggcaggccctgggcgccgggcacagggcgcgcgctgcggcagcctctgcgtgtcactgtgtgcctgaggcttccatggtgaggtgctggggcacccctgctcctgggatgcttacacgtgagtggaagaagacaaacgggaagcatcatgagttatgctgtatgctaacggcaggaggcgctgtgcaaagaaacagggcaaggccgggtggcaggggcacgctgcacttcccacagggcagcaaggcaggcctcaccagcacggtgccagggcagggcccgcaggatctggagacagtgactcagggacaggaaacacttgcacagcaggcctaaccaggggcctgtcgggcaggtcaagggacagtgttagaggcccagatgaacagaggttagggccgggtgcagtggctcacgcctgtaatcccaaaactttgggaggctgaggtgggcggatcacttgagaccaggagttcgagaacagcctggccaacatggtgaaaccccatctctactaaaaatacaaaaattagctgggcgtggtggtggacgcctgtaatcccagctactcgggagtctgaggcaggaaaatcgcttgaacctgggaggaagaggttgcagtgagttgagattgtgccactgcactccagcctgggctacagagcgagcctccatgtaaaaaaaaaaaaaaaaaaaaagacctcaagtgaactgggaggcaggccagaagcagcgtattcagaaggcagcaaacagagggccaaaaacgaaggaaagccggaggaagggacatccactcccgggctgctcagcagccactccaggagccaggagagggcggggtcccaccttcgaggcactgaggacaagtgaccgtccaccgggagtactgtccacctggagtaccgcccacctggagttccacacacacaaaaatagctgtcaggacacagagaaaaggcatgtacaagcaaaaatcaagtttgccagcaaggaaaattctagatgaacctgaagctaaaggaaagtgaccccaaatggaaggcccgagacaccagaagggataagaaaagagaaacacagaaggaaatctaaacaagcgctgactcgagagaagtaacacattcctgcgggagccccaaggggaggtagcacccacacaaggcacagcagcacccgcgccaggacggggcggccgaggtctccgcgtggatccggaggtggcacagacaatgattaacttcttctttatttattctttagccgggcagcctccggagccagagttcactcagagactccctcatggcagaagctgataagtgcatgttaccatttccaggggagcccctgtactttcccagcacagtgtgtatgtacttgagataaaacaactgaattttttaaaactccatttaataaattcaaaaggcaatgagagaaaaaaaataagaaaatgtaggacaaataaaagcaccaaagaaaacatgtaaaaaatctgtaaatctgtgtatccatctaggcatctcttaactagaaagatgaaactagcgcattcccatcaaaagacttagtcttcttagatttgactttttaaaaatccagctacgtgctatcgatggtgcacgtgtcttaaacaaaagttttcagaaaaatgtaaaatcatagaaggaaaaagtactaggtgaatactctctaaaagacagctggggtggccatgccagtatcagacaaaataatcaaaggcaagaggcctttatcttccaagaggcccgtgggtccccacacagtgaaaagatgtgatttccaggcaagcacagcaattccacacctgtacagactcacaacccggcctaaaaaatccagcgcaaaggttcacaggaacccagagagaaaggactcgtgaggaggcggtgagtgcgttccccgctggctcaggtgcagtcagcaggaacggacgccctcccaggagcagcccaccagagccagcggagacgggtaagtgccactggctcagacacacaggatgcaggaaaatccacgggctcttcacaacactcaggggagagaaagcccacacacatctacaaagaaaagcaactctctccttgaggtacgggaagatgagggaaaagcatctcacttgcctttctttcacgaattgtgtttcaggacagccagccgacaccggttgatggggaaagctaatctttacaaacaatcccagttaataaacaccgaagaagtgataaagttcagaaactaccctctgccatccctaatgaagtcaccgattcggcaggaattatcaacgatgtgaagagtgaggggacctggacaggaacaggcctctcagggaggaagggaggggccaggccgcctccagctggactccatggccaaccagcacctccagaagcaggacaaggagtcagagcagcctggacacggcacagcgcacccacctctaccaaggaggcctctctgacggcaccgcggtggctgcagcggagtctcccgcaaacgtcccgagatctcactgcagaaggcaggggtccacacggtactcctcgatactcctcgcgggggcccgcacggtacccctcgcaggggcccccatgatactcctcacaggggtccacacagtacccctcgcaggggcccccacggtacccctcgcaggggtccacatggtactccttgcaggtactcacccatgctttctgataatatgcagactatattgaaaaaaggttatctttccaaaatactggcctttttgaaacgtgagggaagcactgcacagggctgaagcatcccttagtggctattcagggaaccattatcctgaagatctaaacacggtatgattctctcagaacgatgtcgggctggctagcttcacacgtcctctccacacctacccacccgggcccctgaagctccctctacccaaggacaaaagaaccctcccaggaccccattagcggcccctctgctccttcacggcccatgggatcttgccgtctccccttatcactagggggaggcaacggctagaccacagtcagggtctcccgagccagagtcctgcccccggaccctggggagcatctctttctgctggaaagctgagcgagcgccctgcttaacctcctgcctctctggcaccacaggtgtaacagaaagaggacatgataaatactgtgtcaagacatcctgcaaaagcagggctcctctaggtgctagtaactgggtaaaggcccactatgggttaattcagaggggctggggtgggtcatgctcagcgaagcaggctggtgccaaggcgggccctgccttgcgtgtgccaggcaacactttacagagtgctgcgctgagccggtaaactccagggcaagtccagtcctcctgtgcccaggaccctccggcggcctccagctcctgcctccctccatcctcggcccctggggctccctcctctccacctccagaccccacacctctctttccgtgccctgccctcccagcccaacccctactcccattcctcctccgagagatgtcacgtcctcaccccaacacccagccctggtgaggcccatttacaaactctcccagcacctgacgcttaagatcacagacccaccgggccgtcaccacacagctcagctgtccttatgtgctgccatgtctaccgtgctgccctggaagaccccagtggcaggaaccacctggttgtcccctgcatcatggccatcctgaacgccacagttggtagcgctggttgattaagtcacatgtactccaagcaacacctgagacccccgtcgctgacaacaccttcttaagagaccctggcagctccgagccagacctcatgttactatgcgtttaccggtcaacgggggtgcccctgaaatacctgctcgtctacatgatggaaacagcccaggaggcactgggcaagaggagattctaacgacacctcagcacttgccagcacaggccctgcgtgtgagaacatctcctgccgctcccacttcctcatcgcgggtgtaacagcgctgcacgccggtgcccctcagaacaggaagggcctgcctcccactgctccctgcctgctcagcacctgatgcattcaaaatcagtcctacaccccagtggggttccagatgaggaacaagttcccaggaggcagaggatgtctcccagaccacacagcaaggaaggggccatcctgcctggccaccatgcccccctgctctccaggaggacacaacagcagggtgctggttcccttgttgctctgagtctcctgttaggcagaaaggagcacttggctgccacggcaacttgcggggactcactgtggtggagtaaagatgaagaggtagagacgctgccatcagaggccgtccaggacctctgccgacccgtaggctccacacctgagtctcataagtgtcaggaggtttccttcaaagtcctcagaaaaagcagctatgcccaaaacctggggcttcattctaaactcagaaaaaatgttctacctgaagaattatctcctcgggagaaacaccaggacttgtggatacagtgttaagggtggggagccctggtgacccctccaccacgtccagtactgggctgcgcgagggcagggaccttggagcatcgtgaaaaaggactttttccacccacggcatgttcagagccactgttgataaaaactgtaccgctcacgacagcctgccccagcccagcctcagtgagtgacacggtttgaatctgtgtccccgccaaatctcacgctgaattatgatccccaatgttggaggtggggcctggcagggtgggtgtgtgggtcacagggacagatccctcgtggcttggtgctgtcccggtgatagtgagttctcacaagatctggtcattacagtgtgtggcacctccccacccccaactctcttgctgctttcgccatgtgacgtgtaagctcccacttggccttccgccatgactgggagcttccagaggcctccccaggagcagatgccggcaccatgctacctgtacagcctgcagaaccgggagccaattaaatctcttttcttacaaattacccagtctcggtattcctttacagcaatgcaagaaggccctaacagtgagccaggaggccactcacgccaggagcccatcatctctgagtcagtctacaccagctctcctgcaatattaatgctatagaagaaactgccaggcaactctcaggagagaattcagagcaggaaaggttctctgaagttcctggcgcctatcctctcatttgcaaatgaagaaactgaggttttgcacggtggccactaaccggggacacaattgggcccaagaagtggtcaccactgccctcactctgtgtaaatgagaaagaggaaacagccatcatctatgggaccaactagagtgcaggcccgcctccacctggggggccatcagggtgcgggacccgcctccacctgggggggccatcagggtgcggggcccgcctccatctagggtgccatcagggtgcgggacccgcctccacctggggggccatcagggagcagggcccgcatccatctaggggaccattagggttcagggcccgcctccacctgggggaccattagggtgcggggccctcctccattcgggagtcagagctcggggccgcctccatctgggcaccgggccctcctccatctggagaccattggggagcggggcctgcctccctctggggcaccatggggcacggggcccgcctccatctggggctcacaacgggcgcaggccccctcccccggggctgcctccccaaagctctgccccggcacggcggtgagctcaagcctcctgcagcgtgggcgcgtccgtccggcccgccccgccccgaggtgtggacgccgccgctcccctccggccggccaggcgccccgcgtgccccgggagagccgcggagtcggcccgccagccgcagctgagcagtagccctgacccaaggccccgcccgcaaccgcaggtcaccgcccccgcccgaccctcgcccggctgcctcaccggcccgcgctgagtgctgacggtggtcgccatggtgctgcggcggcccccgtggctcgccgacccgacagtgacgcgccgggcgacctcctgcgcccccgccggagcctgcgacggagacagttgtcacctcgaggccgccgccgccacagtcagctgacagccgccgcgccccgcccccggcaccgccccactgcgcaggcgccgcgccaggcaccgccccttccggctctcgcgcgcacgcgcgctccagggtagggcaggcgcagcctctcgcccggcgcctgcgcacctgctctctcctcgagccctgcagcccggcgaaatggctcccggcggggccgtttgcgcatgcccagtcatgacggttgtcggcgcgggccctagcgtggcggcgctgcagtctgggcagtgggttggttcctcctcggtcctctgtcgagtggcgacagggcctagccacctggcgggggtgaccttcggacgtgcgacccgctcggagaagggagggaactgtggcccgcaacaaagcagtgacaggcccgacatcccctgcagggcgatctttccctcagctgcctgccggaggaagggcctttctgtttcacagggctaaagatggggcgcggttcctccacggggcggctgccgggtgaacggaacggggatggaggcgctgccagaagagcccgagctcgagcccgccctgccctcggcctccccgccgcgccgctccgcaggagccccgctcctctcctgctcgctccggagaaccccagtccggcctgacctcggccctcgcggtcaggcgctccaaccagagcgactccagctcgaacagcgctgggtaaactgaggctgaaccccgctggctgcatccccaggagtcgggcgtttacggtcacgggaacaggttaataaacttttacgcagcagacccggaacttaggtcccgatgtccgggtatcttaagaacaagaagcattcttagttgaagtttcgctttaaagataatgatacagatgcttgcggaggacaggcgttatgcaaagattggcaatcctttgacgagcccaggtagtacagcacgtctcccccgtgatgttttttggcttttatcttacatataaacaagcgtacccaggtggacgccttcctcctcgtgcttttgggaacaccctgctctatggagtagccattcttttattccttcactgccttaataaacttgctttcactttactctgtggactggcctggaattctttcttccacaagatccacgaatcctcttttggggtctggatcaggacccttttccggtaacacaaccactccactaaaaactctttgtcagtgatctctatattgttagtggtcagttctcagtcctcgtcctccgggaactacagcaaaatcgatagtcattcttgctacacatgctttcttcactccccatccaggacaccatgtgctctcactttcctcttatcccaaagaccacatctttgggtctcggttaccagtctctccttttaaaaccggcagcctggccgcttgcctgttttgatggggtgtagagaaaaagaacgaaagccccttcctcaagttgtagcttaacatccagccaatccacagcacaagacccaagaagctattaaccacaagttcctgctttgggggcctagggacttccc

SEQ ID NO: 627 - DNA, 131962 bp, Homo sapiens
  source 1..131962: mol_type = genomic DNA
ctactctccacagggtagggacagagctcaggcctctttcagtgcccacattgcctggtacagtgctgggggcacataatgagccaggatctatgctatctgtttaaagggacctgggtttgcagccccccacccccacttcaggagcccactccccttctcccctgggtgtgggaacctttatctcactccaactggtcagaaacagggctctgcagagctccctggagcccagggaggcaactggccagaggtagctgggtgccgccccttctggctacgactggtgatggcggtggtcccaacacggcccctgccgtgacctgactcctatcagtgggcaggagagcccctcctgagccacgctcccagaagggctgctgttcagggtaggtggggcagctttatctgctggccatggaagtggtgtctttcctgcccacttcatggacctgtctgggaggtctggctctgggttgggtactggttctgccactactccctgtgcagcctggggcaagcctacagctctttctagtcctccatgtcttcactggcacagcaagagtttgggaagatctccaggttcatcgggggtttggtgagtccaccctgacttgaggtctgtccttaagccccagcgaagggattaaagggccctcggcctcccaagccacttggagaaggcacagttcccacaggctcccacaatgcacccctcatgaccccctatgcctctgggcctgaggggcctgcttccaggaggacagctaccttacaacaaagggctgcaggtgcccacctccaggacaaggggagagggggaaggaagcctttttagaaagggagagcaggctgtggggatgggaggagacaggtttcttttggggggaataaaaatgttctaaatttggttgcggtgatgattgcccaactctatggatattctgaagactacttaattgtacactttaaatgggtaaattgtatgctatgtgaattatatctcagtaaaactgttaacaaagtgtgaagtctacctggcttggagcagcagttctcaaattcagtgcccagcacaggctctgcagatgatgcccagccaagctgtgggagtccagccgagggtgggggctggggcttagagggggtcaggggtggctcaggcctgcttgctcaaggcctgggtgccctgggcaagggtgagtggcctcctcctgcccatctgggacctggggtgagacctaggaacaaccacagcacttggtcctagagctctcaggcaggttgtagcaggcttacagccactcccaccgatgtcacaacctgggccacgcacaggaattttcctggccaggtaaggggctgctcaggcagcctggccactggggaagggtggactgagggtccccatggccacccctgcttaaataaagcaggtggtcaaaactggcaagccctttggacagtcgtagccaattcaacagaccacacaggcataatttgttcaattatttatttattgtggagtattttacatgcaagaacccaattagagagagggtatctggaaggagggccagtggggtggatggatgctctgagcctcgggtgcactgacccaccctccagaaccagctctgcccacagaaacacatgacagtgacaaaaacactaaacttctaggacgagtggacagcaaacgcgacattcaacacattcctcttttcagtagcccccaacaatcctgagaatcctcacaattaagtgcaaactttaggaaataaatatccgtccccctctccgggagagcctggaggtatggacagacagaagcagttctgactcgggggctgatggctgctccctatggctggtggccgcaggggaagcctgacttggaccccacagataggaagggctggtgacgggcactgggggaggcgagcacttcaggggctgacagacaatgtctctggggtggaaacacttctctctgggtggggaaggcctactgtaacccaagtgggtgagacgtccccaaagccgacagtgcagaagctcccagggaccactccagcagtgccagaggctgaagccaggctgcaagcaagtgctcctccacactgctcttccagagctgccccaggggctggcctggccccaggtgggcccatggcctaccccaagccatccagaaggctgggcccaactgagttagagatgcgtgtctgcgggggcccagggtggggtgtggcagcgggaaggaggggggcaggagcgtgagcatcggcagcagctgccctgcgagcatctgttgcccttgggccatgtggagcccttgccccaactctccgggctgggtcctctcctccccaggggctggagtgacagcacaggccccaagaccaccaggtggcatggtggggtggtgggggaaggctagtgaaccaaggcaccatcactcacatggaggcgctaatagaaagacaggaggacagacggatggtcacctttccctctagcccaggccagcaacaaccccttgaggctccaaagctccttgtcccatgcacgctggtaagcgagccagtcattctctcagcctggccacagatggcctgctcagtgcctggagactgcccaggcagggctactctgcagcaggcaggccaaaggcccatggtgccaggggcccaactgcacatagcgccattctctgccgcccagtggccaaaaaggtaggcaggagggaatggttagttttcacatctcagcaacaatgaacgcagaaagggttaaacacattcccaagaaaatattttgacaaaataaatattttaacctataatcaggtataattagtgcttataaggaatcccagcaataatttagtgtaattaagtatatactgtatctgtgatttctaacactcacggagaggctggtgggccttgagagtccaggtttcctgacagagccgcacccccttcctggaccaggcagcctaaggactgtgctccccagatggtggggtctgggagcagagatctcaggacaggccatctcgccagggctaagtggaacccactctggggcaccggggctatacttgcttcctgtgcaggcctcaagcaagagccccctctgcctacaggtggggcaggctacctccggataggaggtgcaagcaggccacctgaggggtggctccaggctaggaaggcaggtgacacttgtcagcatggccaatggcctcctgccagcccatacaggtccaccactccctgctgcccctggggcagccaggcctctccaatgatgcctggcaaccagctggcgctggcgctggagctggagcggggcagttctgggagtgggtatgaaaaacagttttgctgggggctccccaggagggcgcctatttcagcttcacgcactatggaatccctgctcctttcagagcctccaggctcctgactttttgggactcctggttccatgaggcagggaggctggctcttccctctgaggacactgggtctgggatgcagtgctgaggctgcggagcactgactgcccgaggtcggaccgcccaccacccgcaggcccagctctggcagggcctcagagacaacccaagtcacaacccaaaggcagccaaagggctggggcctctgggtgcacctgggccatcccagccaccttttctgcagctcaagtgaagccagctaacttcagcagtcttcacattcaagctggcctcaggggggtctgtctttgagaaacattgaggaggcaggggctcatcaagcatcagggagcagaaggcccaggcaggtgtggcatgtgctgccagagaggacagggctagaatcaggctggccactccacggaggagcttcctgggtgaacctgagcaactggagtgagacatcccagctagtcccaccctcagccagacagaggtttcctctctggagggagctggagggctgctagcctggcacagggtcctgggtcgggcagcacttgctcttcactggaatagttcctgttggtgctcagcatgacccccagctgaagtcgccatcctgaatgctccccaacgaccatgtcgctggtctcttctcccgtcaagcccagccccctttccctgcttggctggtggtctgggccgtcctgccaggtgggaagggctaactacaccatggatcaggaacctgtgctgacctaggcagtgcatgctggaggggacaggagcagactgacccagcgagctgggcccaagacacacggggatgcatacagctgcagtattctccttctgagcaacagcagcctggtgggaggtgtggggccaggtgtctggctggaccagggcctgggatgacccgagtcccttgcccatggccaggagacacaccagtgaggacacgggatgggaatacatgttaccagcccctagctgctctgcctgccttcaggatcagcttggggagagagtataaattggtggccagaggacctctgaggtgggaggaggccagactgtcaggagagtctgtgcaaggaggccaaggcctatgccagggagcagagcaggggccttagtgctgcccaggcctctcagtcactgggaacctccaaggatgccacaaagctgtttgctgctggctcttgaggcagatgtgtgaggctacggcaggccaggccacagcactgagtgtggcccatgtgcacatctgtgacacttccccaggcaagccagagcaatacctccagtgcaagtccctccacaagccaggaccaggtgtgcgggtgtgagcctgcagtgtgtgcgtggcagtttggtttattggtagtgtcgtctcagcagcgtgccacatggccaccatctgcgggctgcctgctgccctcccaattgtccttggccctctccctgcccagggagcctgcagggaccctcggtgccaggctcggctgctgagccagcttgggtgtgaagcctgggctggcagctgaatgatggagagagggtcaagaaggtgagagacccccaccatggagacccagcagagccttctcaaatgctgataagccaaatgtcacaaggtgacaagtccaaggagtgagaccaggcccatgagtgcagcacaccctgctcttccagagatgccacaaagccccttcagggagagaggggcccaggagggcagaatgcctgagaaggtcgctgagccaggcagaggtgagcacagggcggggccgggcgtgctctttctccatgggcgggtggaggaaagacagtccgggtggtctgctcaggaagcactgcctggggctgggccactctgcccgctcttcctgggaggaaacatgggcagaggggcccatggtgggaggggagagagtctctggctgcagttgtcccaccactcagagaaaagaagtggctgaagctggtcctgactagtgggaggcctgggagcagacacggtggcatttccatggaaacacaggtgtgcaggccgtgtggagctggggatgtaggagtggccagtgcccggtgtccacggggtgcgagcggggacccgccatctggggaggcaaaccacagagctgctcacagggcgaagagggcatcctctgaccgctctggcttcttccggccagaagggtttgaggctggggcaggagcctccatggggggcgaggggaggtcgggaaccatttcagcagctttggctctttcttcaaggaatttatcaaactctgcaatacaaaccaaggcaagggtcagggttggtgagggcaggccaccagaggaagcgcacccttccactccccagcccgtttcctcctctagggcaggcatgaagcccacctaggagcaggtgggtagggaggggttcgtgagctgcagtgtggggggaggctcctggctgtgcccagtcctcctgccctggagggaaaggctctggaaaacacagcccagagtgctcaccctaccgctgaccattttccagatcagcactgggttttgtccattttccagatcagcactgggggtggggcagggtaagctggaggggccagcttctgattaaacaggcaggaaccatcccacctaccccacccttgcccaccaatggaggactgaggagatgctgaggaatgcagtggggaggggggagtgccccatttctatgggcactgagagctagggagcagggtcctctgaagtttccctccctgcggagcggtctggccacagggtctggcagacctggggagaggaggacaggagcacggagaggcagatggagtggggcaagatgagcttggggaggcaggatgtgaagggcaggggatgtgggggtggccatgtgggagaactaagaccccgctgctcccatccagcccatcagctgaggcccaggagaggctcctcccttctggctcagtggcccaagggtgctgctgcgcacctccacaaactgcgtgtctgagctgggctgagcacctgtgggtcaggaccaggtggcaatctgcacccgctattcaccagctctgcaactttgtggaattgacatgttctttctgacctgtttcccaataagcgagataaatcacacttcccaaatcagcgtaagacctgggtgggacaaagccacccgtgaagcccatggctcagggcctggcaccagtaggtgctctggcagcgggggctccaagatgatgggggctggctcctgtgcagcctgcacagaggcaacaaaagggggctgtaaggccactggccaggccataccttcacttgtgacaccctcctccagatcatcacccttctgtgggaggagcagagaaaatgaaattagggcactggtccaagcactgcccgcccagccacctctgtctgcccatggccaccctaggacagcactgcccagggtagcctgaacaaaacttcctaattttccctgtttccagatttctgtaatagtaaaatactgctcttcttattggagaaacagaagctttgtttttaaaaaacaaaagcaaaaaattcaaacatgttttaggttttgatcctccagaaaggctggaaagaaaactccaaaaacggtgcaggctggttctccagcctgggctgcagagggcgggaccccacctttggcactcttgaggctctagggagaggcacagagcagtagccacagggggctgagcctgagcacacacagggtcacgtgtgcccaacacaacacccactcactgccagccacagggtttctgggaagacgctgttgacaccaatagctggaaaccgcatgaggccttgatggctcagggccacaaagcccacagcacagggcctgtcactcagtaggtactttgggagtggaggctgtgcctccagaagccatgtcctgcagcctcctgggagctgcaccagcctcctcccgtggcccagattatattatctgctgctggctcctcaaggagccatggaggctctgtgcactcaaaaattaaagtgcatcagacttgattttgtttggagaacatggtagtgtcttgagctcatggggttccctggggactggggaagagcagcatgtgcagggcctcattgggaaggggcaggatggggaagtgacaaagccctgggctgggctaggagacctgggttccttcctgactctaccactgacctgctatgtagccttactggacacatcccctccctgtctggaccctggggtcccccttagaagttaaggaccttggtccttcctgccttgcttctgtgagagaagcaatttcttttcgagacagccccttgggaaagatgtcccggggtgtgttcttcctccctgacacccaggcagctgccttctttggcaaggcatgtgtttggaaagctgaccttctggggaggaggcccagagcagccagaggccccaacctgaggcctgctgtcctggtgtgggaggtagccaggtcaccagcccacagacagccaggctgaccctgtggttaaagaactcaacaggctcttctgcctggggacaaggccccctacagaggaggcacctaggagggagatgaggtgtctccagctctgggggagaatccaactaccccatgactctgggcaagccacttcccagagtgcacttcttcatccgccaccctggccccctactgggctgctgagagtgaaagtgctttgtaaagaacagagggaggggccagcagttatcacatgcagccactgcagctctcctttcttgggacctgttgccattttcagatgcatagtatcctcatcttctagccctatctctgaggatggagacaatgggtctttggggcaggggttcttttacatcaaaaatcaggaagggaggagggggatgacagccaattaaaaacaaaagcactgtgtgtatacttcacaattaaaaaaaaaagaaatgaaaacaaaacaaaacaaaacaaaaaacatgctcccccaacactccctcccccaaaaaaccaaagcacggcacatacatctgaaatggaaaagatactggggggaaggcaagtgtgtgttttggagccagctacggctaggactgtgtgggtgaaggaggctgtgcccaaggccttgcccccagcacagttggcctccgcaggccgggaggccactgcagcacccacagctatgggctgatgtcggggaggaggggcagctatggagcttgcccagacctcccttctccactgacccagacaggggtggagcccctgctgatgctcccccaaggcctgtcctcagaagagcctctgccgctccacaccccacagatgaaatagaaaagtcgagtctcaccaggtcggtcctgagccacacctcaatgtcgtccatgacagatggctgcgcaacggggatctatggaggcggcaagcagcgggccaggcagcccccacacagccagcgaggggagacagaacaccggaacaaaggaaatcatcaacagcaaccccaaataaaaccaaaatgtacacagagcaaaaaaacacaattggcacagcacacaggggcaacacagggcagccacgtgtgagatggcaggtgaggaaagcaatgaggtgcaaatgataagaagcaggctcccggcagggccggcggtaaggaaggtggctgtacgcgttcttgaaatggagaactttttgactatgagtgtccactctcacattgcggggcctctcagcccggggctgcaaaacaccttctaacttcaggaaggcgctgccacgcaggctgattttgaactcagccactatgacagtccgctgtcaagcccaacccagggaaggccaagtgacagcctgcccagagcggggtacaggtgctcagagggcagggcagcaccagccccggggggatgcagggggtctgtttgctccgctgaagagattttgaaatgcgtcctggtgcatttctgagtggagaggggaactggaggaggtgcgtgctccgctgggctgggtgtggcctggtagacagaggcaggcacattttaccatcaacagaaacacagcaaaaacgagggctctgatgacaaaggggactatggggctttagtcttctttgtgtctctttaggggaaattcatgaagcagccctgaaagcaacagctccctttagtctcgtcctttcttccctgtgttcaatggctggctgtgcttcaggagtcaaagaaaccaagttcagctgagcactggggcgcagcagccagagccagggaggtgacagcttccaggcatactaaggtgtaccacggggttgcctgagcagtcaccttgcttgggcccctgtgccaagcacctcagggacagagactctgaaaaatgcacatggctaaaaaggtttaagttgccatcaaatatgacatgataagaagctccctagaagccatgttaatggaatgttggctcccagcctagagaaatgaggtgatgacccttaatcacctcctcacctaccctggctctgggaggtacccttccggggctcacttgcaagacccctatttctattacaaaaatgccagctctgtctatagctggcttcacccaatgccatgatctagggtaagactaaagtaaaaataagcagtaaaaggaatgcataccccagtgtctatcaaatgtaaaaaataacacgaccttcacaaagaaaaagaacaaagaacacatatcaccagcagtgatgtgacaactccagtcctgggggttgacacctgctgctgatggtgggggagggtggtttggggtcccaggtagagtccagcactctgagcaggtatctacgatgccaccagagctcttcactccctcagtgagctcagctggccccttgctctgaggaatgtgctctgtgtcctaacttcggacccaatgtgggaagcccacaagagcactttcagaaaggcccaagccagtcactgatcagattaggaagagtctgtgttgctcattatttctttgacttactggggagttaagaatgttgaattgagcagggcacggtggctcatgcctgtaatcccagcactttgggaggccgaggcgggcagatcacctgaggtcaagagtttgagaccagcctgaccaacagggagaaacccagtctctactaaaaatacaaaattagttgggtgtggtggtatgcgcctgtagtcccagctactggggaggctgaggcaggagaatcacttgaacctgggaggcagaggttgcagtgagccgagatcacgccattgcactccaccctgggcaacaagactgaaactctgtctaaaaaaaaaaaaaaaaaaaaaaaaaagaacattgaattgaaaaggtatcagggagtcttatcacccagacatgaaacctagggacaggaggcatgtgggtcctcactggggggatggacgcacaaatgactgacagatgtgttaacaatgcctaaggctggcacttccttgcccttgcccatcaaaaggcagtagggtacactgctactctgtgcttgctggcaggccttctgccttgagacattcctggaacaggacacaccagttatcatgctctcaatgactgtaagtcagaatgtgtggcctctgggaggacgcatgccatgctgagtccccaaaactgaagcttagaaagtcagcagcatctccagagagaaaatagtcccacactagcggttagagtgtgcaccagccctttctttacacctgaccagcttttgtccacttagcagaaacagactagatgtcctgagctttccaatgtgttgcaaaagctacaacaaagacattaaggggtcaggggccttaaaccttcagatttttcttgtaattgttttgttgctgctaaagaacaaatcccttgaggcctggggtcatactttaattttcttctttggggataaatcttgagagccaacatgctcagaaaataaacaatgacacttaagaaattcctcacctcctcaaaaataacttcccaaaagctggctcatgggaacccttttcttccatgtcctagatttttccaaataagtagtatgtttatggaatggcatcctccagaccaagccctagagggcacgctgaggagagtgcactgggtggggtccatctgggccctcacactcactggtggcaggacctggggtgagtcgctcctctctggaccccactttcttcaccggagagctcctgagtttcttctatcctaagaagccttagagatttgggtggagaggcaggagcaggggacagaggcctgagcaatgcttggcctcaatttcctcatctgtgaaataaggcgattgctagattgtatttggctttcaattcttatgactcagaaaccttaactttcaggttggtgcttctgttttctaattcagaaacccagggatgtcagaaattatggaaactgactcattacaatatagaagccacttggcctcagggcgtgaaccatggtggagcagggtgatggttaacagttaagcttatataacgtaagcttaaattgactttcttgtggccagacacaaaaccttagctatctaaacctcttgtcctggtaaataaatgccttgagtattataacagggcaaagttccttctaataatgtaggtgctatcagactcagactaaacatgtacactgcttggaaaatatgaaccaaagaaactgtgggaggccgaggacgcgctccttgtcaggctgatgggagggaagtggggccctggttggagcagggggcactgcgctgagtcttaggggactctgtttcttccctgcagctttgggcaagacaccaggcccttaggaggcctcggtatcctcatctgtcagactaggggctggcccagcagattcctaagaaggctgttggctctgatgtgtcatagttttatttttatttttatttatttatttagttatttatttaattaattaatttatttagagacagagtcttgctctgttgcccaggctggtgtgcagtggtgcgatctcagctcactgcgacctctgcttcccaggttcagataatccttgtgcctcagcctcctgagtagctgggattacaggcgtgagccaccacacctgcctaattttttttttttttgtatttttagtagagacagggttttgccatgttggccaggctgatctcaaactcctggcctcaaatgatctgcccagcttggcctcccaaagtgctgggattacagatgtgagccactgcacccagcctgacatgccatagtttcagcattttcttgggcaatgatccaagctgaaggctggtctgagggatctgaagaagcgtatgagttggaagagagggacagaaaggaagaagacatgtgaagagagaaaaggaaggaagctagcagaggaatgccctccaatagagactgctgcctgaagctcagcccctctgaagataggtaggccaggctggcttggctgaggcagtggttagaccagccctgcccattttcaaagtccacagacatcttggatgtcagaagccacaggttttgatctgagtggcaggtgagccatcctgctgtcagctgattctcacttggaactgcaggcaggggcagctctgcctcagggatcaggagggagggttgcctgcccaagggggagaggcatgtctgtctggtactccaggggttaggattatccttccagagtaagagccttgggggcctccaggtctgaggagggagtcccgccctccaaacccaagcctgggttttggcagcagcattctttactaacctacctctgttcttgttttgacttagattctctcacatgaggatattttcctggctgcaccctgcaaaagggagacacccctagctgatcaccagccaagagaggcaaaaagacctcacactagagaggccagggagggagagcacaagcctagcagtctccctgagagccgcccggccctagcccattgacaagtctcatttctcttcaaccagtaataagcctggtggtgtcagttaacttctgtgttggctatccacacacctgagtcccaggagcataagggttccaacagatgctcctctgcagcttcccacagccccatgcccacaaggaaacccacctgtccagttttcaatgtaacaagaacaatttctgtagctcaggtgtactatttccagagaagctgtgaatcccttcctatgtcacttcaagcaccaccccactgggaccaagtctaaaagcctttgatctcactcaatagtacaaaaagtttccaagtaaagaatttgtactcaggaggcttgaaaagactcaaggtttctacactatgggaaataaggcaaagcaattaatatttgttgtaaagaaaaaaaaaaaaacaaactgcagtcagtcaggcaagacaccaggttagctgttagttaggtttgtttctgggaagttagagactggagctctacgtgggacctggcagtggcgaggcagtctgtgtgggcagagacaggcaccaccaccagctgccaaggccaccctcaggggagtttgtgtgggcagtatccttttttgcaggattaataggcacaagggcatgtgggctggatcttcccaatgaatggacatggtttccagaagccctgctgcaaaggcccctgacatgtgggccagaggccagcctgtccctgaagaagcaaatgagaggcctgggccagcacatctctctaagaatgggcttggggtctagtggaggaactgccttctcacgcagagcagcagtatgctgctactatgagaggtggcaggagacctgcccaggctgacagcagagctgtgcagagggcaccagcccaagctgggtggcaggcagatgccccttgctcccacggctctgggtgatcctgcatggcccaagttcctactcactggtcacgctttgctcaagcaggtggaccctgtgctgcttgcagtctaggacctgctggcctttcctctggccacagcctagcatagcacactatgggcagttatgtattcctctcaccccaccccacctggagggagaggcacatgtttgcactgctttcatcatctttccttctctgcattctctccagctcaggctccatcacatgtaccacagctttgggctctgctagaggtgaaatggtcatcccaagacatacagcctgagatgagctgaccctctctccatgcaccaggctcaggccacctgaacagacaaggcaggagagacccttgcaggtctgtgggccaggaaagctctgctacatgagaaccaactgtgtttacaacattgaactcccctgggctttgttttctttttactctgtttctactgtgtttatttttttatttttttgagagggagtctcactctatcaccaggctggagtgcagtggtgcaatctcagctcactacaatctctgcctcccaggttcaagcgattctcctgcttcagcctcccaagtagttgggattacaggcacatgccaccacacccagctaatttttgtatttttagtagagacagggtttcaccatgttggccagaagggtctcgatctcctgacctcgtgatctgcctgcctcagcctcccaaagtgctgggattacaggcgtgagccactgcacccggcctgtgtattcttcaagaggtttcaaatcattttgacggacttagtggatataagcaactatattataaaaatctgtcaagcctaggactgccaaattcacaggcactgggctacagagggcttccctgactggtcagatgctttgagtctgttcccttagaattgttccctcccaagcaaaagccacagtaacttgtgctcatcctggaaaagtgaatactgctcggagctccggagacagtaaaaggaaggaaaggaccctctcctcatccctgctaatgtcccagactcttaaggcctggggacagggaggtatttttgggactgggaatctgtggcttacagagattatgcaaaaataggaggggaaatttggcacccctgccagaaagaaagcgtgtggccttgtactgtctgattcacaaaggctcggcaggtcacaagaggaagacatgagctgttacacaggtaggggctggggtggacagcaggcttggctcggctggtgactcctcaccattccttgggttataagccagctgtctatgggctccaggtcagactccccacctctacctctcttctgggccgaggacagaaaagtctcagaaagaaaagtcacagcaagacccatgagaaagaagtcaatagcacatattgtggaaacagaaaagtcactcttcagacgtgatcctttgccacgtaaggaaatgtgatgccctgctcccaacctccaccccagcacgtcccccttacctgcctggaaaaaagaagaaaagtttagtaaccaagaatcccaacaggataacacatactcatgccaactactcccgtgcccttggaaaatctccaggagatcacagaaggttgaccagagccgcttctctcaattacggctatcagggttgggagggggtcaacttttcaaagaaccagcttttacaaaagcaattctacttttttctttttcctacattttttttttctcttttctagtggcatgtgtattctttttctaaactcttgaatactaaatttaggtgtattattgccttttaaaatatttatttgagatgaggtctcactgtgttgcccggactggtctcaaaaactcctgggcgcaagtgatccttccgcctcagcctcctgagtagctagaatgactttttctttttctctttttgagatggagtcttgctctgtcacccagcctggagtgcagtggtgcgatctcggctcactgcaacctccgcctcctggattcaagcaattctctgtctcagcctcccaagtggctgggattacaggtacctgccaccacacctggctaatttttgtttctgtttttttgagatggagtctagctctgtcgccaggctggaatgcagtggcacgatcttggctcactgcaacctctacctcctgggttcaagcaattcgcctgcctcagcctcccaagtagctgggattacaagcatgcgctgccacgcccagctaatttttgtatttttagtagagatggggtttcaccatgttggccaggacggtctcaatctcctgacctcgtgatccacccacctcagcctctcaaagtgctgggattacaggcgtgagccattgtgcccggccctaatttttgcatttttattagagacagggtttcaccatcttggccaggctgttcttgaactcccacctcggcctcccaaagtgctgggattacaggcgtgagccactgcgcccagccctgggatgaccttttcttgactgacttggttggatttgatttgtagaggtgcggctacacgattttctcccattcattttattttatttatttttgagacggagtttcactcttcttgcccaggcccgagtgcaatggcatgatgtcggctcactgcaacgtccgcctttgggttcaagcgattctcctaccccagcctcctgagtagctgggattacaggcatgtgccaccatgcccagctaattttgtatttttagtagagatggggtttctccatgttggtcaggctggtctcgaacttccgacctcacgtgatccgcccgcctcggcctcccaaagtgctgagattacaggcatgagccactgtgcccagccttccccttttttattgtgttcttaatttctcccttggcctcgttttcatttcgaggtcagcatggcttgggatgggacaaggtaacctgaaatgctgcaggtgggcaagaatatgtgtagacacacacagacacacacagcccacatgctctgctgccctgtatcgctaaggctgtggccatggcattgccccatggagcagcaaacatgaaaagcaatctgatggccgggcatggtggctcacatctgtaatcccggcactttgggaggccaagacgggcagagtgcctgaggtcaggagttcgagaccgacctggccaatatagtgaaaccctgtctctagtaaaaacacaaaaattagccggctgtggtggtgggcacctgtaataccagctactcaggaggctgaggcaggacaatcgcttgaacctgggagaggaaagctgcagtgagccaagatcgcgccactgcaccccaacctgggcgccagagcgagactccatctcaaaaaaagcaatctgcctactgctgggtggaaaacctgctggagtcatcaggacctttgaaaacagggagctagtccaagccacacacacaaagggtgaagggcgggaagtcactcacatctcctgggctcagacccaggcctgggcgctgataatggcaggggtgcagcaggacacaccctggcatggacaaggcaggtcctggacccagagtgagggacaaatgaggtcagcctcataggggcacaacagggctgctcccagtgcaggccagggttggccacgaggaggggatgtcctcaccaggcagtatcctggtaggcccctggctgggctctctaatgcccacgctggggcaggtgggaggacattctaagtaatgggagaatcagagccatgagcactgcattgattttgagtgtcccagtctcaggggttcaggtggcactgcccactcctgtggaaaggcacggcactgaggacccaaggcagccagctggctcttctgcgccctctggtgaccagtgcagagggatgcatgccctcagatccaccaggtgaagaccagcatggatgagggagtgagtcccttcccccaagaaggagcatcccgtggaaaccagcactgctgcctgcctgggcccattggacaggggcttcagaaggctaaaaattgggacccagtaagcaaacagccctttgcaaaccttcctgtccagtggacagatgatcactgccctctctagcccagctgggggacccagacaggagttccagctgttgtcggcagctattccaaggaccctcctcctccctgcccctgcaaacagacgtgcattcatacacatttctttgttaggcaaaaacaaaaatctcatgagaagcattaagacacacattctttccccttcagtaatccgaaattgtacagaaagcatggttatgtttggggaggcccaaacacataccattccctccacttcactgtgccgcaccccctcaccgccacaggacaccctcccagccaccacccaactgcaccagctctgtaaacaaaccctggctctcgagtgccttctaatggggttggtactgctctgctaggccagtgacaaatggccatcagagatgtggctcgggtcagcattgtccttcctggtgcaggccatggttttatcagagcactgaccaccctgtggcactgtaacaggtgaccataggagacttgtgcctggagaacttggggccactgtggtaggaacagcaggggttctggaaatggacactaatcctaggattggaaccccagcttgctgtctgctctctgggtgtctcagcctgtctcccacctgcctgggactgttttctcttgggtggattgggaagctcatgtgtggcctcatctcacggggtgaggtgaagactcaatgaggcactacctgggttccacggggtgtcccccgtgggtctctcccccagggtgtccctgccccctgtgcaagccagtttctgctgaattacccagccagctttgccaaaccacctgactttccctccagaagactccaggcagaaaaacagggttaaagacctaccccttctgaactctgttttcgattgtctagtgcagaagcaagtcctccgacagcctgaggatcctcataggttaccctggagatgaagaagcagcacaagcagagttcattttcctccagtggtcatggagggatggggtagtggcctgtaatcacttctatcctatggtccttcctcagatgtccttggaaaaacatttcctgaaaccttgacattgagcagaggctaagggctcatgttgtctgtctccctgcagtggatgctaggaggcctgggtcctagctcaggctgagccactaatctctgcgatctcagattttgtgcacctcaacatccctctcttgagtaacaatactgagcatctctgaagctgaatgtccaaagtgccctaatactcctcagagggaagactagataaacacaaagtaacattaattcttattttattagcagcagcctcagtggcatttgacagggaaggtggtctctgggacccgggcctgtcactgattatgggaggtcttcctccactctccgactcctttagctatatctgttttacaatcaacctttggtggtgaagggtacatgggaccttgggtttctgcttaccctactgagccccaagcaggactcagggtgctgagtgcaccaagatgctgggtccctgggaaaggtgggaaaaagtgtgtttcacccgcctttaggctgaacagaaagctcaaaacatgtacagtgcctccctgagatgtaggagattctctcttttggaatcaactccctgaattccagatggctcatcctagccagagctgctatcagaggagcctctgctctgaccacttattttagtcaggaaaatctcgctgtaaggaatgggttcaccctgcatggctgcaccctcctgcttccaagcttctcctgtggatgaggggccaggcagggtggtgtctgcagcagcagcagcatggggagaaaagagaaaagctgtctcttacaactgacaggagaaatcacactccaatcaaccccaagggcaggagagtgtgtgtgtgtttgggggggtgggggaggaggtgggcagttggtatttattcagtatctgcatctaatgccaagtccttacagccatgctttaaagttcctggcagtcctggacatggtaaataaatgcctttttgtgctggcctgtgaccaggcatgggtcaatccccccaatatctttagagagccactaaaaggggccccacatacgtcttgcgctgctcagccaaggagtttcctctcgtctgggcaaacatgtcaaagccgtcacggggattacattgctggagtgaactgagggtgccactgacgctctctgtccccaagtctgtggcaacaaaacaaatgggtggcagatgagaacaaaatgtagactgtagatctgatgaagggcccccaagctaggacgccagccaggtgggtttaggttccatggggagggtggggcgggactttccttggtactcccagtgcaccacatgccggaggagccagggcgggccagatgggggacagaacagccactgcccctcaaactgctcaaggaggcgaaagagtcataacaaaaaagagattgctggggtgacaaggcagggactggcgccagtgcacctgcagattttccataatgcccttctcgcttgggctcctcattaactcaatcacaatgtccaaggacctggaacatctatttattcagcaaatatttcttaggtacccaccatgttcagagctagatcttgagtagaccaaattgaatctgatatggtcctcagcttcaagaaggtcagagtgggcaagagacaagccacagcagtgcttggcttgagacatcaggaaagactcaaaaccaacacaacagtgggtctgtaaggataatgaggaggatgctgtggggagaaggggaaaggcagataaaaaggcacggggtttggaggccagggtgtgtgaagtgaacaacgctcacaggaaaaaatttgtggaggaagtggctggtaatacctcaaatgccaggtaaaggagtgggtgggaagacactagacttttttttttttttttttttaaagagacagagtcttactctcttggcatgatcatggctcactttagccttgacctcccgggctaagtgatcctcccaccttggcctcccaagtagctaggactacaggtatgtgccaccatgcccagctgttttaaaattattttgtagagacaaggtctcgttatgttgcccaggctggtctcaaacacctggcctcaagtgatcttcccacctcggcctcccaaagtgatgagattgcaagtgtgagccaccacccctggtggacactacacttttgttgttgttgttgttttgtttgagacagggtctcactctggatgcccaagctggagtgcagtggcatgatctcagctcactgcagcctcaacctcctgggctcaggagattctcctactgcagcctcctgagtacctgggactacaggtgtgtgccaccactcgcagctaatttttttgtatttttagtagagatgaggttttgctatgttgcccaggctggtcttgaactcctggactcaagcaatccgcctgccttggcttcccagagtgctgggattacaggcgtgagccactatgcctggcctactataccttttttaagaagagaggtagcagaatccaatttgattttttttttttttttgagacagagtctcgctctgtcacccaggctggagtgtagtagagcgatgtcggctcactgcaagctccgcctcccgggttcacgccattctcctgcctcagtctcccaagtagctgggactacagccgcccaccaccacgcctggctaattttttgtatttttagtagagacagggtttcaccgtgctagccaggatggtctcgatctcctgaccttgtgatccacccgcctcggcctcccaaagtgctgggattacaggcgttagccaccgcacccggcttttttttttttttcttttttgagatggcatcttgctctgttgctcaggctgcagtgcagtggcacaatctcggctcactgcaacctccgcctcccgggttcaagcgatcctcctgcctcaacccccctagtagttgggattacaggcacacaccaccatgcccagctgatttttgtatttttagtagagatggggttttgccatgttggttaggctggtcttgaactcctgacttcaggtgatccacctgccgcagcctcccaaagtcttgggattaccggtgttacactttgaattttaagtattaaatctggcagtcatatatgctggactgactgaaggcagagacatctgttctgatacagaaatagtggctacaaatatacgaaatattgagaagctacaattacagcaactgatagccactagaagtttaactcaagtcaaatgaaaggaaagtagacgagaaatattttttaaaaaggaaaacagaaaagcaagacagaggaaagaattttgagggccatgcttattatttcaatgttataatttcatttgttataaattggtatcatccagtataaccaatgtgctagagtcatatacacactttgaatgtacaaactaaatgaactgtggaaagtggtgagtttcttttaagttccagacaatggactgctttaggctgatggtaaagttcaaggagagcaaatatttcagtgctgctacctcctgtttccaagccctctgtagatattgacaatcaatcaatcacagacttttctaagccctgatgtggcttcagcatcctcctcaaacctgtgttccaagaagccaaagagctgaaacctatctgccctccttgacctagttaatatttatttatttttttgagatggagtcgtcccccaggctggagtgcaatggcgcgatctcggctcactgcaacctctgcttcccgggttcaagcaattctcctgcttcagcctcctgagtagctgggactacaggtgcccgccaccaagtctggctaatttttttgtatttttagtacagacggggtttcaccattttggccaggctggtctcaaactcctgacctcaagtgatccacccacctcagcctcccaaaatgctgggattacgcgcccggccttgacctagttaatattgaaaaggaaattacttcaatcatagggaatgttccatataaaacatggcaggtgacctttcttttttttttttttttttttgagacagtgtcttgctctgtcgcccaggctggagtgcaatgatgcgatatcggctcactgcaacctccacctcccaggctcaagtgattctcctgccgcagcctcccgagtagttgggattgcaggtgcccaccatgcgcagctaatttttgtatttttagtagagactgggtttcgccatgttggtcaggctggtctcaaactcctgacctcaggtgatccacccacctcggcctcccatagtgctgggattacgggcgtgagccactgcgcacggccgtgacctttctttaattcattggaatttcccccatccctgctttccaacatagattttaaacttcaaatttagggggaaaaaaggtatgaattgaaagtaaggtggtacaactggctaggactcaggaatacactttcacatgtatttcccaaaagactctctttgggtcttccaagaaagaaagagaggtggcctgcaagggaggccagtggtaggaagtaggtaggcccttttgtccctgtgagacactcacctaagcctgcaagctgggaggagagggaagatgggggcgctgtgttccccaccattgggctcaccacggctggagaccctggccccaggtctattaagttgtcttcggttacttcattcagtacctgtcagaacatgagattggccataagccccagaaccctggagtcaggctctgaggtagaagctggcaaggcaactatgcagggttccaagaagaaaagtatcagcgctgctctagtacagaagcaaggccacttcccccacctgccttccaggtccatggtgggcctggatgtcagtgagccctgctcactgcctcctccccgtccccactagaaggaggggttgctgagtcaacagtgactgtcctgggagatgcaaacttagggcttgcttgccaccttcccatcaggggtgcctgctagctctgccctagtatcccatcaaccagagcttgcctcttcaatttcccaaatatttcaaaaccagttagaaaaactggaggtctctccagcctccaaaacgtggaggggtaggtctggcctcaggagatgacaggattctgaaggaatacttactccattactggcattttgaacggatcggccagacctgtatcgttcgaacctaacaggggaagggaaagcagaagtaaggagagaggatgcctgtgatatggccctgtggggtgctcactagtcctatgaagaatccctgggaccaagaccagccagtcccacctgggggctagggagtgaaaccatatatcaactctgccacggcttcctctgtgtggggctccccctgagaggatcagcttctcacccagcacccagagtgggcatcagaaaggggtggtggctggcccatcatggaggtcattgtgagtgtccccagcctctcctcacacacctgggccctggagggagggtggcttaaccaccttaccttggagctgcagactccctatttcatagggctgtgttcaggagcaactagctagtgttcctaacatgctcccaactcagcctctggggaaagggggtggggcacacatagggtgggcaccagcaggaggaaggcggacgcatggccctggctacggcctggggaaatgctcgccagtagctgctacagagaggcctgggccagtcatcgaaggactgctaggagggtggagtgagtgtcctctgcacccagtcaggcagtgcagggggagttggctttgagcaactgtcgaaggccaggtcatcctcctgtcaggtggggaacggaagagtagttatgaggtgtgtgttggggtggggcagaatagattatgttctgtatcgtatttaaaaactccaaatgccatgggcagcggtagctaagagactttttccagctggagccttagacacccagctttagtgagttatgctgctccagatttgtctcccaacttgctggggtcagcagctggtgacaagaaagagatccccaggaggaatgatctgggtaaggcagtgagtgtccactgtggttttaaaaacgacttgtgtgttttttcaacagtggtctacaaggagaacaggaatattaatacatctgaaacaattttaatcctggggtacctttcccacactcatcttcaatgaacaatgagtatcatcaaagacactctaaccaggatagcacttccagccaccagccccaggctttgcctctgaattatgtgtaatgcttggactgggagactcttgggtgaaaatactcatattagttagctcctgttatgctttctagcagggcttaaataggtttaataggttaaacccaagcccatttaccatggagaaactggaatcacatggcaagacaaaggggcctcgggctgggagtcaggtccccttatatctgctcctgttctccaactgatgcactggggggtcctggggatgcccccacacttactgcagaggtttattcacctgtcaggtgggcacagagccactggtgtgtacttccgtagtcaaaagatgagacaaggcccaaggctgtgacagccataacaaaatcaccctttaggtccccaaagggtaacgcaaatgcaagcatctgtcccactcaccctaactgatgccaggtccttgtcctcctgatgaatccagcagtaggttgtgagtcagctggtgcggcagaggggaccaggaccttaaatctgcaggggactcaagccactgtcctgtcctctcaagcctcatctttaaggggaaaaggttggcctgatcatggtcctttctggtccttatgctgagtccttcatgaaagcccagtgtgctcccatcaggtgatgagatgggaactgtgcttgccattattcctcctatttaaaactaggtctaaataagacattttggactttgtcctgagggaaggctttggaaatgaaaaagaatttgcaggtttgttacctcaaactcaaaaatgatttggctgcagaaagaactggaatgaatgtgtgcacgcttccctaagcagcagcattccggcacttacacccgcctgcttcccctgaatgctctagataacattgacatttgcaaagggaaaagctttttttcttttttctttttttttaagatgggaaagaggaaatcctttttcttactagagattttttttccctttaatccttttcaaattcaaaggatcatcaaaggagcaggtgcagaagctctggggcccagaggcccccaagtgctacccctccctggggctgggggtggcggggcagtggggaaaggcagagcagcctgaggcttacaaagggcagagcctaattctgcacgtcaacttcctgctgcttctgctgctcagttcccaggaggacaagaagcatttttcctgtcagccgggaacaaattagcatctctgatgagtattttccaactctaatctctctccctctccctctctttcctttgtttatgaaagaaatccctctgttatggcaacaatcttttcaagggaaaaaaaaaaaaaaagaaatccggctcccacctctcgtatcgaaggaagacgttgttgaggtcatcgttcacatgcagcagctcctcggtgacctcctcattggacacgcgggagatgagctccacgatgcgctgctgcatggcccgacaggtcctgttgagctcctagggaacacatgcacctctgggtagcctgctgggtgtgcttttcgtcacattctatctcctttgaaaaaatttgtactgattcttaaaagtcacaaaaggagtacatgcttgttcataaaaccagacatgtgccgaattcaaagtagaagttccctcttcactgcctgcccctccttccgcagaggaaacaagtactttttcagcagacaaatgtccagacatactgttgtatgtatacaagtacatgcttgtacaaatcattaaaaaatattaaaatgtgattctttccagattgctttttctcaacaaaatattccagacaccgttctccatcacttggtacagactgcctcattcctttctgtgtgtttcataatgtatctcgccattcttctattgctggacatttagattgtggtctctctttttgtggccaacctaaataatgcagcaatgaacacctgtacacacacatgcatatgcacttgggcaagcacttccataggacaggttccttagcagggaaatttctaggtgaaagggtatggtcatttataacattaattagtaatagtaaaaggccctccaaaaatatgacatcagtttacttacacttccagcaacagcaggagtgtattttatgactgcattaggtatattttggtggcacgtctgccactttgccgagacctcagaagcccaggcagctccctggctggccgaaagaggaaattcgcacacccccggttgcccctggagccctctctacccttagaagcaacatccccgtgacgacagagccttagcactttatggcctggcttccatgagccttccctgttccagaacagcagacttactgatgcccttgttcaaacttgcttacagagctccgtcaattcctgccaggccccttgccatctcgatgccagactgaggatgctacagaggagggagctggcaacactgccaggctggcccccaagcatgtgaccaaagctacaagtcccagtgtgccatacagggttaaagcagagggaaatgctgttcccacctacctgggcactggagggtgccagtgagttaaggggataagacatgaaggataagtctctccttctcacagctcagcctcaaaacgacttcattttgaaaccgtttctggtagaagtaactgatttattcacaggagacacggcaatctctctttagttcctcatattgtctcataatcttgctagcttggctacagggtcttccttcctaccacatcataaactcttgagggggtgttaccatttatccactcaaggatgccctcaagccccgcactgagccacacacagtgaaaaagcccagtaatcatctgctgaacacatcaccaaggtggtcaatcagccagtggggaatcaaaggcatcccccctgcatgtccctggtatcctgcaacacagcactcacacaggggctgggcttcttatctgccctcccgtctagactgaagctccttgagggcagagaaggtatttccctggtacccatgacacatgggaggctctccccaagtacttctgagagaattaattaatgactctaaagtattcagaggccggggccaggtgtggtggctcacgcctgtaatcccaaaactattggaggccgaggcggatggatcacgaggtcaggagatcgagaccatcctggctaatacggtgaaaccccgtctctactaaaaacacaaaaaattagccgggcgttggtggcgggcacctgtagtcccagctacttgggagactgaggcaggagaatggcgtgaacccaggaggcggagcttgcagtgagccgagatcacgccactgcactccagactgggagagagagcgagactccatctcaaaaaaaagtattcagaggccaagtgcggtgcctcatgcctgtaatcccagcactttgggaggccgaggcaggcggatcacttgaggtcaggagtttgagaccagcttggccaacatggtaaaaccccatctctacgaaaaaatacaaaaataaattgggcacagtggcatgcacctgtaatcccagctattcaggaggctgaggtgggagaattgcttgaatccgggaggcagaggctacagtgagcagagattgcactactgcactccagcctggggaacagagtgagaccctgtctccaaaaaataaaaataaaatataaagtattctgaactcttggtccccgcaaattaccagctcagttatccacatactctcagtcttctcagcactcttcactcagagaatggggaattcttgttcatccaggatctaattttccctctctaggactcatcccaggccccactgaaccagcagtaagcacttataaacatacagacaagtgctagaattaataagaggtgaatacgggatcttaattgcaggggacactactatccagtaaagagaaaactccacaaaatacccactctcctctgttgtgaatggctcatgtccccaggccaggcaggagaggggctctcaaaaagctgcctgggccttggggcctgccagacgtggtctggattgccaggcaataatggccacaggcgccaatggacactcacaggtcaaaacccagtcacaattactgtacacaggaaaaccaacaacacaggggaaacactcattacagaatgaagcatactcaggagtgatgcagaaaaccaaggcaggcccttaacattaaaacaaacaaaaacaaaataaaaatgtccaaacttatgaaagaaacaatcacatagatcacgtgaaggattccaacagccaggactgaagtgaacaattaaaataattatagtatttctaatagattgttaaaacacagtgagcatctgttcagggctgacagaggagcacagatttaggttaactttgacagaccatcctcccctgcttcctaaaagaaaaaaaggatacttggccaacacttgggcagtagatttaccccatactttggaagaagcaccagagggagacctggccaaagtgtgcaggatggaaaagggaggctgggcagtaggacagagaaaagaggtcaaacaaacttctgcctctctgctctgccatggactgttccgggccaccgtgcgggtctcctccccagggatgtggacgtgccaacacacatgaggaccgagccaggcactgctgagctcctctttgctccagcgctccaggtgtctgcggaaaatctctgatgagcaaaaggatctcaagtcccagctcaggacccaccccctccagcaaacaggcccattacaagaaagtgtggcctctggggcttgtggcctagcagcaagccctggctgtccttggctggggagggagaaggaaaaaagtcaatcacttctcatgcaaactgcaggccaatcacaaggcacaggacgtgcaagtcaggggagtgtggcagtaggttgtgggaaacagatccaagttaccctccagaagactggggtatcagcacctaaggcccacaggccatcttcaaatacacctcagactttccagaatataggtggcctcaggcacttgccacactgcttaagggctcctgagaagttggccatctgcctgcaatgtcccttatttccttttccatcaaacaaactcttactcatccttcaaggcctcaggatgtttccccactccagtattttgtcataaaaattttcaaacatacagcaaaacaggaagaattttacagtgaacagacaccatatgcctatcacctagattgtaccattaacattttacagtgacagctttaacacgtacttcccatttattcatcttcctgtccacatacaatgttttctggggatctcccaccaccccaccctcctcaagactcccaaagcattcaacacactccagtctgtcatcagagcccctctacaaaaacctccagcaaggggtgaccagcccccatctgcactccacacagcagaagccccgaaacaaagagtaggcctcaagggtggttcactggatttagaggagaaccaaaccagattcctcagtagactgcaggaagtgtctcagaaacatggctacaaatactcccagcaccggcggcctgatggaagggagcaggggttgatgtcagtctcctcaacagagccctagccccagctgggtgctggggacgaagctgcaggcagcaagtagcctgtgactggatacactctccaagtctccagtcctctccaggcctgcttctccctgggtaaaataagggggctgcattcatgaggaagtttttctgcagaaggccactgtcatgctgcagcggcctccatggcacggggccagggcagctgaggctgctctgcttttctcgattttaaacactgccattcactgtaaaattttatttgtggaggaaaaggttccatactttatttacttatttacttacttatttttttttttttttagatgggagtctcgctctgtcgcccagcctggagtgcagtggcacaatctcggctcactgcaagctccgcctcccgggttcatgacattctcctgcctcagccttccgagtagctgggattacaggtgcctgccaccaagcccggctaattttttgtattttaatagagacggggttttaccatgttagtcaggatggtttcaatatcctgacctcatgatctgcccgccttagcctcccaaagtgctgggattacaggcgtgagccaccacgcccagccattacttatttatttatttatttatttaatatgttgagatggagtcttgctctgtcacccaggctggagtacggtggtacgatctcagctcactgcaacctccgcctcccaggttcaagcaattctcctgccttagcctcccaagtagctaggattacaggcacccgccaccacacccggctaatttttgtatttttagtagagatggggtttcaccatgttggccaggctggtctcaaactcctgacctcaagtgatccacttgcctcagcttcccaaagtgctgggattacaggtgtgagtcactatgcctggcctccattactttaaaaaaacgtttggaaagtgttagatgatttctgaggctctaacattgtgacctcagcttggaggaagaatgagccccaagggcacagaatgcagtgatctcatcaacagtcagcaccaggaacatctgctctggccttgtgtttgctgcctcttccccacagccttcccactggggtggtgggttagacagctcccaaccccacaggcagggcctctatgctccaatcctggagaagcatcctgatggctttccaaagagctatgctaaagacaggcccagagactatgacctggggcttccacatcagggatttccaggggtctctgcacagagaaagctttaccatctcttggcttcagtcttttacacctgtctcaaaaaggaagaaaaggccatgcgtggtggctcacacctgtaatctcagcactttgagaggccgaggttggtggatcacttgaggtcacgagttcaagaccagactggccaacatggtgaaaccccatctctactaaaaatacaaaaattagccaggcatgatggcaggtgcctgtaatcccagctactcgggaggctgaagcaggagaatcacttgaacccaggaggcagaggttcagtaagccaagatcatggcattgcactccagcctgggtgacaaagcgagactccttctcaaaaagaaaaaaagaaaaaaaaaaaaaaaggacagaaggtgagaaggtgaaaggagggccagatgttaaagacttttgctaccacagtgccagccggccacctgcatgtcctctgtggtgtcatcacagccagaccctcagcaggctcacttgggagactttcctctgcttcctccacctccaaatcactcaaagtgtgattctctttgggcctaagacacccaagagcctactgcttgctcaggtcaccctttccactgtgcaacagccaggacaggaatttcctaaacgctgacgacttcagctttggccttctcccatttctggtcctcaacagagggaagaacagctggtcacttgtacaaaagccctccaactattagaacaccttggtaaatatcctcttttttctatctaattaatcccaatgcctttatcttttcttcaagggacattctcatctctacctcacgcaacagtcttttaatcatctttatggatttcctctgagccctccacaagtttgaaggaacacggaataaggtcctgaagatctgttttctgttgctgcaaagatgggagggagaaaaaagtctttgttgatgagaaaggggaataatgaagctaaacatgtagaataaactagatttctctagagaaaatggccttggccgttctgtctttgttgaaatgagacgcaagaagcaagaggagatacaccatctgctacttggagaaacgaggaggcctctgttattatcttatgctgatgaacggccacagaagaacatatatttttggcatcattgtattaattaaaagttattcattgaagacaaagctcaaaaggctaaattgggagagacagaggacactggatgacataatcgcaatctttaaagatcccagaaagccaaactcaggctttctgcaggtaagggcatgcactttagcagggacagatgcagtgtcttgaatttcgggcccagacctaaggttccttgaacaggatgacaaagataggcttaaccaccagatgagaagtgacgcagcagggttttcagctgatggaagctctccattttatgtctgcttcttgtgaagaactgcctatccctccctgtggtgggctgccaaatgctgccaaatgccacatttgttccatgtggagactgtgcagtgggtggggcttatggcaatcttcaaatatttaaggatctacccatgtgaaagaggaattagtcttgttctagtgtctaagaagacagaccaggatcaaagttatagggagccacaccttagatcaatgtgtgaaagggctttctaacaatagtcacgaaagctaggatttgtgaggccttgcctaagcccagccctgcgccaggcactgccaaggtgcaagtgatcactccagtctagagaggagaagggggcctggagacggctggtgacttacctggcatcgcccagctcatcagtgggagggcaaggatggggaggcattaattcataggcctgtgtaatttgtatgcctgctgtgctgctgcccgaagtctaaccaagatgtccatttgaaagcaagagggctgctgtgaacagcctgtcactggggacacgcagaaagacccaacagataagatgctgtggaagaaatctgaacacaggtgtagaactgaaccaacttcctggaaggtctctcccaactcagagagtggaggatttgacgcatagctcaagaggaggagttgctgtgttcactctgggcacccttccttccttctcctcaggcgctccagctacgctgacagcacagggtgctagagtggcctcagcctctcctcaaatacagccacatacccatgagtctgcaggcaaacagctcacactgccaagcttccctgctgctcttgcttcactatgggaagctacacccaaaagtgctttgcgatgtgcaggaggcaaccgggacataacctgcccacagttatgatcatcctagggctgacaccaccaattatctctcttcctattccccccacctcctaccccaggaatttatacttgaactgggagcagcttctgttggtgggaacatctgggttgtttccatggcctagccagcactctcagctctgtattctctgccccgagcactctggctgccctccagcttgatggagggtcctggggacacattctgattccagcactttctaagcagacagtggtatttctccacatggaaggttggctgttcagtgtggctctgacccttgggagaccctgcctgctggcttttgactgccaggggaagaaggggtgggaagatgtcggcaatggcggaggcgtgcagccaaccagccaggacggctgtgtctgttcacggctgtccacagtgctgcccagctcctgaatctgctgttgctggaaggacagcctcccactggcaccgagagtcattccttttctatttgatttataagatagcagtgagggctgggaggcttggagttggaacaaaacagagggaaggaaaacgtcatgggaagcaacctatttttgaaagctgtgagctgacgccaggagattaggttctgtttgtcttggctgatgggcttgtttaaaaaaaaaaaaaaatcccaaaccccctctccccccaaaacacgaagtattcctgctgtctgggtctgctctggctgtctggaagcatcttggctttgttcaacacaccccctgctgccaggagcacggctctatccagagcaaatcccccctgtcagcaggaattccgacgctgacacagcacaaagctgcctcaagaggccttctcagtttctggactgacctcagaatcctgtgcatctgggtaacgcctggccgaaccttcctgcaggctaggaatggaggccaatgacaatgcattcaagggaagccaggtcccctggagtgtggcacatattcagctggatctgctgagctgaggcaagcctgggctgatgcaggtgtgtcaggagtgaggtctgggaactagggagaggccactcaggactcctcactggggctgggccaagggtacttttctcagcttcaagagcaggctggtgtagttacatggagacaagttgtttcccggtctatttcctgcaaaaagctgcaagctccagggaccacagctcatgcacctctgtgcccctaggactgtgttttgtgtcaggcctggaacaggtctccacccaccctcacccccataagagccgatggctttggagtaggaagggggcacaataagcagcaacttgggaccaggacagggccttcacaggcggcaagcatgtgccagcagcagggtagaaggtgtagcacttggggaccaagactgacaacggagggccagacacaaatggcagtatcagcagcagcagcaggtgtatcatgagaaactcatgccaggttgctaaatcagtctggctcctgacctgttccctcaagcatcttgcctcccattgaaaagtgtgtggggccttgcagttcacagcatccttcttccaccctccagaaggtcactgcttctaagggcagtaccactgacattttctgcaaatgccagggtcatctgaggctgggtgtggtggagatctgggcactggctctggacctggctgccctgggaaacaggcctgaggtgggggccttgaccctggtttcaggggtagactgcaggccgcccactcctggaccccattctgccatgcccccagatccatgggctgtccagaggcggggaggccagtttgcaatggcaaaccacaatatgcctgggaatcctcagtgttagggaaaagcatgggagcatcacacttcatctcagtctcaggacaccttgggggtgaggtgccactacaagggctcctgtgcacagtcaaggttgaacaggccctcctgcaaaatgtgatgttgagggaccaaaatacagaaatagtacaagctcaactacatttaaaataaacctacaaaaaagtcagaaagaaaatacatcaaagcacctacagtggttatttacagatgcttgggtcaaagaaagttattttcttttctgtgctttctttttctttctgtgagcatgtattctacaactggcattttataatcaggaaaaaaatgttattaaggaaaataaaaaagacagacagtggtactggcctctgcctgtccgtaggcaacgtgaggctgcatgtgtgctcacatggactatcaacaacagggccactggacctgtcccgccttgccgctgtgtccccgggtgggatcctccaacagtgtacggtggaagagctgccaccacaggccaagtgcttctgaaagatgactcacctgcagcaactccagatcagatgaatcctcctgtccagggaccatttctgttaacatctcagacatgacttttgtgtttcctcgaacgacgtccagttcactccgcagcctggcaatctggtgggggccacgaggaaggaaagcaggaaggaaaggtcagtcagcctgcacttgcaatatcagaatcagcttgctcctagtctagtgacaatccttctcactgggagatctgggttgcctttctgagtgcacactgcagaggccaccttctcatctccctctggcctgcctgtcagctctgagagagctgaatgggccctgccaccaacagtctgttgtgcctctctgactgtgacacgaaagcagtaccacgtagtgaagggctccgtgtcaggagtgcaccaagctggctctccgtctcggctctcccaccacgggaacttgagtagaagctgaacctctcagggcttccgttcctgctctttaaaatccaagtgcaggagggcaggagctctgagatcccttcagagctgagatcctattctacaaagctctgagttatagactctgctcctaggagttttacatctaaacactaggatccctctgagaggctgggcagtgtcaatagcacttttctgctgcggcaagaatgagagaacaggggaagacgacaggggagacaccttccccacccagctccctacatggtaacacagccccttgaaaaatacccaagttgcccatcagcgatcccaaagcctggacctgggccaaggcccaaggctcctctccagcaacagagacatcatacactttctccccttgccctcagtcctgtgcctcagatctgccccttcactccctcaaccccctcgaaggatctgcagaaaccacagggaccttccttgcccacagtgaaatatcatagaagaatctgcatagaggtggctactggtcccatcactcagtgacaagagaccaaataacgctggacagaggtcaagaactgcacaggacactggagggagccctggaagactcagcagcaacatccagagccggacctgagcctctctgagccttcgtttcctcacctacagaaaggtggcactaacctcaccaggctgctgtgagtttcccatgcggcgcctggcatgcaggtatgctctctactacacacatacggcccttgttcctgctcaaaggtccagagagaggaactgtaatgtcattcttcctgcactgtgacccagcttaagtgacaacttctctccccagtgaagccttttctgactctccccaccccatcctgaggtagaagcaaccactcccgcctcctcaggttcccactcgctgtgccatcttccactattgcagctgtagcagcctctcctgtgtgggtgggctctctcagcagacctttagcttcttagggcaggaactcagctgggttgagctttataccctcagcacagagacagggacaggagacctcaatcaatggtctaccagggagatggtctgggtcctgagaggctcttgttagcctctggctctgcctggtggatgatccaggggttttcttcaaagtcttggtagagagaagaggtttctggctaggaaggcccaggaaggctatgggcagccacccagtagactctgaagccctgggtcctcttggccaggctgggtgctgacctgcctacctctgcttgcattctgctctccaaggggcaacatgcctcagggctcctgtgctacctatgcccagaccctgcagacccagcatcttctggctactaggagggccttcccaagcacctcccacactttgagtcggtgaaggggctcagtaactgtccaacttcaaacattttctgccttccctcagagcaggaagggcacagttctgcccatagaagcagggccaaaagccagagaccttctttcccacagcacttgggtagccacaatgaggacctcttccatctgcctgtcaagcccacagctgcctggtggggtaacaaatcacttgttctactgatgggagaccggggttaaatgtcctgactgaagcctagagtgagcagcagagctgggggctcacacccaggccctgggggcttcaagttcactcctcctgctctcaccgtactccctgctcagagctagcagggaagtgtgaggaacacgacacaacactgccatccctacacacacattgctatccctacacacacattgcttgacccctctgcttcagtgaggttccacagtcatgacattgtcgcaaatagtaaataaggatttggtaaatataaacattggagagtttttttttcccccaagtctgaccaattctcaaattgtaactaattgaagttctatggattcttctaaagagcactccccaattcatctaaaaaatccagtgtggggttaaaactgcattagtttatcaggaagtaacccgggagggtggggagtgtttgggataaaagcaggcttcttgtgcttcaggagggcctccctgatcaggtcacaggcctctgatggctgactttttttatgggatagatctaagcctctgcatgatagacaagcccgtcacaactcagctgcacgtctatgcttttggcctcacattctgccatggtttcctcccagatctgggccctacatatgcgcctgctctccaatcaagccacctgctgctccgagagagcagcgtctgcatctctgcatttaaatgtcattgctgagcatgcggtctcacctgacaaagcccaactcctgtgtcaggaccctctgcatgtcaggtccccggtgcctcccaggcaccactcaaccctgggctcacaactctgagcccttggttctgctccccaccacagcctgaccacaatccatcatgacttcctcagcatctctctcccctggggattgagcccttccatctctgtgtccctaacacccagcacaatacctggcttgggaggcctttgtaagtgtctcccagaaagatgaaaaaggatagtcagctggcttgcctatggccccgaagtatgcaagtacctgttctgaattggctgtgatggggccagtcacactcagagctggggcctgcggtgcggagtagggagcaggaggcggcgaggaataggaaccagcacttgtcctctgctgtgattgggacctgggcatggtcgcagctggatccacttcagggacactctggcatggcaacaacaaagtcctctgtttacctgggctgcctgcatagctggacctggtacctaccccaccccatgcagcacttccccaaggctgcccacgaaaggctcaaggccctgctccactgctgcccgggtgaggttcacagaaccccactgagcccaggctctccatctgggaagtggggctgccaatggctcctccctctacttacctctcaaggaatgtgtggcagaccaatgaaagcaactccaaaaggcagcaccgagagtgctctgtgagccctctggtcatggttcctattattaagaccacctcgggatccaagtggagggagggcggttattaagttttgctaatcacagatctttacttggtaccataagaattacttttttggtctttacaagtagactaatataaatagtaattatgcaatttaccaaatgttttttgtaattataggaacaacaacactgctctctgtcattattagaagaatgaaacaggttatgttgatttcacaaagcatagcgcgtggtctggagggatcatgatgaaaacagcctccagaaagggcaatcccctgggccaggtgcggtggcttacgcctgtaatctcagcactttgggaggacgaggcgggtggatcacaaggtcaggagatagagaccatcctggctaacacaatgaaaccctgtctctactaaaaatacaaaaaattagccaggcatggtggcggtcacctgtagtcccagctactcaggaggctgaggcaggagaatggcgtgaacccagaaggcggagcgtgcagtgagccaagattgtgccagtgcactccagcctgggcgacacagcaagactccgactcaaaaaaaagagaaagggcaatccctcatgcttgccctttgggtatctcagatgacctcttgcacattaaaattaagtcgtgttcctacgagagatgtgcacaggtgtgctatccttctcagagatgggcagtgggggcaggcaaggtgaagtgtactgggatgaggtgcctctcccagaccctggtgctttcctggctctcccccaggctaggagtggagttgattcccagccagtagagggactagcttccttgagaaaccatgaggcatgacctacatgcttttaaccctgaagtgccaagctgccccctccacggtgctcaagttactgttggcactgcaaaagctttggtgggatgcccctaaagggaccttcccagggctttgatcccaaggctgatggaatcaaggattgaatccagaatcaattctggattgatgctgaatactcacagctcaaaataaattttagatccatttgacttggtacaattgaaaaaacagaaagctactttttgacccaagagtgacatcaagccctgaggtgctatggtgctctgagggacaacaggattcccacaccagattctaggggcctctgaaaagcaggtgctaatgaccctcacaggatggctccgcccaagtagccatttccatgaaaaccctgaactgatccctttattatattcttccacagacactgctgccacttaatcaccagtcaaccagctgtctcactcctgcatgccccttgttattaaaaaggaatgcccccgagctttaagaaagcatgatgacaagctgaataattcaaaggcagcagcagaagggtggctgcagcagcttggctcacccgttctgcagtaggtctttctagaaagtgccagctggaagcttacccgctgtggtgtgtgtatgggagacagagcgtccaagtctgccatgggaaattcaacccctttcctcttcagctcctcatatatgtgcacaacgccggtgagatcaggactgcttcgaaaggcatcagcccatgcctgggataatagaaggcctgttaggaagcatttctcagagctgccatggtatctgaaaatccaaagtggcccacgtcctctccccgagaccagtgctctcctacttgcacatgcaaattgcactggctaaacctattctgttcctctccttccgcaactgctgccacgacacagctggtgaaaccctggctttcaatggtgctgctgagcgtgaacaaaaacacaaaacttaatttagcatgtatttccttggagaagagacagagaaataacacctatgcacggtggtgcatcctaaaaagcaggaatttccctaatggcaaggaaatcaattgctggggctgttcagctgcagggagtggaagctggagccttgtcagctcagcagggtgcctgccctctgtgcgggagcacctctgccctgaaagcttctactggtggagttgggaaccggcaacaaattgagcagaaaggaaaggagaaattgatgtgtgacatgaagtaaaggctaactacaggtttcctcagatcagagacaactaatgctgagcttgtctagcctagctctgtctagcgctgctgccagtaggtgagatgactgtggttcaagggaagaagagcccattgggagctagacccaggccagactggggagttcacccccaggggtccttttcccagacccaagcttctttcatgatgtccgctgccaaaaatgtcagcacatgtgtgcccaaatcgaaaaatcccaagaaaagcacaatcaccagattcccttcagtgaaaacatatcacagagaggaaagagcaaaaattcaagtagattatcatttctgttgactcatgaaacttaaaaattaaaaaaaaaattctgggctgggtgcggtggctcatgcctgtaatcccagcactttgagaggccgaggcggacggatcacgaggtcaggagatcaagaccatcctggctaacacagtgaaaccccatctctactaaaaatacaaaaaaattagctgggcgtggtggcgggtgcctgtagtcccagctactcaggaggctgaggcaggagaatggtgtgaatccgggaggcagagcttgcagtgagctgagatggcgccactgcactccagcatgggcgacagagcaagactccgtctcaaaaaaaaaaaaaaaaaaaaaaaaattctgttctttggaagtcttggactgtatcaaaaacagaatactcaaaggccttcccagaaatggcccttctcatgctgtcccattcaccatacatacccaaaggaggaggcagagcctcctgtgcccatgactccattgccaagtctgtcattgtcacagaatttaactgtctccctcactccagcaatgtggtacaaccaatcctgaggcagccacagaaactctgtctctaaccaacagacccatttgaagttaaaaggtcagtttccaaaaagcctccttaattatgactgatgcatctcaccaggaacagtactgtcagcccggctttccctgatgcacttatttaatttgcatgctcagggatttaaaactactggatcaggacagcccctcttggccaacactccttctggattctgaggagggccaaagaaagtgcctcacagagcactgtctggaaggcccagctggaggagagtaggttgcccgtagggagtgcctctggccccgcccccaccagctgcgctggctgcctccacctggttcaaaatccagctaagtcctgtgacgccaacctcaaaatgccctagcattttagtttagggtgttgactttagggtctaaaaaccagtttcacagcccactgtcggaggctggggaaaaaacacatggcagttcttcctggcaccacttcatgcctttgtacatggagtaccaacagctccagggattcctttcaattcatctagctctctacccaagccaaatttgagataataggaataaagatgaaagaactatggctcttctctccagttggaggatacttcttcgggtccactttctaaggcactctgcttccatgttcacagagacagactggagtgggagggaaatgcacacccaagttgggccaatcagatgctcctccttccaggaactcagcagcactagaagctgggatgttctcactgggtaggcagaactgtcctctgtaactccagggccatgtgccagcacaggactggaagcagagacagcctatgttctccagaaggagcagctagagtgctcggaggtgcaggcgtacaggagaggatttggaaggccttcctgatattttctgtcccttcccagggcggggtgacctggacttctgggagactctgccctgtcatgacaaactcttctctttgcctaggcaagctggagttggcatctgttatttgcgatcaagtagtcttggctaatctacccgcttcctacctgccacaattccaacccttatctgggacctctgtgcagactggatgagatggctgctaacagagcagatattcatgatggcaatctctattgaataggattctcatgccaacagaggaaaaaatggggtgcaggggcgcctctgaataaatgcagctctgggtgtctctcatctctgggtgtctcccattcatatgtgaaaacgtacagatgggagacatccagagatgccatgtgtccctagcatcttcttgggacatgcctcaataattgggcatgggtcagagctgtcccccaggctggagtacaatggtggtgccatctcagctcactgcaacctctgcctccgggctcaagcaatcctcccactttagcctccagagtagctgggactataagcatgtgccaccatacctggctaatttttgtattttttgtagaaatggggtttcatcatgtggcctaggctggtcttgaactcctggactcaagggattcacccaccttggcttcccaaagtgctgggattacagacatgagccaactgcgcccagcccagacaccttttgaaggcagacaccgagtctctcacccgtgtacagagaaggcagtcagtcaacatttatcaggttaaactgaattcagttctcacagttactaagcatccttattttcctacttcagagaacagaggaaagatggccacttaggctgtcaacagactgaagtgacagtgacaaaggaggggtgctggaaggctgacccagctgagaatactccctagagaagatgtggcaagcctcaggaggtctggccactcttggagtgcttaacctgaagcctgagagcagcactgagggtgggggaggctgccccctcttaaagctgccttttcagaaagcaaagtgatgcagcggtgtgagcacactctgagggcctgtcacaggagctagctggttaatggccaagtggtcagttcactggaagccttcttttcctgcctgtggctacaagattaggggcttggaagacccagaggaaggtctaatgaggagaaaaaaggaaagagatcaattcagatctccttcattcctttggaccgtatacaaaaccccagaataaaaccagaaacaaacataaaccataacctattcatttctgtatccctgaaagttttgacaaagctttgaatcatcaaatttcagaccaataaaccattgctgatttaaactatgggctctgggatgcctttggatagaagggagcttctgtcagctcctgcttatgccccagaccagacttcctattcccagtgacagggtccccagggagctgctgtccacacagaatctggccagagcccagctaccaggctctgacgtcttcaaagaacacacacctccagtttctcctgtccccactcccatccccaccccaatcagttcactttcttcagtggaaagtgcatatggttagactattgctggggcatggggaggggggctggagaggcatgaccacactgaggtgactctgccaggatgactccatttccgctcctgaaaacaatttcaagggaaaggctcagggatggcatagagtgggagcatcctttttgtcttctcaacaaatgggacttaatgtaagcaaacaaaaagggacacaagccaaaacaccagccaaggcatgaggtgaaaacataggggtgaagctgaaagctgccggaagggaagtctttggtgcccctgggggtagaagtgagtgtcagcaagctaccaaccaggctgcaccactctcaatgtgtctttcctcccatcctcccagggagaccggctccatccagaaaggcagatcctgtggtgcgggtaagccgactgagccctcgcacatgttggtaaaaagtaccagaaccacactgctgggtctgtcttttggcgggttgagggggatggggtggctacggatggctggagggcagccagaagacagaaagcccccatacgggaaaggaaggagtacagtggggaaaggaggggtaggcatcagctggattctctttgcagttggccagggtgctactgatggcaaaggtgccactgggtaggctgaccatgcctgcgaatggcactctgaaagggaatcagaaggtgggctgggggcaggcagatatgcacggatgagctctatcacccacttccctataggcacagggggactttggaaaagctagtgtggagcccaacctcccccttcccctcaatctggctgcagctctgcttccaccatcctcagggcaaccaaaggggcagtgggctttggccagcagctggtaatcagagccatgggttctacctctgccaggacccccaaccatgcctcacaggcaggaggtgttagggaggcacgtctgtgtggcccctttaccttgaaagcttttcaagtgctaacacattcgatctacttttccataatggaaaggttaaggctgtaccccactccacccccaagccacaaacagtcaaaagccagtttaagtccttcctggctgggccctcaccctctgtcatctgcaaacctttgcttctccagttaaactgcaggctccctgagggtagggccaggactgaccctgtcccacttctctgaagagcaccaagaagcatcctgataccacgatggtgcagagaagtctgttaccgctctggcaccccacacttagctgaacctcctctcagcctagccgcattgatatgagagctgctaccaactcacaggctggcaaggcagccagtgacctgtcacctccaaccccattcttgtctcatggtgggagcagcactttctctcctgggggaattgtcagagtctctgggggagtcttaagttttctaaagtatattcaacatgcaaataaaagtactttctttctcaaaggggctaaaaaaaggttgacccaatgcaatgctactccatgctctaatgaagaagattgaaaacagggtgtgtgggtgaggatgcgaagcaactaacattcttgggtgctggtggctgagaacacccaagagcccagtggagcccattccccaccacacagcaacctcacaccccggtatgaggtggatacatatgaaattgctaatatttggccatttttgaccaacaaagatggcactttcacatattcaacttaatatattcccattaaaaaggaatatatatatgctcaagaaaagtcaagtgctagatgctcatagcagcatttttcacagtacccccaaactgcaaacaccaagtccccatcaacagtgggaggggtaaataaactgtagtgtgttcacacaacaggacttggcacagcaatggcaacgaaagacctagaatcacaggcaacaatgcgtgtgacacccacaaacacagcagaggcaacagagcactctggatgaagttcaggaacagagaagactcgtctatgctgtgagagctcaggcaagtggtcatccggaaggtgggaggttttgggtgtggtcatattctgtttctagatgcaggggctggttacatgttcagtttgtgaaaatttatcaagttgtatacacttttatgtgtgatttcctgtatatatattataattcaattaaaagtttaaaaaaaagaaagggctagggatcctgtttattccattggttcaccctgttacagaagccaagccacccacagctgaatgctgcctgctgtcctctgctgggcagccgttaccaaaggtaagagctcttcaggaacactgcaaatctggagaggaagaacactctccagctgggttatcaacccccatctaggagtagcacccttatctgaagcccatgcttttcacagctggaccaggaaactgtccagccaggcagaagcttgtgaggcatctcaaggccctgttctgctcaggtccccatggccagcacacactgctactgccagaccagcagggggaggcctcagaacatggtgctggccacttcacaccttgggctgatctcatgggctcaggattgagagcagacaggcaagaaccccaagttccattttacagataaggtggtacatgcccacaataaattagtacacctgtctgaggttagcagcaggactgggtaaaagctaggaggagctggaaagtgtggaggggtgatcctgataggaaagcttggaggtgagggcagggtgtgcggggacaggcatcctcagggtagaggtgtgggccacagccagtgaagaaggctgtgtctgccctcagccatggtccccacacagtcagcagggacagtgcagttcacaccccttgtgataactgtgcttgccatgcggtaggctagccaccctgctgggcccgccaccctgcagacaggcctcggggtcagaaagctctaccacaggacatgctttgtgagaagaagccaccatttgttttcctaacatgaattcctgggggtattgaggtaggggagtgcagccccagaaggaagggctgtggtagagtggggtgtatgaggaaggtaaagtgcatgcacacgtgtgtgtgtgtgtgtgtgtgtgtgtgtgtgtgtgtcagagggagacagagagacagaaggatattgggtgggcagaacagggacgagggacaaccctagggtaaacaggggaaggcctcccagagttcctcagaattaactacattcactcattcattataaagaaatactgaacacccgctctacacattacactgctctagaccctggggacagcatgtccctgggttcttagggaacgaagaatgaggcagacaaaagaaatgttagcaaagccagtcttgaagaccacaaaaaaggatgatgtgagacagagagtgtgtgtgcttaaaaccagctggaggcctccgaggcacctgtgaatgaggaggaggagtcactgctctgaaagctggggaaagacctttcaggcagagggaagtgagcacagggaatggacagaggctcctctccagctgcacacctgacccatctgagagcccggcctgccccggcactccacttcctgcattctccgctgcctctgcctggttgcctccctttgcccttgctggagccccacgcccagccctaggtttgtctctcctcttggctcctgcaggcccttgtcttgcctctgccacagcactaatcacccaggctggatgtgcctgttgacttatgtgccttctgtgtcaccacgtgctctgtctaaaacccaggtctgcacacatcccagctcagagcccttcgatgtcttcccactgcctacaggaccaagcatgcctcctcagcatgcatggccactggcctctgggcatccttctggtcccatctcctgcctgctcccccaccccaagccctgcccccaacattcttcattacacccccttccccacatagtggtctctacaacatgtccacaaattatttgatcctcctttcttcaagagatggagtttatttcccctactcttgaggctaggcctggtgactcccttctaacaaatagaatataacagaaaaaaatggtatgtgacttccaaggctaggtcatcaagacctaatcttgatgtccacatggtgataaactcaggtctcttgccaatagtcatcaaggaactgaggcttcctgccaacagccatgtgggtgcaccatggtggaagtggagcctccagctatagtcgagccttcagacaatgcaacctcaagagagactccaagccagaattgcccagccacctgctcctgaattcctggcccacagaaactaagagataatgaacattttccgtttgaaggtatgttttgaggtaatttgtaacacagtgagtgataacaaatacaacccaaatatgccaactgctctctttgatgcgtctgggcctttgcacatgctattctccctgcctgtgaagtctctcccactgacttttccaccaaactccccatcattcttcagggtccaatggaaatgtcatctcctcagtgaaacatcccttaacaccatccccagccccttaccttgctccgcctgacccagagttggcccctgccctgtgacctcaccaaacccgcacgtagctctaacatggttcttcctactccaagttttctcagaggcctgttgaggccaccctacctgcctttgtgagcagcagagggatggcacccagaaagcttcaggaaggctctgttaactggctggagagccatcaattagaatttcattccagtgggatgagaattttttttgaagtattttgcaccaaatattttaaatgtagaagtctccattttttttttcctccaaatggtgggagagcatgaggactcatcaataagagacttcatcttactctgttccaacaaattgggcaaggggtccaacctacctggatcagagcaagcactttgtcctgtacaatggtgggagggttgttcttgggagatataattttgaccagaacactgtcgatgaaatctcggttggccacaaggatgtggaagcggtggccacagttcttcacacatgtctccagcacctgatgtggggagggaaggaaaagggtcaccccagtgggagctggagaagacactgggaactgaggagcgcagctgagtttccaccatcccctctgtcttgctcctagatcagctttctgacacgtctcctccagagccaaacctgcatggcacacgcattcccacactccattctccagggatgacagcagccccttactgactgaagtctcctgtccctgcacaataatcaggcaattagttggtaattgaggcaccagttttgcatgagaaggatgctagtgttttaatgggatcaaaatgactgagcggtccctgaaaattagcattttaactcctctctctgggcctctgggtataaggcattagccaatcggacatgggctctgtcacaagaggaggctgctatgacagcttgaattgcttagtgagttactggcccttatatgtgagaaagcaaatgcacacacacatcccccactcaaccctgcttctgcaaccaaaattggcaatgacaaaggattttccactcttgacaaatggtttgtggacctcagctgccaggtgactttaatgtccatgttcaattcagaccctgcctgctcctcccttgtctgggaaaacaagtgacacaggctttagctgctcagaaaagcccagcatactggttctggccagacggtcagtgagagcttgaacctcagctccaccactttctccctgaatggcccaggacagatctttctgagcctcagcatcctcatctgtaaagcagagatgatgagctctcccttgcaagattgttggaaagattagcaagaatacgtttaaagcataggccgggcatagtggttcatgcctgtaatcccagcactttgggaggccgaggcaggtggatcacctgaggtcaggaattcaagaccagcctagccaacacggcgaagccctgcgtctactacaaatacaaaaactagccaggcttggtggcacatgcctgtaatcccagctacttgggaggctgaggcaggagaatcgcttgaacctgggaggtggaggttgcaatgagctaagatcgcgccattgcactccagctcaggcaacagaacaaaactctgtctcaaaaacatacatacatacatacatacatacatacatacatacatacatgcatgcatgcatgcataaaataatgcacatagcaaagtatcctgcataggggaggtgcccaataactgatgaccatgattacgtgattactgttcagaaggctgctgtacacacgacgaaggggatggcctcttatcctcccataggacaggtatgtagcctcttggaattcggaggtgccaactgggagtgctctgaacttcccagcactgtgtaaaccaacccataggattacctggcccttcccatgccaacagcccccagtgccacagtctactaactggggaatgcctcctcaaaacgatgtcaccagcaacagggaacatttctgactacctcaattattctcatttgcccaaactaatccaaccactggttaacttctgcagccatcccacagggctaggtccaagcaagtgggctttacctggacaaaacatagccgtaaagaaaggtccataactggaacactgactgaatgcgactatatgccaggcactatgagagatccttccataacatatggagttttatccaattctcacaactaattacttctccttaagtggaccttaatatcccatgttttagagttaagaggtttagaaaggtgaagacattgatctaggtacaaattgtcagtcagtgccagaaggagcacaagagctgtgattagccttctctggagccccagtctcctcgcccaccttgaggccacagggccatccctccctcacagctctcctccaagcagccacatcagctaagagtgcctcagatgacaggcaacatgtgttagatttattgttcccccctttggtccttgaaataaccctgtaagatgggaatcatcccattttagagatgaggaagctgaggatcagaggtaccatgtaacttaacctaggaggccaaagctgggactccccatgccaggcagctccgcagccagccagaatcgttccttgccttgctgctggctgcaccttaggaggccccgggttcctctgggcttgccaaggaagattctggaggttagcaccctcagggcctctgagtgaccacaggttttactaagccaaggaggcattttcctttctgagtctctgcttgtgcctgattctggtaaccgtgaggtaattggcattcactctcttgtagtgatccatgggggcactgaaatgaaccagaggggttctttctgttctcaagggccttacaggcacccttctctctaggattctctaaaaccttcctcccaactcaggcagtggggtgttggggtcaaggcagatggcaagaagtatgctttattttgtgagaagcaggtgggaaaggtgaggctgcaattatgagtggggaagagaattggaaaaacaggcataggtctgaggagtagagcagcctggggctccactccactctcagagcaacagtggcaggaaccactgcccgccattagggaatacatgcttagtttctcctgcacagcagtcctcaaggtcagtgtgtcccagcctggtcttggaagtgccctggacagagatgcatgtgccacagagcagccccaaagcctatctgagcaggagatctaggaggtcctccctgggctggcaagagccgctttaggccaccctgccaaacaggaccctggcagttttgtccctataggttgaaaggcatgaaacatacagtggtaattttccagaatgaagccaaaagccatggagaaagtaaacggggcctctaagcaatcagaagtgatgtttaagtccacaaatgaagacacaagcagagagcccctcagggcttcttactaacttattttgggtaaatattaacaattttggtgggtacagatatgaagtccggagagggccacaggaaacaggaggactgaaagtgactaagagagtaagtgaagccctatcagcagacgtgagaccatgcaaagcgcgctaggatggggcctcagtgtagggacggcagccctgcgcatttcacaggcctcccaaaggcatggctgggtttgtagtgaagacctaacccaaggaaaggtcaaacagtgtccatcatgccctgctagaggaaggcaagtaaacgcagagttcactttagaaagatttccatccaacacgattaccatgaagttgggtgtgtaaatggagatgttttagatagcagtaaaattccctgatatattagagctcattccctcgtgatatgagttattgaaagccactcgttttgggcatcactcctggtttagtgaatgctgtggctcaaattctgagaaaaaataaaataaaagcttcaactccctatttctcaaccagtcttttctcctttattattcaaatcccaattccctggcagaactctcttaataagttttggggtttcgcttgggcaaaaaatccaaacaggttctctgctttaaaaggaaacatggttgttttggataaataacctactatttcaaagccccagagaagttgacctggtgacctgttacagtttctattttaagaactcactgtggcccagattttgccacatctgaaaaactgttagttctcaagacagaaataacacctgaagtcgtctttttaaattctctgacagctttggtaagggcaaaaatctggtctgttccttcctgaaaaaaatcacttggctgactttttcaagagtctttgtagctattttcagtttttaccccatgcaaaagaccactttatgatggcaatccacagctcagtacacctcactagctgtgaaggctgggtaaacctccagacctctctgagcctcagtttcatcatctgtacgggggaggatagtaaaatctcttttggagggtggttgtaaacatattcattaatgtccaaaaagttcagcacagtcccaggcaggggcaggtactcaataggtggaagttaactttttttttttttttttttttgagacgaagtctcactctgttgcccaagctggagtgcagtggtgcgatctcagctcacggcaacctccacctcccgggttcaagcaattctcctgcctcagcctcctgagtagctgggactacaggcacctgccaccatgcctggctaatttttgtatttttagtagagactgggtttcactatgttggccaggctggtcttgaactcctgaccttgagatcctcccgcttcagcctcccaaagtgctgggattacaggtgtgagtcaccgcgcctggccaacatttttacaaagaggaaactgatatctagagaaggagttggtctcagtctcagagcaggctggtgacagaaaagggacccacccaaaacctttagctcctctgctctgggcttctgtacctgacagcactgcacacaccttatcttctgctcgtatacatttaccaaattgaagctcaccactccctgtttcagaggacaggaaaacccaaaggcaataccagaaggctttgctggactccagtggcccaggcaccaagccattcagaggttgtgctaagtgggcagagggaaggccctgtgaggggggcaaggccaggagcaaggagttccccagatgacttctctcctcaaggagaatagcactcactgttaatgccagcatcacctctctgtagttccggttcccgttgagccgcttcttcagggctcgaatggcatcctttggcctggaaaaaagaacagacatataaagatacttacaatcccacttgaggacacgatcctacagatatgtgaactagtatatatgcaagactatttgctggctgcagcatgtttgtaaatgtaaaagactgggaacaaactgaatgtccatcaatacacaacaggttaaattaaatcattgacacaatggaatactatgcagctgcaaaaaagaataaagaaactcatgcaccaatatacaccaaactcaaagacatgtgcataaagttctttgcataacagtgtacaaagcttgctattagttgagttatagaaggaaagcaaacatacatagcacaggtgccagcgtagggaagagactctctagaaagagctataacaacctggtaactgtggctgcccctaaggaagggaaccaaaggcggagggaggtttttcactggactgcctttttgcagacctcttgaattctgtatcacatgcaagtattatttattcaaaaccctaactaacccactggtgtgtgggtacatagaagagagtttttccagagaaaccatatgagagacacagaagagagcgtgccaggtccttgtgagccctggatgcccggctcttcctgaattccatggaactccttttcccagagaaagcttaagtgagtctccttaaaacccaacaagttttgtgtttttaggtgacagatctgaggtggattcccagataaaatcttgcagaattatagacagtactcagttcacaaatgggctctgtccaaaagttggagtggagctgtttggaagttggagtgagttcttccttaattactcttataccttagagtcaggattcccaggcagccctctaagtatacatattacatgtaggtcttgtgtctaacatgtaatttaatttattctaactcaggattcaacaaagctgtgggcctagcagctgcccctggcacaaagcccctgtgctgacctgacccatcaccctatgctctggggagccctcagtccggctgtgggccagcgctttgcaatcacacatgggttccagccttccactaatctatgtgtcaatatactggtctttcccagcttgcacgtttgttaagtcagggatctcctattcctacagttttaaaacatttatactctaccaaatgaaaaggccccttcaaatgtgtatgaggaagttgaggaggggaaagggttgatgctctgctaatcagcttaatttaagagaaactgggccgggcatggtggctcacagtctgtaatcccagcactttgggagaccaaggcaggtggataacctgaggacaggagtttgagaccagcctggccaacatggtgaaaccccgtctttactgaaatatacaaaaattagctgggtgtggtggcagctgcctgtaatcctagctgctcgggaggctgaggcaggagaatcgcttgaacctgggagacggaggttgcagtgagctgagatcacgccattgtactccagcctgggcgacaagagtgaaacttcatctccataaaaataaaaaagagaaagtgtgtccagcattatggctcattcctgtaatcccaggactttgggaggccgagatgggtggatcacttgaggtcaggagttcaagaccagcctggccaacatggtgaaaccctgtctctactaaaaatacaaaaaaattagctgggcatggtgatgtgtgcctgtagtcccaggtactctggaggctgaggcaagagaattgcttgaacctgagatgtgaaggttgcagtgagctgagattatgccactgcactccagcctgggtgacagagtaagactccatctcaaaaaaaaaaaaaaaaaagagagaaagaaagaaaaaaagtttaaggagcaaggctactagaagaaaattttaaaacaccctgaatcacctgtttcccattcccagcttgacatatggctgccctgtaggaattcttggcccctgggtcaaagggctgatgagacagacacaaggctccatggggactgggcccaaggccaagtatgtctgcagtacggctgccatttccaaaaggggatgctgatttctgcaaatatgggacttaaccggctctctgctttgaaggctgtttgtggcatgagagctgatgaaattcagtggctactggccaacagcatggactgatttcctctctccaaggctctgccaaaccactgctgtccctgacccacagctgccacacccctcagtcctctcttctgtcctcttgaacttccatggaacaggaaaataggaagagcgcctgagggctgcaatcatttctggctggcagaggaccagcacactcagggctctcctggtgtgggggccacggggtgggaaatcagacagtcagcagcttcctggatgaggtttaaaatgaaaattcatccataggctctgggaagtactggccgagagtgatgggtgagcacaaaagcaagtatttatctctctccccgggggaaaagcttcagagaggaggatcaaagtcatgtcaaaggaaacacaaagtttcaagaagctgcagcagattagatagtgtggagttggaaaccaggagaagagacagaagcatgtgtcaagagccaagatggagcagaaagaaaggatcaggaagaatcagtggcctgtgttgagatggcatcaagccctagcagctttcaggggaaaggtcaggctcctcaggcagtgctcacagcctcgtgatttggcctctgggccatgatcaggctcctcaaagtctccctggaccctagacttataagaactcttccctgatccccaaacaagcctcctgtcatccctccagccacagcctttgtatctttgtccttcagcttcaggactactctctggaaaagctttctcctcatcacccccaaggaggacatggctgcccctcttctgtcaccctgaacatgccctccccattattatcttgctctattgcatgtcttcagttcctcctctgtgccctctccagcttagaagatagaacacaaagattctatgagctgaggagggtccagagatggccatgtaaatgacccaggtcaggggttcctcatgagagctgcacatcagagtcacctgtagtgccattcccaaatccacaagctgtgccttgattgtgtaggtctgaggtgaggcctggaaaacagagtctaaaacagtcccagctgggtgctctggctcacgcctgtaatcccagcactttagaagcccaaggcaggtgggaggtcaggagttcaagaccagcctggccaacatggtgaaaccctgtctctactaaaaatacaaaattagccgggcgtggtggtacacacctataatcccagctactcaggaggctgaggcaggagaattgcttgagcctgggaggcggtggttgtggtgagctgagatcacaccattgcactccagcctgggcgacaagagcaaaactccacctcaaaaataaataaataaataaaaacagtcccaggtaggttattcagtcagccactcctggttaatgcctgaaggactgtcatcaaggccttaggcatcagcattcctcaggctgatggtgacctcagctctggacattagggaaagcccaaggagaggcctttcgggcagtttaccaatctgcacccaccaggaccacagcctcccattggtaaagtattgcacaaatacaagaagtgcaggcagcacttcagtggctgcggccaggtgagcctgtgcttgcatcctgcatgtgcccttccaagctgtgctgcaaggcctttggcaagtgaccaaactactcagcctcagtttccttaacactgaaacaggctgtcactaccatatagaactgttgggggtagggggcgctgcttgtgatgatgcactgcagggctggacacagggcctgcagggcgtggcacatgccaagtgctcacagacagcagacagggtaagggcagtgaatccaccaagatagtcaccaagactgggcagataactgacacccaaatgaaagtgatgacaaaagtcatgggcaatggaaatctttaaagtgaaatagtacatccacatagatatagtatggatatgaagatacagttatgtagccagatacatcatatatatttactcctttaatccttgtaacaaccctatgagataggtattattggcaaccccattttataagtgaggaaatgggacacagacacagggagatgaagtaactcacacaggctcgcacaataagcgagtggtgacctagaattgctccagcctgtggtgtccaccttcctccccttcatccacctgcctcatctggctgataccctggcactctgtaagactccagtctggtgtcacttcctccaagaaggctttgctgccaaaagtcccaaggctgaccactgccactgcactagtctccgtagctatatatagcttctctctctctccctgccccccacccagcactcgttatgcatatgtttatatgcctgcattcctcatcagactgtgagtaccttagagacttcattcatttattcacttatttaacaaatatttattaacagctaatcaaatgcattgtgctaggtgctagggacaaaatgttgagtaattggctgggcgcggtggctcacgcctgtaatcccagcactttgggaggctgaggcgggcggatcacgaggtaaggggatcgagaccatggtgaaactccgtctctactaaaaatacaaaaaaaattagctgggcgtggtggcgggcgcctgtagtcccagctactcaggaggctgaggcaggagaatggcatgaacccgggaggcggagcttgcagtgagccgagatcgcgccactgcactccagcctgggcgacagagcgagactccatctcaaaaaaaaaaaaaaaaaatgttgggtaaaacagatggaaatcctgtcctcatggagatcacagccttgcgggggttgcagggcaagacagacactaacaaccgtcccacagatctgtaagtttaaactgtgatgagcatcagtacaacacgggttatgaaatcatataacagaggacttgtccaaatcaggaggggaaggggttagggaaatgagattcaaactgagagatccagtgaatgacgggatctacttagtgaaagaggtgacgagaacagaagggacagcaggtcagaggccttcagggagggcacaaaggggtgggtggggtgccctactgtcagtccaacttgtgggagtttctttcactcaggaagagattattattattattattatttttaagatatggggtctcactacatttcctaggctggtctcaaacacctaggctcaagcaatcctcctgcctcagccttctgaataggtgggactacaggcatgagccactgcaccttgctaggaagagattttgagacacctcacagcagaggcaacaagaaaacattctcaggaatcactgaggtgctctcactcaaaaaggtagcaacaggagctttagccacttgaagagaaagatgtgtgtgaccagccttctgggaattgaggatttgaaaaagaaggcattggccccttcagaataaggaagctcctggggttcctgggcttcctgccctcaagccatagagatatttgagcaattcactggaaaataagagttgccaacatatttgtatattgctcaaatctgtagagaatttcaagctgggcccaggaatatggaaaattcaaggagctgaaagatcagcagggttgaagagctcaaagtggagctgccgaggggtctggggctcctcatgaggggcctggttggggtttttaacctaagtgcctgcgaaacccctgaaggcttgttagcaagggagcaacttggtcgttgtgcagcaggaaggggtaggagggaaggggtcgaagcagaggtccacctctagggtaaagtgcagacaccagagaatgcagcacctgaccttgactacctttccagccggattccagaccctcccgctcccccaatgtcaccctgtctatcctagacagcttgtatcccttgacacactggcccttttgatgccacccttggctacgggacacatttctcctgccatcctggaagacagcccctccaggaagcattgatacccacctttccctctgggaccatggcatcagggacaggccttggccacagcccttgccagtcctgccaggtgagcgttcaagggcaggctggaacattcaccttggcatcccgtagctgctatacctccacccctgggggtcagtaaacatggccagatgactggacaaacaagtgaatgagtggcatgttaggaggacgtgaggaaggtagccactcggagcccagtgacgatgggattagagatgtgtagtccctaacaactatttgtgagtcacgtctgtgtaccaggcaccaagctgatcacctatatttagctggtgaaaatatgccacctttcaccaaagactcccacgttttcatccagtgcaggccactgcccccaactcaagttccctgtgcagttccctgtcacatcttccaggagcctggctggcagcaaagatctactgctgatctctgctccccagcctgctccacctcaggaaacagcagctccatcccatggttgttcaggccccaaaccttgcaatttcccttaactcttcattcctgtcttatgtcagccaattccattggctctaccatctaacacattcagaatcccatcacttctaatcatcatctcacaccagtattactgtgataacctcctcactgggttttctttcttcttttttctttttagagacagggtcttactctgtcgcccaggctagaatgcagtgacaccgtcctggttcatcacagcctcgaactcctaggcgtaagcaatcttcctgcctcagcctcgtacagtgctgggattgcaggtgcacgccactatgccaggccatcgctgggttttctgcattgtccttggcctgcccccagtcaggccactctgaacacagtagactgagtgatctctttccaataagagtgggaccacaccactcctctgcttgaatctccaaaaaggttgaagccagagttgctctggttctacatggccctgtgttatctgggtccccagtatgtcggtaacttcctctccaggtactctcttctttgaccactctgctccgggcccattagccaccttgctattcctcaaacacatcagacaccctctgtcccaggacttctgggtttgctgttccatgagccttgacagttcttcccttgtataatcctcaccccctactccctcatctccttcaagtctttgttcaatgtcaccttctaaatgagacttttctgttgttttgtcttctcttttcattttttttttttttgagacagggtttttctctgtcaccaaaactggagtacagtggcatgctcatggctcactgcagcctcgacctcctgggctcaagtgatcctcccacctcagcctcccaagtagttgggactacaggtgtgcaccaccacgcctggctaacttttgtattttttgtaaagacaagattcaaccgtgttgcccaggctggtctcgaattcctgggctcaagcaactggcccaccttggcctcccaaggtgctaggattacagatgtgacccaccgagcccagccaagacttttcttgatcactctatttaacattgctaattcccagcctcctctctccccatctcccttccacagtcttgtcctcatctgaccaggttatatgtttaattatcttgtttatggcctgcctccctactactctagactggccgctccccaaggggaaggaatctatcttgttcactgctgtgtcctcagtatttacaatagggcctggcacaaggtagtcattcgagaaatatttgttgcatgaaagcaggaccaagcttgagaggctggtccccagttcacacatggcaaggctagagtgacagtgctgagatgccagcccagggatgcctgagtcccagctgctctccttgccactcctgaaaatggtttaagagggcatggctacagtaaagtaagtgttagtggtatggacagagggctaaatacagaccagtttggaagaagtacaaatagagtgcagctgtaaaacaaaagaggattcaggaaataacaacaggaacggatccagcagtgcaggaatgcaggaggggcaacgtgttctaagtccactcatgccgctttcccactcccggccgtgtctgccccatgccctggacctccctccatggacacggtggtgctctctgactcctggcaaaccagggcagagacaggctgtgaaggagaggcagaggccagggaggaggggagggacgaggtgacacttgggctgcagagactaatggccactgggaaccaagtaatcaagcagcttcatttccacttgtgattaaaagcaggtgattaaaggaggtcatccctgttctacctccaagcactgccattgggcaagtgggggagggatgaagacaaaaaggacagataattcagagtgtcagcttattcgatgccaaaccaaacatactaggaacaaaacaaaaaataaaacctgccacccttaggccctgacaagctttgagtggcccctaaaagctcagagaggcttcccaggagaggggggcacacgtacccttcctccgtctcattgatgatgtcacagatctccatattcaacgtccaatcctcactttgcagggagccatctgttgccttttctgtgaaatcagagagaaaatgggtttacatttctcctggaataagtgggccttggcaggaaatgggaagagaccagaaccaccacattcttctcccaagcagatgggctgagccaacagagccattctaggagtgctattatcacaagagaacacccgggaaaggtcctggcctgagggctgatgttataacgaggttcttcattcaccaaactctagactgaaaagcttatgacaggcctaagccatcaaaaatcaccccaaacatgaggatattaggtttatgaacccgtagagtctggagccaaactacctaggttcaaatacaggctccactacttactagttgtgtggtcttgggtaaattacttaacttctaggtgccaaagctagtgaaaacaacagcacttacctgatatatttgttatgaaaattaaatgggttgatatacatgaaacacttagaacagagcctagcacacagtcagtactatacaggtatttgctattgggattattaaaaatcaattgcagtagttaaaaactacatttcagataagggggagaaagaaaggaccattggttatcaagccactgtaggtgtggtgttgggtgtttcacgtacattattttatctcatccacaaaatgactttctgaccactcaatgaggaaaggacagtattttcaacaaatggtgctgtgaaaattggattgccacatgcaaaagaatgaacttggaccctttatcttacaccatatacaaaaatttactccaaatggatcaaagacataaatgtaagagctcaaactaaaaaactcttagaagaaaacatagtgaaaaaacttcatgacactagatttggcaatcatctcatggatatgacaccaaaagcacaggcaacaaaagaaaaattttgaactacatcaaaataaaaacttccaggcatcaaaggacacaacacagtgaacctgcagaggaagaaaatatttgcaaaattatatatatgataaggggttaatatccagactacgtaaagaactcctatagcttaataacaaaaaaacccaaactatccaattaaaaaatgggaaaggacttcaatagacatttctccaaagaagatatataaatgactaacaagtatgtgaaaagaggttcaacatcactaagcattagggaagtgcaagtcaaaaacacaatgaaatatcacctcacacccattaggatggctactatcaaaaaaatagaaaataacaagtgttggcaaggatatagacaaattggaacccctttacacttttgatggaaatgtaaaatgatatagctgctatggaaaacaggacggtagttaaaacacagaattacccagccaggcgcggtggctcacgtctgtaatcccagcactttgggaggccaaggaggatggatcaccaggtcaggagatcgagaccatctggctaacatggtgaaaccccgtctctactaaaaatacaaaaaattagccaggtgtggtggtgggcacctgtcgttccagctactcaggaggctgaggcaggagaatggcgtaaacccaggaggcggagcttgcagtgagccaagttcatgtcactgcattccaacccgggcgacagagccagactccgtctcaaaaacaaaaacaaacaaacaaacaaaaaacatagcattaccctatgatctagcaattttacttctgagtatatacccaaaagaactgaaagcagggccttgaggagatatttgcagagtcatgttcatagcagcaatagtcacaagagccaaaaggtgtaaacagcctgtgtccatcaattaaagaatggataagccaaatggatatacatataatggattattattcagccttaaaaaggaaggaaatcctattgcatgcacaatatggctgaaccttgagggccttgtgctaagtgaaataagcctttcaccaagacaaatactagatgattctacttacaatcaggtacctagaatagtcaaatttaaagacagaaagtagaatggtggttgccagaggctgctggggggtgtgggggtgggggaatggggagttattgtttaatgaacacagaatttcagtttggggaaaatgaaagagttctggagatggttgttgatggttgcacacaatgtgaacatacttaatgccactgaactgtatactttaaaatggttaaaatgggccaggcaaaatggctcacacctgtaatctcagaactttgggaggctgaggcaggagggttacttgaatccaggatttgacaacagcttgggcaacatagcaagacattgtttctacaaaaaatttaaaaattagctgggcatagtggcttgtgcctgtggtcctaactactaatgaggctgaggcaggaagattgcttaagtccaggagtttgaggctgcagtgagatatgattgagccactgcattccagcctaggcaacagagtaagaccctgtctcttaaaaaactttttgttgaatggttaaaatgataaatttaatgttatgtgtattttaaaaaccaccaccaaaaaagacagaaaaattatacataggtcaatggactgctgggtcagggagtagcagggtggggatcagagatcatttgggtctgtagcctcctttgacgggaaacccggggcccgcagaagaaaagggaaaggtccaggagctcaggatcgtcagtggcagagccaggactacagccagggtcacttgactcccttccccctctgggatgtgagctctgtgagggcagggactaggtctgtcttgccttccactgggtccccagtgcccagcacttggcagtagtgcaatgcatttacatcagatgaatgactgcattagcaacccttcctctaagttatggatctcagccctggctgtacacgagaaccacctggggagcttctagagagcaccaatacctgagcctcatgccccagaggttctactttgaatggtatggggtgggattcagtgattattactattattattattattatttttatgtgagacagagtctcactccattgtgcaggctggagcgcaatggtgtgatctcggctcactgcaacctttacctcctgggttcaagcaattctcctgtctcagcctcccgagtagctgggattacaggcacgtgccaccatgcctggctaatttttgtatttgtagtagagatgggtttcggcacgttggccagactggtctcgaactcctgacctcaggtgctccacccacctcagcctcccaaagtgctgggattacaggcgtgagccactgtgcccagccccaacactcttgatggttggggaggtagatcatttggctgttttcttctccattctcaccaaaaggatgttgctgaatgcaaaatgctaaaaccagtcctcttttgccttctggtgttggctgcttctgaagtcactatatttaacatcaaagtgtagaaagcggcagccaaaaagccaagccgctggattgcgaggctcctccaaacagggctgccttaggtttcagagaacataggagggtgggtgggcagaaaaaccatgctcagagccagcactatcactgctgtcagcgtcaaggcttcagggcatcctggcctgggtcctaccccaggcgagagaaaatgccatggcaacggcatcaggatgctatgctgctcttgcactgaagatttaatgggagccgtatctgattacccgagctcaggcctgccctgccctgtccagtccagcccagcctggcctaccctacccagcctcttccccagcccagtccttggccattagcatatcaccagagaggtcagcactttacaattatccgtccagagggctggctggtgggaaggacttgccccactgttccctagaacacttgtgtttctgctgttgcaccaggttttattttaggttttgacgatttaggtgacaaaataaatgagactgaactttgctttcctctggcctggggacaggactgagtgagggagcccacattgagtggccttagttccagaggcaatcagatccaactttgctcttgattagctggaaattcttttttttttttaatttttttattttttattgatcattcttgggtgtttctcacagagggggatttggcagggtcataggacaatagtggagggaaggtcagcagataaacaagtgaacaaaggtctctggttttcctaggcagaggaccctgcggccttccgcagtgtttgtgtccctgggtacttgagattagggagtggtgacgactcttaacgagcatgctgccttcaagcatctgtttaacaaagcacatcttgcaccgcccttaatccatttaaccctgagtggacacagcacatgtttcagagagcacagggttgggggtaaggtcacagatcaacaggatcccaaggcagaagaatttttcttagtacagaacaaaatgaaaagtctcccatgtctacttctttctacacagacacggcaaccatccgatttctcaatcttttccccacctttcccgcctttctattccacaaaaccgccactgtcatcatggccggttctcaatgagccgctgggcacacctcccagacggggtggtggccgggcagaggggctcctcacttcccagtaggggcggctgggcagaggcgcccctcacctcccggacggggcggctggccgggcggggggctgacccccccacctccctcccggacggggtggctgccgggcggagacgctcctcacttcccagacggggtggctgccgggcggagaggctcctcacttctcagacggggcggctgctgggcagaggggctcctcacttctcagacggggcggttgccaggcagagggtctcctcacttctcagacggggtggccgggcagagacactcctcacctcccagacggggtcacggcctggcagaggcgctcctcacatcccagacggggcggcggggcagaggcgctccccacatctcagacgatgggcggccgggcagagacgctcttcacttcctagatgggatggcggccgggaagaggcgctcctcacttcctaggtgggatggcggccggacggagacgctcctcacttcccagactgggcagccaggcagaggggctcctcacatcccagacgatgggcggccaggcagagacgctcctcacttcccagacggggtggcggccgggcagaggctgcaatctcggcactttgggaggccaaggcaggcggctgggagttggaggttgtagcgagccgagatcatgccactgcactccagccggggcaccactgagcactgagtgaacgagactccgtctgcaatcccggcacctcgggaggccgaggctggcggatcgctcgcggttaggagctggagaccggccaggccaacacagcgaaaccccgtctccaccaaaaaaaatacgaaaaccagtcaggcgtggcagcgggtgcctgcaatcgcaggcactcggcaggctgaggcaggagaatcaggcagggaggttgcagtgagccgagatggcagcagtacagtccagcttcggctcggcatgagagggagaccgtggaaacagagggagagggagaccgtggggagacgggagagggagagggagaccgtggggagacgggggagaccgtggggagacgggagagggagagggagagggagagctggatttcaaagcttcatccatgctgagctgcaaggggaatggacagaactggaaactggggcagactggagttgccagcctaggctgggctgtgagctccatggagcagatgccgggccatcctgccccggctctaagcccagccccaggccagggccggcacctggtaggctcttcatgagtgcttcctgaatgaatgctgcagaatggaaattcttttatgaagagaaaaatcagaactgatttgagctcctctgtcagccttacttccctcatctgtttcagtagagctaaatacccatggttgtgtttgtgtggcattttctgcaaaatgaaaagaaagaagcattctttttgggttggttctttataatcaaaatgggtatatatcttttagcttgaaaactcaaatcccagtaattgaatagaatgcactgaccctgaggataagttatcatgcctttgaacccttccccagtatcataagaggaaaggaaagggtgaatataaggttaatggattctgctgctaaaccgaacttggaaacgaggtttcattgatttaatatttcctctattaagcctcccaagactgtatcccttgtagccctaccaaagtgcaatctctgtactttcttctccatgagagtctgtgccacagcttgagttctgtgaaggggagagactactaccccctagccagctggcctctccccttcctggctcaaaagagtagcaagtccaggcccgcaggcaaagctgcttccatcaggataagtctcctcttgaggaggctgctggatttatggctgcagacatgcccctgctgtgtgtgacccaggtggtgagtcattccctctgggcgtggacagaggaggggtgttcagagacagctgcaggaagagcaggggcaggaggcaggcaccatttcactgctgcaggctcccagcacacctggggctcattctgtgtctggataagccatagggtgacagggcacactgctgtctcagtggctacattgtgtcctcccccttaaccttcctggaacctctgccctcagtcttttcttctctaaacagatgtgcctaccaccacccccattcttcctaggcctgcctgccctcccttggggggctctgatttccctgttaggcccaggtctgctccttgctggctttatgacttttactctctttcccacatgcatgaaaagggcagagagggggtatggcatctctggggcctatctggctcttaaccattgctgacatgcattctcatcccttcctctcctcctccactttccccatcttgtagacaagtatcaaatactgcttctgtaactgccagcctggtgccatctgaggactgactttggttaagattgctccaaatctcaagagcctcctagcccctgcccagtcctctggctgtgtattgcattcatgtgaagtcagattcttactatttgggggtggggttgctttctcagagcaggggcttggaggcacctgggtggtcaagtctttgagtctttgagtgccaagtgtgatgaataaagagaaaaggttagggatatatcttttttaggtaaaaaaaaatttaaaaagagcagtaaataaaacaatgaggctttttaatgcagacagaagactgttgcacaaatgttttgagcaacagctatatttttggagtgtgctgtcactgcttgtaaagtatagcttttgtttggatgtgtgagttctatctagtttgttacgtaaaaaacaagtgtcacttcaccatagctgcatccagtaaaacaaggatacttccagcctgtacagaggtcttctatgttattatctgagtatcggcgaagtgtggattgtattaaacttttattaaaatagtggtgatggtatcctttcatgaattgagagttaggatggggtagtttcagaattcctccaagatattaacttcagatccaaactcaggctttgctagcaggtgagactatatcatgcaaacatccaggctttagagacagaactaggatcaaatattggtaccaccaattcaatgatgggatcctggcttaccaggtgtgaagtggtatcccagtgtggttttgttttgtatttctctaatgactactgatgttgagcattttttcatgtgctttttggccatttgtatatcttctttggagacatatctattcaatttttttggcccctcaccccttttttttaagagacaggatctcactttgtcacctagaatggagtgcagtggcccaatcatagcagcatagctcattgcaaccttgaaatcctggtctcaagcaatcctcccacctcagcctcccaagtagctgggacttcagggatgcaccaccacaactagataattttctttaaaaaaatttatgtagagatggggtcttgctatgttacccaggctgatcttgaacgcctggcctcaagtgatcctcttgccttggccccccaaagtactaggatcacaggcatgagccacaatgcttggctccatttttaaactgagtaggtttttttttttttttttggttgttaagctgtaagagttctttatatattctgaatattaatcccgcctattttatggttgtcttttcactctcttgattgtatcttttaatgcacaaaagttttaaattttgattgtcccatttatctattttttcttttgttgcctgtggttttggtaccatatctcagaaatctttgctaaatccaatgtcatgatttcccctttttaagatttttttttttttttttgagatggagtcttgcgctgtcacccaggctggagtgcagtggcgcgatctcagctcactgcaagctctacctcctgggttcacgcccttctcctgcctcagcctcctgagtagctgagactacaggcgcccaccactatgccaggctaattttttgtatttttagtagagacggggtttcactgtgttagccaggatggtctcgatctcctgacctcgtgatctgcctgccttggcctcccaaagtgctgggattacaggcatgaatcaccgcgcccggcctattttaagatttttatagttttcccttcgctcttatgtttaggtctttggtctgtttggggttcatttttgcatatggtataagataatggtccgacttcactcttttgcatgtggatattcagttttcccagcaccatttgttgaaaagactgtcctttcccctctaaatacttttggcacccttgctgaaaatcaattgaccatatacgggagagtttatttctgagttctctactttattccattggtccatgtgtctttccttattccaataccatgatgttgtgattattatagttttgaagtaagttttgaaatcaggaagtgtgagtcctccaactttgttctttttaaaggttgtttagggccaggcgcagtggctcacgcctgtaatcccgatactttgggaggccgaggtgagtggatctcatgaggttaggagtttgacaccagtctggtcaacacagtgaaaccctgtctctactaaaaatacaaaaattagccaggcacagtggctcacacctgtaatcccagcattttgggaggccgaggcaggtggatcacgaggtcaagagattgagaccatcctggccaaccaacatggtgaaaccccatctctactaaaaatacataaattagctgggcgcaggggcacacacctatagtcccagctactccggaggctgaggcaggagagtcacttgaactcagcaggcagaggttgcaatgagccgagatcacgccactgcactccagcctgggagacagagtgaaactccatctaaaaaaattaaaaaatttaaaaaattagctgggcgtggtggcgcacacctgttgtcccaggtgcttgggaggctgagccaggagaatcactcgaacctgggaggcagaggttgcaaaatgagccaaaatcacatcactgcactccagcctgggcgacagagcaagaccccatctcaaaaaaataaataaaaataaataaaaattaaaggttgtttggctatttggggtcccttgagatttcatgtgaattttaggatggatttttctatttctgaaaaaaataccattggtcttttttttttttttttttttttttttttttcagagacagggtcttgctatgttgcccagtctggactcaaactcctgggctcaagcaatcctcccatcttagccttccaagtagctgggaatacatgtgcatgccaccatgcctggcttcattgcaattttaactgggatttcattacatctgtagatcactttgggtagtgttgtcatcttaaaaatattagcttcccaggccagctcatgcctgtaaatcccatcactttgggaggccaaggtgggaagactgcttgagctcaggagtttaagaacagcctgggcaacataaggagaccccatccctacaaaaaatttaaaaattagccaggagtggtggcttacacctgtcatttcatctactcaggaggctaaggtgggaggatgacttgagcccgggaggtcaaggctgcactgagccgtaattgagccactgcactccaacctgggcaacacaatgaggctgccttaaaaaaaaactgtcttcccatctatgaacacaggatgtttttccatatatttatgtcttctttcttctttaatttctttcagcaacgttttatagttttcggtgcacaattttttgctgccttggttaattcctaggtattttatttttttagaggctagtgtaaatggaattgttttcttttcttttcagattgttcattgttaatgtatattaacagaaacacaactgatttttgaatgttgattttgtatcctgcagctttggtaaatttatgttattcgctctagcagtttttctttttttttttgttttgtggtatcttcaaggttttctacatgtaaagtcatgtcatcagggaacagagataattttactccttcctttcccattgagatgccttttatttctttttcttccctaactgctctggctacaatttccaataccatgttgaatagaagtggtgaaaggcagcatcgttgcgcctatatatatttttacaaaacacagtcatacaccatgagagcaaacaaagctgaagagaagacccatttgagtccttattccataaaaaattgcaagagggtgaaaacaggaaccataacaggatctgcaggtctttgcaagccctgagaaagtcacctcagacttctgtctggaaagccttctctccagcctatctgcccatatctagctcccatccaacgtcctctccagaaccttctttgctgccgcccacaagagaggccctctgatgggctccagcacctgatagtacagttcacacaaggactgagccttcaagaccattctaatgttctgagaactttttcaaatcttaccggcttaatgagccgttaagtatcttcttggcccccaaccccaacctaaactggaagctgcttggaggcaggacatcttcatgtcaagaaggcctggctttatgctgatgagggccctttataagtaaaatgatgattataaacccttctgaggcccccaggtgacaggcactgggcagtctggtgagatgagagctcggttcccagctgtccccggttctcccttcagacttagaagcaggagaaatgtgcattataatggagtctagaacagggagtgtgaactcagattttggtgagttctagttctgccaattactgtgtgactacaggcaataacttgacctctccaagccttttggactgctgcaaaatgctgcaataacagcactctctcacacagtggctgttagaggagactaaataatacagaaaacacctgacagagcctctaatacagaggacctttccttgctgttacttctaactttattacagctcttctgaaaggagctctgccagtgccctccccttgcacccccctcctctcccattcccgtgtcaccactgccacctacaggtaaacagccatccacaagctacacccatcagattcaaaaccctgggagctctagctttctggatttctgggttactgagccaggaagacctccatgcttccagaaggaagcccccaaacttggcttgccccacctgtagggtaaaggagcaggcacaccacaatttccttaagaatccaagcattaaaactccaagaggtcttagagaccatctagtaaaaagattccccataagtccacatttcctggaccccaggaagtggggcatgggggaggaggggccacggtgttgttgcaagttccctatgggcagtttcttgcccttaaagctaccattgaaccactggtctcaagtcttcaaggaaatggctctcattcttttcaccaaaaaaatggagaaacagaagagagaatgaaaacctgtttatttggtttgagccaggttcttgacagacattacctcatttaaccctaccatcccacgccccagccgccaggaaggttctctctctctaataggaagaaaatgaagcctggtggggtgactagccccacagtgtgcagagaggaggtagcaatactgccaaccacatgacccaggtcttcctggtaagcctggccttggaccctgatccatcctcaggtagagggtcacagaggcaaagaagaccctggcctccacaatagacggtccagagtattggatgcagcccaccctcctgatttttaggtgaagtctaaagaccctcctgatttttaggtgaagtcttaagtgtaaaagagagtgctggtgaaagtgtcaagttaaattagatgctgggtcactttattctctcgttctttttttttttaattaatacatcttttattttggaataattttatatttactgaaaagttgcaaagatagaacagagttctcatttgctcttctcaccgtttccgctaatgttcaatatttttttttttttttttttttttgagatggagtctcgctctgttgcccaggctggagtgcagtggtacaatctcagctcaccacaaccgccggctcccgggttcaagcaattctccagcctcagtctcccaagcagctgggactacatgtgtctgtcaccacaccagctaatttgtgtatttttagtagagacggggtttcacaatgttggccaggctggtctcgaactcctgacctcgtgatccacccgccttggcctcccaaagttctgggattacaggagtgagccactgcgcccggctttttttctttttcttgagacggagtatcaccctgttgcccaggctggagtgcagtggtgcgatctcggctcactgaaacctctgcctcctgagttcaagcaattctcctgcctcagtctcctgagtagctgggattacaggcgcccgccaccatgcccagctaatttttgtatttttagtagagacgggggtttcaccatgttggccaggctggtctcaaactcctgacctcaggtgatccacccgcctcagccttcaaagtgctgggattacaggtgtgagccaccgttgcaggcagttcacatcttacataaccactgcacacaggccaaaactaaaaagttaacattggtatagtactattaactgaactccagatgttatttggatttctccagtttttccaataatgccctttttctgctcatgatccgatccagaataccacactgcattttgttttcctctctttgaaaccttctgttttctttaaagaccaataaactctcaaactccccaacttattctcctgtctggagagctcagttctaaaggacagctctgtgtgagccccaattccacaccctggcctcattaggacaccacatcctcccactccccaaacaaaggaacccttcaggccagccaaacaacagagaaaacagaagcttgttagccacacaggcccgaggctgctgacccaagttcttttttaactggaattcccttgaggaggatccacagatttaaaatgcatttggggtgtgctctctagaagcagagccactggtatttgatgtatgccgttctttgtacttaatggaataacttacgtgtgagtcagtgtgtgagagtagctgggggaagaggccaatttagggccaggatggaaattggccatgggggaggaaaggcctctgcaggagccagccaggccccaagatggtgccaggctttggggaagagggggctgtggccagcttgtcccagcctagcaggctgtgctctaatgtcagacaggtgggggtggctgggaggatcaaagtttctctgtgacctggtgatcaggttacagtttctgcttaaagcagagcagataagggaaagtgggggcggggtgggggggtgggattcacctgtcctgtcttcctctcggcctcttcgtgcagtctgctttgctgccaatttcttcttccccagagcgcctcccaggggctgttcccctcgccctcgtgcccaccattcaccaccagcactctcagagaagagaggaggtgtgcctgagaatttcacagtgtgccacactgtcaccagccttttttttgagcttctcccgatgacagagacacatcccagagatgtgaatgccactccttgggaaggattatccaaagacttcccagctcaatttaaaaacttcaactgtgaggcctctccctgccagactgggatggaaagaagtaagatggagcccctacactgaaagcactccccaggaaagacctgcagccagccatccaggacacagggcacagacctgaggctgaacaggggagcagaggggactgtgaaagctaagaaatgggcctggtacaaggaaagagcaggaatttgaagagagaggaacatcataggctatgcaaacagcctcccagggccagggcctcggtgaaggggagcggtgagaggaggccagctctggagtgtcctttcattttctctaaggagtctgggctttccacaggaggcaacatggggcttttcaacaggagtgacaagaatatttatgtctgagacagatcgctctggtaacagcatgggggctgtagtggagtggagagactgcaggcaggaagcagggggcaggttatcacaactgctcagtgagaaaaggagacaggacagcatgttggtcaaggtcatggctttgaatctggggactgggggtcagtcttggctctctctgacctaggacacatttctcacgctctctgaatttcatccataaaacgggcaaaacaattgtacctcctcacagggtgtggttaagatcaaataagttagtgatataagacacgaaacagggaacctggaacatagtgagggcgcaataaatatgaaccacaattcttaacttgtgtattctgtggactgcatctcaggaaagacggaattccagcggggaagcagaaggggagggtgactgtctccaatgcttttattgcagcctccaggtggaatagtgaagtggccaccttaactgcctcctggagtgtgagcagagaggaccaggacaaggctgcaatctgttggccaggcaccaactagcctgtgaggccaaccagggaccgcaggcatcaccaggaacaaggctataaaaaggcctcaaagagtgattacaaaattccacaccaggagaaagactcccagaagtttcccagggctcatacctgctgtgctcattaaagccacagtgttggctgggcgcagtggctcacgcctgtaatcccagcactttggaaggccaaggcaggcggatcgcctgagatcaagagttcaagaccagcctggccaacttgatgaaatcctggtctctactaaacatacaaaaaaattagccaggcgtggtggtgggtgcctgtaatcccagctatttgggaggctgaggcaggagaatcacttgaacccgggaggtggaggttgcagtgagccgagatcgcgccactgcattccagtctgggcgacaagagtgaaactccatctcaaacaacaacaacaaaacaacaacaacaacaacaacaacaaacacccatggtaaaacttcaacacttgtattaacatgtatttttaagcctgggcaacatagggagaccctgtctctacaaaaaaaaatttttttttaattagctgggcgcagtggtgagcatctgtagtttcacctactccagagcctgaggcaggaggatcacttgaggctaggaggtcaaggctacagtgagtcgtgatcgcaccactgcactccagcctgggcaagagggtgagaccccatctcaaaagaaaaaagttaaaattgtagattttatgttatacacatctttaaaatggtaaaaaagatacttgggaggcaagaggatcacttaagcccaggaactggaggctgggagacactccagtctgagagacagagcaagaacttgtgtctaaaaaagaaaaaaaaaggccgggcgcggtggctgtcgcctgtaatctcagcactttgggaggtcgaggtgggcagatcataaggtcaggagtttgagaccagcctggccaacatggtgaaaccccgtctccactaaaaaaatacaaaaattagccaggcatggtggtatgcacctgtaatcccagctactcgggaggctgaggcaggagaattacttgaacccaggagcagaggttgcagtgagccgagatcgcgccactgcactccagaatgggcaacagagcaagactctgtctcaaacaaaaacaaaaacaaaggtaaaaatgactacatattgtatgattccatttatataaaatgtccagaataggcaaatctatagagacagaaaatagattagtgattgcctggggttggaagggctgggggaaatggggagtgattgctaatgggtacggaatgatgaaaatgttctaaaactgattgtggtaatggctgaacaacgctgtgaatacaatgttttttaaaaaaaactctgtgactatactaaaaaccactgacttgtacattgtaaatgggtgaattgtatggcatatgaattatatctcaataaagctgttgaaaaatgggagaaaagctactaggaatgtgttcaatgtagtattatttaaaatccttagctgggtgcagtggctcaagcaggaggatcacttaagcccaggagtttgagaccagcctgagcaacataaaccttgcctctacaaaaaatacaaaattagccaggcatggtggtacatgcctgtagtccccagctactcaagaggctgagataggagtattgcttcagcacggaagactgaggctgcagcgaaccgtgatcacatcactgcactccagcctgagggacagagtgagaccctgcctcaaaaataaaataaaattcttaaaacttctcaaatataaaataaaaaagtgatgattaaatatagtatattgattccactgaatattatatagctattgatatagtttggatatttgtccccacccaaatcttatgttgaattgtagttcccaatgctggaggtagggcctggtgggcagatccttcatgccttgatgatgtctttgtgataattcttgcaatatctggtcagttaaaagtgtgtggcactccctcctccactctctctctctgttttttgttcctgttttcaccatgtgaggtgcctgctctcccttccccttctgccatgagtaaaagcttcctgaagcctcctcagaagcagctgccagtactatgcttcctatacagcctgcaaaaccatgagccaaataaacctcttttataaattacctagtctcaggtatttctttatggcaatgcaagaacaacctaatacagccattataagtaataattcttaaaaccatatagaaacattttgtaatgatgtaagaaaaaaaagacacaaaattgatttttaaaaaaacatgcatatggataatgcctggaagataaatgggaaaaagtgaaaataatcagtgtgttgaagtatttggcttaaaggcaaactttaaaaattttttatgttattactgttacaaaaagaaggaaagaggatattatacagcaaaagactaagaaagaaagtggcaaactaatgaccaaaactaaaagccagttatttaattcttccatcaaaaatagccaggtatagcccaggcgcagtggctcatgcctctaatcccagcactttgccacgctgaggtgggaggatctcttgagctcaggagttcaagaccagcctggccaacatagcgacctcacctcgtgtctaccaaaaaaaaaaaaaaaaaaaaaaattagccagatgtggtaacgcatgcctatagtcccagctacttgggaggctgaggtaggaagatcgcttgagcccaggagatggaggctgcagtaagctatgatggtgccactgtactctagcctgggtgacacagtgagaccctgtctcaaaaaaaaaaaaaaaaagctaggtataggctataggttagtcgtggtgcctcatgcccataatcccagcactttggaaggccaaggcaggaagtccacttgagcccaggaattcaaaaccagcctgggtaacacagcaagaccttgtctctaccaaaaatttaaaaattagcagggctcagtggcacgcacctgtagtcccagctactccacaggctgaggtgagaggatcacttgagcacaggatgtcgaggccgcagtgagttgtgatcataccactgtattctagcctgggggacagagtaaaactctgtctcttggagaaaaaaaaaaaaaaaagctaggtacaagctttcaagctggcctaaacataagtaagcttcattacttagtctgaacatacagacttaaggataaaagcctggtaaccccaatatctctcaaaaggcattttattctgaccaggcctccctgctaactctcccttgtcccaaaggaggtcacccagggtacccagctagttaaggaggaccaaactgagagccagtctggactggcacaaggggagatgcggacataaatgtacacgtgtttcacattccaaagccaaatacaatagggttctagatcatctgggaaattactcctattcatcaacatagaaaggtcacgaatatcaacagtgagaacaaacagggaagattacatttaaatgtaaccatatttgggcctggtgtgatggattacacctgtaatcccagcagttttggaggccgaggcgggcggattgcttgagctcaggagttcaagaccagccaacatggtgaaactccatctttacaaaatatacaaaaattagctgggcctggtagcacacgcctgtaatcccagctacttgagaggttgaggcacaagaatcgcttgaacctgggaggcagaggttgcagtgagcaaggatcacaccactgcactcctgtctgggcgacagagagggactctgtctcaaaaaaaaggaagaaagaaaaagaaaaagaaatgtaaccatatttaaatatgaagaagagccccaacacaagcatgtattcctgtttatacaatattcagggctaacagacttatcacacacaggttgtgtaacttattaatgacaatgtgactttaaacagtagttctaagtgggtcaccttgaataatacgaaacaaagcttgccaagggaaacatgcaaataagatcaaaatccaacagggaataggcattttcctagcttttcggatttttactgtagaaaaataaacacagtatctatctagtttctttagcactaaaaaaaccaacagcatgaaactgcattcttcaatgggggtggagtccaaagggacaggcccgacattattttcagcacactgtaccaagtcaagctggtatgtggataaagcagcacagctgggtttaccatgtgagtaacgggcagagagaacctaccaccctatgtggcgcaaaccacatgaggccagctgcagaggctgtggagagaggcctctctttatcccttcttctttccctccatctctttctgaggccaggacctgcatgcagacctttcttgataaagaactcaacctcaatgtgatacatcaagggaaacattccctgaagaacatggtggagcaaataaacatttggcctcgtgagaatggccacagaaaacactagggaatcttaaactgtcagttggatgactagatattttatgatattaaggattatgattaatttattttagatatgataataagctgttggctatactttttttttttttttttgagacaggatctcactcagtcactcaggctgggaatgcagcggcacaatcttggctcactgcagcctcaaccttccaggctcaagtgagcctcccaccctcagcctcctgagtagctgggactacaggcatgtgccaccacacctggctaatttttgtattcgtggtacagccagggtttcactatgttacccaggcctcccaaagtgttgggattacaggcatgaaccaccacacccagtcagctatacttttaaaaagattccttatcttttagaaatgcatacttaggtattcatagatgaaattatatgatgtctgggatttactgaaaaataatccaggataaaagtgtgtggggctatggatgaaccaaaactgccatgaattgataattgtagaagctcaatgatgagtatgtgggggttcattatagtcatctttttccttttgtatatgtctgaaattttctgtaacaacaaaaaaaatcagtaggagacagcataaaaccattcataactttgacccggcaatagccccctaaggaaataaataagggggaaggggagagctgattctgcaaagatgcataattgagaaaaacactgctgctcccaacaaacgagaagatggctaagcaacgagggtacatcaataaggcaaaaacgctacgtggctttttaaaatgataaatacttcagcctagtcgctaagtggaaatcggcataggaatgctaagaggaaaacaggcaggataaaatattatgtgcatactaatcaccacaaggtaaaaatgcatgctcacataatggaaagggtcaaaagagaacacagaaggcgacaccctccctttaacactcagctcgttgcctcctctcagtgagggccccagacggcccccgcgtgagcatgcacacacgagatgaattaattgcactcttctgggatctcacagtcctcacttgctgaggctcatccagcccctattgcttgtctaatggttcctcatggacctgccttccctgatgcaccatgaattttaccagcacacagtaggtattcaataatgtgtgtcaaacagaatagaacataaatagctgctgtctgtgtctcaggattttttttttctttagagctattcccacccacagtagccattcaggaaaggcattcctcagtatcagagaacaatgcttccatttctgattcacaaagtgcttctgctacgtgggtttatgaagccagcaaggcaaaacaaaatcaagcagactttctgtctagatccttgctggaccacacagaaaaatcccattttgttttgcaagcttgtaacaagtctcattgctatggttcctaataccaagtctgaagattccccaagcactgctgtgagaacgggcctttccttggctacttaaaaatgctgcatggctgctctctgtggctggcactatagtaaagggtacaagccagaatgcagtcgggactgtggctgctcagcagcgtcaggcggggaagtcaagaactgcccatctagacagaagtgggcagcaacacagcctgggccatgctccacccagtctgaatgtttctccatctcttctgcttagagctgctttgagcagcaggctttgggtgggtgagaggggttgatagggatattcaagaatgtcagagcctgggcgtggtggctcacgcctgtaatcccagcactttgggaggcaggtggatcacctgagatcgggagttccagaccagcctgaccaacgtggagaaaccccatctctactaaaaatacaaaattagccaggcgtggtggaatgtgcctgtaatcccagctactcaggaggccgaggcaggagaatcgcttgaacccgggaagcggaggttgtggtgagccgagatcgcaccattgtactccagcctgggcaacaacagcaaaaactccatctcaaaaacaaaaaaaagaatgtcaggaagaaatccatagactgtcatttttcagagcagtagttaactttttggataagatgttaaaggaagaatacattccctttgaaaatctgataagacctttccagagaattacacacacaattctgcacacactttcaacaggttattcaccaatccctggcctcagtcagataccacttctgccctagagctttagctgtgactgttggtatgaacacttagacaagttaaacacaacatgaatttccacaacagcaaggcagctgcgatgagtgaggtactacagagagtgagtgacagctctgttgggagggctgtctctgtgtctttatgaagaccactagcagagatacagagcccatgcctgggcacacacaggaaggcaagagcaccatggttaagacactccattccaaaaacaaaacaaaaaagacactccattctagttcttcagaaatgagactgccaagcctgaagtccttaaggttatcagaccatgagacagcctctttttgttggactggaatgctgacactactcattatgcagtcattttaccgagtgttgccttaagtgctccagaaagtggggtatagagaattaccaacatacaaactttagcccattctcctaacaaaaaccaaaaaattggtccagatggtcttaggaaatgaccaaatcagagactcttgtgaaagtggttaaaaaaaaggggggtctgggaatgtgtaggacctaactttgaacttggtaggcacaaggaggactgcagagaccctcacggtagacagacacctggcaggcccctcctgacacttggggctcctaagtctgacttattccacatcttgtccaagagataaaatacccttccccagcagcctcttgcaatcagctcatcaatatgccatgaaaatgttttgaaacaagctttggtcacatcactgccctgttccagccctttattaactttccttgtgatggtacaagaagggtatgttccatttacttccaaaaggaatttagggtaattttagtaataatttatacccaagacaaataaaacaagaaggctgaaaaccaaatggaataaaagaagaaatgttttaccaagaaccagagagataagacagttattgcaactagacactaattaggcccatgcttcctggtggcctgggcaagaagggaaagacaatgagtttccacagtccttccttgctgattaaaggcagaataaaaggcattcctctaggatggggattttttttccctaacagtaagttttgagatttattgcagtcactcatattaaggaataatgaatagcataatatggaatgtcttcaacaacagtttcatataaaatataaaatgttcttcctgtaacttagcctggtattaactgccctttaccatttgtcccagttacttttgcagcctctcttttcctattttgccccatcccatccccacaaagaactacacattcaaccaaaccagactcctctttccaagaacacatccccaccttttcgttactacctatttttacccatcctatcctctttaaatccttcctcttctacagatttccccaattctccaatcaaaagaggtctcattctaccacgcagcccatgcctctgcactgccaagcaaggcagagcaccaacaaggcaaagtcatgcagaagtggcagcaagatctttggagtcagaccaattgagctcaaatctgattcagctgcttatatgctgtgtgatcctaaccaaataactaaatgtctctgagcctcagtttccacatctatagaacagaaacagggcctggcacacaggagtcctcaggagaactgggggagcaatagctggcacaatagagacttgggtatctgtcttctctccccctcccccgtacaaaatgagctccttgaaaggcaatacaatgaagcatctcccagaagaccttacacatgaggggacctcaaaaatggagttgcagagttatctaaaagcctgactgtttggaattagatcagagagtctgacatgcagtagcttcatgccagatccaggttcagaacgcaaagctcctataactcctgggccaaactttacacacgtgacactgttagccccttgagggtctcaacacactgacttcctatttcacacaataaagatcctcttccttgtcagaaaataattcttatcatacaggtctccaaatacccatgcaaatcacattaatataacccgaggtggccaccttacccaaagatctcatcaaggggagctggtgtgtgtttaattgttatgaatgtatatcactgaccaatgccttgataaactacagataaaatctatcagttcttgatggctaatttggtacaacatgaatattgtgagttctaataactcacaggagactattctagtacttaccagctatatgtcttccacactcataaaacaaccataattacctttcatgggtgagatgttctagtaattcttaagtgacttaaccctagaaaatctatggaaaaagctaatttcaaagaatttttgttttgaaagtagaagacaagaccaagaacttatgaacatgctttttatttcattattcttattattttatttttattttttgtagagacagagtcttggtactttgcccaggttggtctcaaactcctggcctcaagcaatcctcctgccttagccttccaaagtgctgggattacaggtatgagttaccgtgcccagccctcttttttaacaaacatgccagaaaacatacgtccctttgtttcctggggatagatgaattatggtaatgttgtccctgggcagcagtgtaaaactgttttacaaacagttgaatcttctattttagaagttcccctcagaagtagcatggctgtattgttgggggaaagccaggcctctctggagcaggcatgggatgtggtggggaatgtactttggaaccagacagaactacatgcaaatcttactttaaaatattggggtaaggtgtttcaactccttgggcctcaatgttcttatctataaaatggagttaatactattaataaatatggaaatggttctcccattttattgtgcacccgaatcatctgtagagtttgttaaaaatatagctacatgagtcccatccccaaagattcaaagattctgtttcagtgcatctgatgtggggcccagaaatctgtggggatttaaattatttttcatttttaattgcacaatatgtaaatacatttcccccttgtaaaatattaaaacattaccttatcagttatgattgcattcagctgcaagcaattaaaaaactaacagtcgtttaaacagatgggggttatttttctcagggaacaagaagaaatctagaagcaggcagtatagagctggagtggatttatggaatccactcaaggattccataaaggacccaggaactttttgtcttcttcctctgccatccttggcctgaggcttccctcctttccatccttccagctgcaaggcaccactgctctacctggcagtctataaagcaggcaggaagaacacgaaagggccaaaggactttgccatcttatttatgaagaggtgctctcctcaggagctcctgcctcttgttcataggccagagctgtgtcatacagtcacccctagctgcaagggaaactaagtaagagaatatagctgggcacataggcaatccaaacaaaatcagactccgtcagaaaagaagaaatgaggaacaggtattgggagcctgtggaacagtgtctactgcaattacagatgaggttcatattcccttggggcctctttcccttgacccccatcaatcctggcctcatgggcttttcaccaagctccccaggaggttctgatgccccctaagcatcattttgagggccaccaccacacttacagtacttatgcagaggtctagatctggctttaaaatgtttagcctggtggagccataatagttgtctgatggatatttactctcatcctctttccttcccctacaagtcacccagaaaacccactcgtttgttacaaccacaactcaagtttgcctaaatggccttgctcagcatccaacactggggtgtgaaaaagtattggcttatttttttaatcaaatccatccttcaaaagatgatgatctgccaccctagacaatatttaaagaatgtgacttgggcccaaaacatggctgaagcatgagaccctgcctgagatgacagtattatcccacaaggtgactcactgcctggaaaggcttgcccctaatccacagacacatttagatactaggttaggaaaaaaaaatctgagtaggcaagtgtgcatcacacattaagtggggggaaatcaagacacaaactagtatattttttatattttatattaaaagtatgtacagttttatattaaaagtgtatacctggctgggcatggtagccattttcaaagtgctccaatcccagcactttaggaggccaaggtgggaggactgcttaagcccaggagttcaagaccagcctgggcaacatagtgagactttgtctctacaaaaacagtgttgaaattagccagatatgttggtgtgctcctgtagtctcagctacttgggaggctgagggaggggtatcacttgagcccggggatcaaggctgcagtgagctatgatgtcattaaatccagccagggagacagagtgaaaccctgtctcaaaaataaaaaccacacaaaaaaacagtatatacctaggcaaaggaacaaagcctgaaaggctagcccctgatacggtaacaatggcaaacatcttagtagtgagagtaattatgtcttactgtgttttgttttgttttgttttgtttagggggataatttctaaaatttttctcctaaaaatacatatttattttgtaacaagatttatgatttttaaaaatgtgtcgacctatacagccatcagaaataacaatatgcgatatttcatcttatctggtctttgggtaaaattaaaaggcaaataagaacggcatccaaagcaagggcatgactgtgtatgcagggcacggtgacaaggccactgcctacaatggtagtgttttaacaatctgaaatcattcagatttaacaggggaaaaccttcagaatgaaacacaggctccaggttcctgagatttcctaatagagaagctgcaaagagaaatgcgggttcattactcagccaccgtgctgcactcagctatcctgcacatagcaattagagtggaactcagggcaccatgtgcactgcatacaaagccagccaccctctgagaggaaccaaaatgcacaagaccccacagcatagaaagcagccagctattaagaaaagtttttccaattggtacattctcggcaaacccttgcccacaatttcctcaggaagcctctgtggctatcaaacaagcaaactaataaatacattaataggcaagatctacaagttggatgctgttaactttggggaggcagctgaactgtgagtcaggtctagggaggtaacttcatactgaaggctctattctctatacatctttctactctagcaaatgcttataatctgttggcaaataacagccttagctgagcttcttctgaaacaaagatgcccccagttgttaagaactccttgatttaaattgggcttgctgcattctgaacctcttcctccaaatctgaatggcagaaaagtgaccttctccacatcctcttactgctctttcttgtcagtagaccttgagcttgccgagctgtgctttccaaggtcctggtaactgtgcctgctctaggaggtagcttagaggactggagaaagcagaggatggtgcacctggaagccccaatcctggtcccagggacccagggcaagtcacctcctccctgggtctctatgggatccaatgcaaagctgaattatacaccttattataccatctctaaagtccaccaatgatgccatcatgctccaagagccattaggacataaggaacgaggtcacaagtgatgaaatacagttggcaaatcaacctaaaaatattcaacctcagcaggaattacagaaatgaaaatttaagtgaaatgcacttccacctatcaatttagcaaattctgaggaatgactcacactggtggtgcctgccttgtgcaacagtctgaactggtctcccagaagggaggtcttcccctcctatcctacccagtccatcctccacccagcagctagtggcttttctggaatgcaaatctcatcatgtcactggcctgcatttatagctcctttacggtttcccactgctgttaggacaaagtctacattctgtcacttggcctcgcttgctcctgccctgtcttcctctgcagcccatctctctccaccctcccttcggcctctggccttagctcccccaggcgtgtgcccttcagcagctctgggttttcacacattctgttctctctgcctggatatctaggacagtctctccccaccatcctatctgcttctactcttgttaacatttaacaccttcaggatgtggcctaaaacccttcttccaggaagttttccccaaccctgttcctcacactagtgcccctgccccaacctgggccaggttaggtggggtctccataaaaactaagcatatgtaaagcaatataaattttttggagaataagaaacttaaaaacaagcataccctttgacatggtaattctatttaaaggaatttattatatgtaaataatctgaaatgcaaagatataagccctaagatgtttatcactgcattaattataatagcaaggaaaaaaagaaaagaaataatctaaatgtccaacattagaggaatggtaacatgaaatgcaatgtattcatccacataagggaatattatgtagtcatttaataatgatatttataagctgttttttaattaaaaatgattattctatattaagtgggaaaaacagggcacaaaattgtacttacagcattatctctgtaaagaaaaatgttttaataatacaggaagaaaatacaccaaaatgtttatagtagtaacctttgtgtagtgggataatgaaaatttttctctacttctctacatttctttctgctttcaaattttcaggggaaaaaggctttttaacagtctaagttcaacctctttgattcttccacattgttctaaagctgcctcataccatgagggctcagagttgaactggcctcttgtaccctgccgtgctgacctcccacgatctttctgcttagggtctcctgacccatagcatgttgtgacaaatgccaggggagcagaaagaaggctggaggccatctgtccctgcagccccaaaggataaaggagagcaatgcctggcaaattgtccctactccagtggtacatattccagagttatctggcaggctattcaacatgaacccttcctcccacagaagtgatgatcataaaagcctaatgaattccctcctccggttttgtaacaagcattctactgtaatcctattcaaggaacaccgacatttttatttttatctttgatcagagtcaaccaataaggaaatggtagcctgtgtgccaatatccacccctgatgaataaccagccatgatcaatgcctcacacctgggtcccatcaggctcggattaggggactttcacaggtaagaatggtgagggccaaagatctgtagcaaatgaaggctgtcacatatgaaccagatgaaacaaaggttctttcctgcctttttgtgtcaccagtgggggagggcctttcccagtgattgaggaccccaagtcatgcaggctttgcgtcacctgctggtatcatgtgctctcagctcatgagcagctttctaaggctgacaaactgctcagcaatgacacacagcccacatgctacagtctcttttcctgcaggctgtaggaatgagaaagtgcaaggataaatgacactaaataatgcagaggtgaacaccactcatgcaagagcataacaaagtacatttgagagagctgcacagtggaggggggcatgtggaaaggttagcactccacactgggctccaaatcatagctcttaagcttaaagacagctcccgcattggtctccttcatgtctcaccagtccacctgcatctgacactgcctaatagagaaccacactccattcctgccactcacagaaaggtctccactgatgtccacacaaaggcttgactgggattttgccatacggtggctctgctttggagggctctctccagaacacaatgccaccaagagcagagacctccctctgtgttactccctctcacccagcgtggtgcaatgggaagaggagaggacccaggactacaggtagaaatgagagggaggcagttagatccaattaagcaagtcattttcatttaactggagaagagaccaacgtgggatgtgctgcctatgagataatgagttttccattactggaggtatacaagtctgggcgggtagccacctggcaggacgttctagaaggggtgcctgctgtgcctaagaccttgccctcagcaacccagagagctccttctacctcttagacccttggtgcctttgatttcactgcagtggcctgaagctgccttcttcactggtaacataaggctgacaacagtcccgctctgactaggatgttctatataataaatgactaccaggagaggcactggggaggaatacaggagccactcaatcctccactagagaatggagtgacgacgtgctctggaaaaagccaatgagactcaagataggcatgaggttacaaatctctccagattccacttctacccacatactcataaatgcacagggacgcaacccagcaggcagatagtcacaaaccaatactacctaacctttactgacttataatatcctacatgccttaactcattactttatttaatcctcaccatgaggcaaaggttgaaagggtttttttttttttttaatattttgtaaagaggtcttgctaaagtgaccgccccaccttggcctcctaaagtactgggattataagcattagccaccacacccggtctaggtcgaaacttataattctcactttctatacactggggtggggccgcccagagaagctaaatgacttgcccagacacacacacagcaagcagtggcacctggactagaattccattctgtctgacctctgaacccaagtgtttcaccaataagttataatgcagctactcagtaatgggatgaaaaggataaaatgaagaaccttgatatacagacagcctctaagtaatttgtttctacccattactgaagtatcttccatctgaattaaacctttgcaaagagaggccagccctctctagtgtgactttctctccctaacagtgcctaacttttggtgttgagacgaataccaggcaaaaagttggcagctggcttttagagttgaaaagaaccttaactttcatctgatgggaggcctcccagatgggctgtgcccagccactgcccacagtcacctcactgtacttgtgatagaccttagcagattctattcagtcttaaaaaatatatgacattatgagacaactaaaaattttgaacactagttggatacatgataggaaattacattttaaaagtacaatcacagtattgtgattgtttctaaaatgagtcattttcttttagagatacatattgaaatatatgctgaaataatatgatttgggggacttacttcaaaataatatgggcagggtatgcatattgacaaaatctaataggtcatgagttgataattgttgaagttctataaagggtttgtagaagttcattatactattctacttttgcatgtttaaaattttctataacacaaagtttaaaaagtaaatttgaagataaaattgacacattcaatattcttagagaaaagttaaacatagggcagagattataaatgtaatgaaagtataagtaagggaaagattcaaactcaataaacacatttgttgagtccccattatgtaggaggctctgtagtagcctctacttcctcatctataaaatggaagtgttaagaattctgctttgggccaggtgtggtggctcatgcctgtaaatcctagcactctgggaggccaagtcgggaggatcacttgaggtcaggagttcaagaccagcctggccaacatggtgaaacctcatctctactaaaaatacaaaaactagccaggtgtggtggcgggtgcctgtaatcccagctgcctgagaggctgaagcatgagaatcacttgaacccaggaggcggaggtcgcagtgagctgagatcacgcctctgcattccaggctgggcgacagagcaagactctatctcaaaaaaaaaaaaaaaaaaaaaaaaaaggaagaagagttctgctgcatagggttgttactcagatgagatgagcttatacgggtcaagcactgataagagtggctggcatatagcaagagtaatcaataattggtagctttatacaaccctatgcaataaatactattagaatcattttacagatgaggaagatgaggctcagaaaagtatgataacttgtccaaaaagtcatgctgccaatatgagggagaatttgaatttcagagtcagcactgcccccacccagctcagggatggactctggcatgccatagccaggagagagtcctgtgggtgcagagcatggagaagtcaggctttcagggaagaaatgagctgtgactcctgaacaaagagcaggaataaggtaagcctgaaagaatgaaggaagaaaagcactcaagaccctcagcaatgccattccgatgaagttcaaggcaaattcttttcctaattaaaggctggtctccacagctgtcattggggtgacctcgctaattcaaataaatagccacagggtttcaaagggaacagttttaactctgctttccataataaggattctggattacagcccaaagctttagctagttaagtgtgtgggtcagtctcataaattgttttcttggctggatcccaagaaagccagactgtcattcgagcaatgaggtgattggttttgcattcctacccaaaaaggaggcttctctatgatgcttgcaaatcatacttgtaagatttgtaccattgggattctcaatcttctgctaaaatctgttctagtgttttcttaggggaaactacacttctgaagatggctgtccagagatagcaccccagaacagagctactggagaccatttctccagtgaacaggtggaagggtcatctcagtaagaaaggcttctacgtttgctaactgccccttctctgagaactttggggaggggctactggccccctgaagttcctgttccaactcgaaattcttttccttacatgatggttggggcactactgctgagcaattccagagggctttgcaggaagtgggctttccagagggaagtgcaggaagaggactggtcgcagtccaaggatggcacttgtgtcctggctctgccctcggatgactatggacgactcccttatatgcttggcttccttgtttaaaatcttggttttaaacaagtttaaacttcatggcagcaggaaaacaaaacatatgtgaaaaagctagacaaaaagctgagaatcatcattacgctgactcccattaagccagaactagatcagatcttttagaatagggattccaagccacgaggagatatccacgggcagtctaagtcttccctgtgggtccctcacctgcccgtccctaaaggcagagtggaacaatggaaccagccaggcagtgagttggtcaggcctgggtttgatttctggctctgccacatttattatcttccaatgatccattcttagcaattttacagtggaaatggatacataagccctgtccatgcctcactaactcggctgactgaaaaacaaaaatccacagataacctatgaacctcattttgccttaaagagtttcagcctctaagccaggcgcagtggcatgcacctatagtccctgctactagggagggaaggtggaaggatcccttgaggccagaaggtcaagtccaacctggacaacacagcaagacctcatctctaaaatacaaaagtctcagccactttcccacaaaaacgtagcacaaaagagctgatgtgcatgaactttttatttgaatgttctgttctctctacttctctccattacaggggcttatgagaactaacagctcctaaaacgagaggcagaaagaaggcagaagatatggacaaaggagtctaaggaaaatttgtaatccagttcaccagcttataaaaaaccagcactagctgaaaacagcagacaaaagtaaggaccagacgaccctgatctgcctgacccaagatcagcatgttctttttcacaaggccacattgcaaggttccattaataaatagcagtaataaggatgggggccttggggtcaggcagacctgggctcaaactcctggctctgtaatgtattagccccaagatctcaggcaagttcattaatcctggctttaaccctcaatcatatcatatgtaaaatggggattaaaaactatatacttcgcaggattactatactaaccagaaaatcatatcaatttaaaggacatttataatactagttactaagtattaagatcttattatgggccgatatgtatgggccgatatgtacaccttcccttttaaatctcaaaacaaccctatgagggaggtattatgtcccccattttaaaaaatgaggctacttagtaggctcagagtaagtaatttgccccaaaagatacagtgttgggatgagaatgtgacttgggtttgtctgctccaaagactgttcttattgtcattacaatggtactataagcagtcacatcagcacggtagttagtatagaaaaggaagcagtcagaattccaggaaaggcttttgccagctttagtcgcgacagccctgggatgggccatcaccattccattttacagatgagaacttggggctcagagacatgaagactgttagaagtaaacaaaaagctgtttatcttttagagccctttatctatttcagtatttataaagtaattattataaagtaatatgatgcctggaatctgcttcaaaataatgcagagtgggaggggaggatgattagatgaaacaagattggattggccagatgcttagaagctgagtcatgggtacacagaggttcattacactgttctcccaattcatatctatgcttgaaattttctatgataagaaaaagcaaaaataaaaaaatacttcatctcctggagaaagcataaggcagaagcaggtctcaaactggggtatgttctgtccccaaattctgagtcctctccaatccactgtaacagtcactttaaaaaaccctttcttctttccatcttgatatgggtccaaagtgctgctaattagagctagggagttaggaaggcaaagcagtctctataggggtcagatagtggcagaccagcctgctgctggggtgcgacagagggctgaatcctgctgcctggagagtgcagaaaaggcctcagcaaggtaacaacacttgggtatggagagaatgtggatgatccaaaagagaatgtaggaatgtgaaggcaaaggagagaaggagcagccagtgcaaatgcatggaaaggggagcccgaaggctgagctgcctccagatctctcttggggattgctgctgcagcctcctcattgttatcacttcctccactctctctttccatagtctacactccacactgccccaggtggtctgcaccaaacagaaaatctgatctcatcttccccctaagtattaaaaacctcccagatctccccacttcacttcagataaggtctacactcctcaacctgatcctcagggtgactatctctaaccagccctgacttccacttcctaccccttgccagggccccacgtgaacatccagagcccaaggtctagctgccacaaacatacaggccccttttctccaatgttctctcttccttgcacatccctccccctccaggtaaactcctaccagagagcagctcagatgtcacctcctttgtgaaggcagtccttactctgcccctctcagtgcatgctgctacattatcagagcacccccacactgcacttgagggtcttcctctggatgagaaggtgggctctagggcagggagaggcagcagacaaggtgatcaatacaaggtgcttattaacactactagcgacataaataatgcagcccccggataggcaggcaggggttgtgcaagccatcatggtgcctggcacaaagtggctgccgtgagaggctgcctggtgagtggacaggtgaggacggcaggatgctgagcaaagggatgctgagcagagggctccttcctgaccttggctgaggcagccttgctgcggtgcccttcatgagtctgtaagctcacggctgcaggaggctaattcagtgcctaaaaatgctgtaacagtttctttgaaaggttccagacaaatggaaaatgacaccgacagcttgacgctcccttcacctccatggctgcaaacctaaagaatatttatgatccgtgggatcagagatttggtgtcttagaagcaaagaaaggtcacaagacaaactaacgcagaccatctgctcttgggtggggaaagagattcccatatttggagttattctccccaaagcaccaggcacctgcttctcttgtgaaaatctatgagctaacacaatgatttttatttaacatagtataaaaccaacgtctcctacaaggagaggtgaaaagctgaacacaaacatgccgactaacagggagctatggaagccttccggcggggaaacaggaggtccgcacttgtgctctccatattaaatgcttagcgacaaggcctaacagaggagaacaaatgctcccagagatgtctgcctgatggcaatggagaaaaactcatctggggctagtactagtggagctcccctcctcctccatttttcataggccggatgctcctgcaattcccaacaccgtactcctgacattgcagcagatgctgcccgcactgccgccgccacactaatccttcatcctccggggccaatggaaatgtaggatttcccattaatcagggccgtggacaccaaaatagctcatctgacctttgcaaataccaaagggtggatttaaagcagaaactggcaaaaggtaatgcaaaagtctttagctttcttttcagagatgattttatgcagtcattagctaagaaacagattgccagtaggaccaacaaggttaaaaattaggtggaaagagccaaatgtttcaccacacacacacatacacacacacacacacacacacactctctctctctctctctctcattccttgatgaattatttaacttacattaaaaatatatatatggctcagaaatctcttggcattggcactggattgaaaacagtgtcaaactgggaagtagctgttctctgagagaacacttatacatcaaaacaaacatggatttcaatgtgcaataccaggtggacttcatcagacaatacagaccacagatctgctattgatgaaaagatagaccctctcttagggagacccacattacataggatgaaacttcattaaacttccttatcacatacatacccatcttctctctatttacagcctatacatcttagttaatcattgatattttgtgagcaaaagtgaccttaatatttcacggagactttctctgcatagctataattcagcaccacataaaactggatcttaagtatcttaatgaaatgtaggactctttccatttaaaaaaagagaaaaagtaattatagaaaactggaagaaaaaagaagaaaagctagtcacataagtctgccaccaccctaattcaatcttttttctttttttattttttaaaaaagatgtctatttttgagacaaggtctcagtgtcacccaggctggagtgcagtggcacaatcatggctcactgcagtctcaacctcccgggctcaggtgatcctcccacctcagcctcatgagtagctgggactactggggtgcaccatcacgcctgcctggctaaatttttcatattttttggtaagacggggtttcatcatgttggagaccaggctggtctccaacccctgggctccagcaatctgcctgcctcagcctccgaaagtgctgggattataggaataaaccaccgcaccctgccgtaattcaattttgtataagagctttattgagatataatttacataccatgaaatctaccctcttgaagtgtacaattcagtggcattagtacatatattcacagagttgtgcaaccatcaccactatgtaactctagaatatattcatcatcctaaaaataaatcctgtacctgttagcagtcacttcccattccccctctcccagcctcctacaaccactaatctgccttttctctatatagatgtgtctattctgaacatttcttataaatgcaatcatacaatatatagctgtttgtgtctggcttctttcatgaaacataatatttttacccaattctattttttattagcactttgttaggtttctttcccatctcgattctgatatatttaaaacttaatcctttgctaacattataaagttaagtctgttttttgctaaaccacaagttactgaccctaagctaggctcatgggtgcagaggctgcaggaggcctgttttgctctctaaacatcagctcattatattggtctaagtattgatctaatttttttttttaagacagagtctcactctatcgcccaggctggagcgcaatggcacaatcttggctcactgcaacctctgcctcctgggttcaagccattctcctgcctcagcctcccaagcagctgggactacagggatgtgccaccacgcctggctaatttttgtatttttagtagaaatggagttttaccacgttggccaggctggtctcgagctcctgacctcaagtgatcagccctcctcagcctcccaaagtgctgggattacaggcgtacgccaccgtgccagcctaagtgttgatctaattttaacagaagtgcctcagggttaggaaagtactaactagttataccagccctcaggacaatcccacacagtaaatacaatcttcagcaaggaacaggaaagaacactagaactgggatttaaataggaagagctactaccatccagtgagcttttcagttttatacggtgggggggtctcactatattgcccatgctggtcttgaactcctgggctcaagtgatcctgctgcctcagcctcccaaagtgctgggattatagacatgagccaccgtgcccaggccagtgagctttctgttttgcaaatattgtaggctaaattgtgccatcctcaagttctcatgttgaagccctaagcaccagtacctcacaatatgactgattgaatttggagacagggtctttaaagaagtgattaagttaaaatggggccctaatccaatcatgcatgcacagaggaatgaccatgtgaggacacagcaagacagtagctgttggcaagccacggaaagaggcttctgaagaagccaaacctgcagcttgatcttggattttcagcctccagaactatgagaaaataagttcggttaagccttccagtctgtggtattttgttatggtagccctagcaaacgtctcatttaatgccccgacacatacttttaaaaataggacttctatcctcattttacagatgaggaagctcaggctcaaagaggttactggagctgggactcaaagtgaagtctgattttgaagattttgttctttccagaaagtacaacaagttgtattcatttttaatttcttttggtagcatgaggggtcacactgttaaaataaagaaaaatctttgttctatttttttttaaatatatactctttccagaatatacctggttacagtccaaattcagaatccactcatttcagaaatacttttgatggaggaaaagaaaattaatgagtcaagtgctttacatgcattatccaatttgaacattaaacaattctaagagatatatattagtcataattgaggaaactaaggctcagagacattaaatgactgtatcatgatacaatgtttgtctttcattaagttccttagtcaaatagtttcattttgaaagaccaagtgtactaaattctgtttatcaacctttcactgagacttgctgtactggataatcttgataccaagataaatacgccctagtccctaccttggagagagtgtcaagtacagctggggagggcaatagccccccagagctgctgctagcccatatggagcttctgtgcaatcaaaaaatgtgcccccttggccaggtgtggtggctcacacctgtaatcacagcactttgggaggccaaggcaggcagatcacttgaggtcaggtttgagaccagcttggccaacatggtgaaaccccgtctctactaaaaatacaaaacaaaaatcagccaggtatggtggtgcacgtctgtaatcccagctactcgggaggctaaggcaggagaatgacttgaacccgggaggtggaggttgcagtgagctgggaccatgccactgaactccagcctgggtgacagagtgagacttcacctcaaaaaaaaaaggtggccctttcttagagtgaaagcagccccagagcacagccttgctgagcagccctgtggctctgccttcagttcacaccccctcttgctaagagtgagatcagcggagtgcccagagcaaggcaggggtcctaggaagggcttgcttccccctatcaaccccacactctccacacccagcctccctcctattgcctgatggatcaaagacccccatgatctgtgctgaccctgtgaggggtggggggaaagagttggagtacagagccagggctgctcagagtaagtattgggcaaagccaaaaagttaagagtgccaagcaggggtcaaaatgccagaaggggccacatacagagtgactgtcccatagaccagagaatggggagctggagccatgaggtgaaagcaggtcagggacaccttaattgagtgttctcagggaccctccatgtgggtttcatgccatgcgtttctcacacaggagccttttaccccaaatatatttattcttgccacctgccattaagggtctccaccttcatcttttcccagtgctaggtgatgttctccaatggggaacagcagtgtggaactcgtgccaggaaaacccagctcaccatccacgacattactgaacatctagcacggcagagcatagagcatagggcccagtgcagacaatgccacatcacaaggcttcatctctgacaagagcctgtctcagcccccaaggaggcccaactgggtcaggagaataaatgttacaaagtgccccttccagcagctagagtcttacaggataaataccaccccactccgatgctacaatctgacctgtgccagggtgggtatatgaaaaaagttaacagggagtcatcagggcacctggggtgaagacagtggctctctggtcagaggacatatctcagtaagtgtggcatccaagcctcaccttgcaggagcagaatctcccacataagcgagaagcagatgagacagccatcctggggaaggaaggacagaagcaacggccagaaggctggtggtgtgtcccgaaaaggtgcacagtccagtggccagaaggcagaagagcactcctcagagagtggcctgcagatcaccagtgggcaagtttaggtgggccagggcaatgttataacactgaatctgttctctctctctattttttatttttattttttaaattttatttatttatttttttgagacagagtcttgctctgtcacccaggctagagtgcagtggcacaatctcaactcactgcaagctccgcctcccgggttcacaccattctcccgcctcagcctcccgagtagctgggactacaggcgcccaccaccatgcctggctaatttttttttgtattttagtagagatggggtttcaccatgtttctcgatctcctgacctcgtgatctgcccgcctcggcctcccaaagtgctgggattacaggtgtgagtcaccacaccaggcctatttttattttttgagatggcgtatcactctgtcgcccaggctggagtgcagtggtgcgctcttggctcactgcaacctccacctcctgggctcaaacaattcttgtgcctcagtcttccgagtagctgggattactggaatgcaccactatacccggctcctttttttgaatttttagtagagacagggttttaccaagttggccgcgcttgtctcgaactcctgacctaaagtgatctgcctgccttagcctcccaaaatgctggtattacaggcgtgagtcactatgcctagcctctcttttttttttttttagagacagggtcatgctatcttaccaaggccggcctcaagctcctgggcttaagtggcatggcactgcacctggtcgctgttccaatactttgtatgctcccattctaatgagagtgagtcttggcggggagccttaggcagacaacaggatcctgctagaagaatcttgctttgatttcaatgtatttatttattttaatttttatgttactttagattaatgccaagtgaaactacttttcaattgagagtgatagaagccttttaaaagaaaatgtgcccaagtaaaaaaagttagtcaatacacagaaaatctgtgacagcataggtggctcatagataagggaaaaccatgaaggtagtccccaggagaatggaaactgcaagatctgggaaaacctaggccagagccttggtgcagagggaaaagaaagatcagacactgcagtttcttctttctggtggcctatgggcagggaggacctaccaggaagggggtgctgtttcatcttccccactagggggaagatccctggcaggatgtctccagggatctacctggagccaacctaacaagccaggtaagggctttagtgtggggcagacctgttcaagttttggttctgctacctactccctgagaggcttctgggatgtcaatcagcctcatccataaatcctagatgataatacccactcccttgcggggctgcaaggaaaatgaccagcacccagtagacggcagttccctcgcccacccagccctttcctaactctggcagggaccagatctgagatccagtctctgagaacgttcataagatttagaggaaacagaatcatacttctctgttctgactagaattaaagaatatacaaaatgcctgatctcactttgtcttactgggttagagatgaaaaggaggaacatttagtacttgggtagacactgtagattctcaagcctcatgtgtcaccagtaaaatgcagggaatttgagtttgtgcataaaaagttgctgccctggagtggcaacagaaaaatttggtttcctcaggagtagcagacaggtaaggcaaataaataaaaaccatatgaaaattaactgaagaatggtgaccaaagggtttttagcaaaaaacctttcaagaaacgtaaaggtcttgcatagcctttttacagggcaaggggaggccaaggatgcaggaggaacgagtctgggcagctccaccagcaggcattctctacctctgcatttccatggggacgtggtgcttaggaaggaagttagccgaaggcaactttcatccacacatcttagaggtggttttccattagacaatgtggaccaacaaccaaatgccttttcccctcctcagatgtgtagaaattaaaagatgcccagtactgatgagagtgcaaggcaaacagtcactcgggctctgttggtgaggggctcatttagagggcaatttggcagtctccatcaaaatttccaatactcttatagtctgacatgagcattttgtccctaggaatctaaactacacaaatatagaaatgcacaaagatatgctgttccagtattacttataaggacaagaaagccactgcccaccaggaggaggatggctatataaactgtacatccattctgtggaatgcttgcacaatgagatagatctaattatgttgccatggaaaggtctccaaaatgtacaatgacatggcaaaacaaaagcgagctgtaaaatgaagcctacagtaggatcccatttatacaaaagaaacttcatggaacatgcgccacacactaagcagctgattacctctggggagcctagttgggctgagaaattaagggctcactctttatacagtaagtgcttctttattttctttttttttttttttttttttttttttttttttgagacaggatttcactctgttcccaggctggagtgcagtggtgtgatcttacctcactgcagcctcgaccttcccaggctcaagcaatcctcctgcctcagcctcctgaggagctgggaccacaggtgcgtgctgccacccctggctaagtttttaaatattctttgtagcaacaaggtcttactgtgttgcctaggctggtctcaaactcctgggctcaggagatcctccagcctcagcctcccaaagtgctgggattacaggtgtgagccaccacacccagcctatattttataatttttaaaaacaaaaatgggtctctgtgtcagtcccattcactgaagggcaaacaaacagctttaggatgcccagtatgcacaaaagaccaaagagaaggcagcctctggggtagaggaacactggagtaagaagcaacatggaatgctggtcctgctgcaggaaggccccttagccacctgaggcacacttcctcctccgctgccctgacagaacaggaaggttgaaaaggtgtatacacattctcaaaagcagcctgcccaccacaatagggctgcaatggggcttctgggacgccatgcccaacagactggtccccaccccttcatttgggaggctgaggtgggcagatcacttgaggccaggagtttgagaccgcctggccaacatggcgaaaccccatctctacaaaaaaaatacaaaaattagccaggcgtggtggtcacacctgtaatcccagctacttaggaggctgaggcaggagaactgcttgaactggggaggcagaggttgcagtgagccgaaatcttgtcactgcactccagcctgggcaacagagcgagactctgtctcaaaaaaatataaataaataaaggtaaatgttatgttatgtgtattttaccaccataaaaacaaaagactgcagagagtcattctggtccttgagcatgaattaatcaggaagcagcagtttggttgctgcagtattcctgtaaggtgctagagacaagcaggagtgccccggatcactttccccacctcaggaggacagagaaccactgtccctgcaaaaggcgtcaccaactgtttaagaggcagatcccaaatagggaccaccatgggggcagagccttaagcatcacctggcccctaacccaggaggaaacctgtgccccacagcatgcacatggatggggtgtagaaacagcccacagctgacctcactgacctgcccccaccagcccaacacacatgaagacacatgagtggggggagcacatagggtgtgtagtgggcctcactgggtttcaatcctgttggttgtgtgattctgagaaagtcacaacacaggtaaaaatgccatctcacaaagtcaagagggttaaatgagataaaatcttgaaagaacacagcacagtcccctgcacaagcaggtgctctatgcatgttcattgccttgcctcttcttccaagtcacacaaggatgccttcccttgtaccctgtacagttagccactctcaggacaggcataggacagggcaagcattgttcatctttgaattcaaaatcccaccggctcaacatagtgcattcaaatagtcagataattattaaatacatataagttataagtgccactgcagttcagaggcttctgggccagctttgtggcagtgggaagatctaggttaggtttcaaagggtatattggtctaaaccatgagcaagagagaagggatgctttgcagggccaaaggccatgctgagcacagaaaaggagggagtgggaacggcaaagtaagtagagaccttggtaagagaaaagacgggaagaagcccagtcagtgaaggccttgaacaccaggctacatttataaatcattctttttttttttttttttgtgatggagcttcgcttttgacacccaggctagagtgcaatggtgcaatcttggctcactgcaacctcagcctcccagattcaaatgattctcctgtctcagcctctctggtagctgggattacaggaacccaccaccatgtcctgctaatttttgtatttttagtagagacggggtttcgccatgttggccaggctagtctcgaactactgacctcagatgacccacccaccttggcctcccaaagtgctgggattacaagtgtgagccaccgcgcctggccctatttataaatcattctaaaggagatggggagttccagaaattttctggtagagttgtccaaagttttggaaggttccagagtgtagaaagggagggagaatatgaaggaggagaccagctaggtggtattgaactggtctaacttacagcctcaagcaatggtccaggcatgaccaagggctggactaagttagaggaggagaaaactaagagcaaacacatgctaaacacattatgaaaacaaacaaaaaactctcacacagatactacgctctaaggccaagagaggtcccagaacctccatggcagtgtggctcctccatccatttgctcagccccttcctgacctccgtttcttttgctgttgctcaccctagagcaatgtctttatgttcaaaaagcatttatggaattgaaatgattgcatctcatgggcaccttgtcagaaatgtgccatcacaagtgacattttcgggtgtcatagttagtctctcatctgctggtggatctgatttgcccagctgacaagtgagaagactgtgacaccaacaattatagaaacaaactcaacctagaatctggaaatcaagctgttctctccacctcttctatcatactcagcagacaatatggtggtcaccggcagagggccctcacttctcaaaccacagcagctagtgggaacggcaggaccccagaccacacaattcctttttttttttttttttttttttttgtttttgagacaagagacttgctctgtcgccaggctggagtacagtgacgacatctctgctcacctcaatctctgcctcccgggttcaagcgattctccagcctccatctcccacgtagctgggattacaggcacacgccaccaagcccagataaattttttgtatttttagcagagacagggtttcaccatattggccaggacagtcttgatctcctgacctcgtgatcctcctgcctcggactcccaaagtgctgggattacaggcataagccactgcgcccagcctcttctttgttgttttttaagagatggagtcttgctctgccacccaggctagagtgtgtccagaattggtgggttcttggtctcactgacttcaagaatgaagccatagaccctcgcagttagttttacagttcttaaaggcggcgtgtctggggtttgttccttctgatgttcagctgtgttctgagtttcttcctcctggtgggttcgtagtctcgctggcttcaagagtgaagctgcagaccttcgcggtgagtgttacagctcttaaggcagcgtgtctgaagttgttcgctcctaccgcctggaattgttcattcctcccaatgggttcgtggtctgcgccagcctcaagagaaaaactgcagacctttgcagccagtgttacagctcataaaagcagtggactcatggagtaagcagcaacatttgtttcaaagagcaaaagaacaaagcctcccccgcacgaaaaaggacccaagtgggttaccactactgcctctggccccacccacatcctgctgattggtccattttacagagaactgattggtctgttttacagagacctgattggcctattttgacagggtgctgattggtgcgtttacaatccctgagctagacacaaagattctccaagtccccaccagattaactagatacagagtgctgattggtgcatttacaaaccttgagctagacacagagtgctgattggtgtatttacaatcccttagctagacataaaggttctctaagtcctcactagactcagaaacccagctggcttcacccagtggatcccacacctgggtcacaggtggagctgcctgccagtccctggcagtgcgcctgcactcctcagcccttgggcggtcgatgggaccgggcgcagtggagcaggggtttgcgctccttggggaggttcgggccgcataggagcccacggcagggaggctcaggcatggtgagctgcaggtccagagtcctgccccgcagggagaccgctgagacccggcgagaattccagcacagcactggcgggccggcactgctgggggaatggcacaccctccgcagctgctggcctggatgctaagcccctcactgcccggggcctgcggtgctgggcccgctgagctcacgcccacccagaactcgcgctggcccgcaagcgccacgcgcagcccggttcccgcccgcgcctctccctccacatctccctgcaagctgagggaggcggctccggcctcggccagcccagggaggggttctcacagtgcagcggcgggctgaagggctcctcaagcacagccagagaaggcatcggggctgaggaggcgcctgagagcgagcaacggctgccagcacgctgtcacctctcaagagtacagtggcacaatcatagctcgctgcagtctccacctcctgggctcaagcaatcctcctgcctcagcctccaaagtagctaggactacagggagtagcactaccacacccagctaatttttaaattttttgtagaaacagggtcttgctatgttgcccaggctggcctcaaatttttggcctcaagcaatcctcctgccttggcctcccaaagtgctgggattacaggcatgagccaccactcccttatacagcctttcaaaatggcaggtagagaaaacaatgcatatgattcttcttcaaaatatcactgggattcaacacaaaagagcatatactgtatgactccactcatgaacttctagaagagataaaagatcagtggttccctctgcagtgtgttggaggagaggattaactgggaagggacctgagggagctttctggggtgaggttgacagtgcgtatcttgatggggtaaggtgacaacatgtaagcatgtgtcaaaattataacaaaatgtatgcattttactacaagtaaactacctcagtgaaaatcattagaaggcaaatatatatacatttacacaaaatatatataaagtataacatatttatataaaatatatataaaatatgtatatgtatatatttacctgtgtgcatgtatttacatgtgtgtatatacttacatatcacaggctatacacacacacacgtacacacacatatgattcataggtatgtacagtctcttatggaaagctgtaagtcttaagaaaaactaggccaggcgtggtggctcacgactgtaatcccaggccgaggtgggcggatcatgaggtccggagatcaagaccatcctggctaacacggtgaaaccccgtctctactaaaaatacaaaaaattagccgggcgtggtggtgggcgcctgtagtcctagctattcagcaggctgaggcaggagaatggtgtgaacccaggaggtggagcttgcagtaagtcgagattgtgccactgcactccagcctgggcaacagagcaagactctgtctcaaaaaaaaaaaaaagaaaagaaaaactaaaagccactttgatttgggccttaagctttaggtctgaaatgaacttggaaagcttgttcaacctctgttcttcaaaacaaacgaacgaacaaaccatgctcttcaaatgagtaactgacaggatgtgccccacccaaagtctcacagcaaatcagcagcagagcagtgaacagtcccagactttcccagtcctagcctgggattggtttctctggtctggaccagtgccagaaaaagtagataaaacagaagaccattggtgattttatgagctaatttcatttaaaccatcaaatctagagctaaatagtacccccaaccaagcccagtcaaaaacaggagactaactttcaaacaataaaatgtatttaccttcatgaggctgagttgaaaatttccactccattaaaatgacagacttactaccccatgcttaccctccctgcccatatacaaatatctaaatgactggcaagaggctgtgagctaaataggaagacatgtaagagtcataaaactgagtcactgtgggaccttggcaagtctcctactgtgatacagtaagaaatatatatttggtctttgtccaggttcctggcacacctcacccaaaacccctggaatctcctgagagataagtgtcttttgtatgctaatgagattggggctccctagccagaaagaccaaggtacatttcagtgttggaacttttagccgtaccctcatcccaccttacctccggaaaggggagagggactagaggttgagttattcaccaatggccagatttaatcactcatgcccacataatgaaacctccattaatacccctaaacgatggggttcaaagaacttccaagttgaacacataaaggtgctgggaggctggcacagaagttctctgccccttccccacaccttgcccgatgaatctcttccatttggctgttgctgagttatatcctttgtcacgaaaatgtaagtaaagtgttgtcctgaattttgtgagccattcaagcatatgatcaaacatggggaaggcatcacgggaatccccaatttatagccggtcatgggaagtacagatggtaaccaggaacttgtgactggcatgtgaagtgggggcagtcttgtgggactgagcccttaacctctggggtccgcaccagctccaggtagttagtgtcaaaactgaattcaattgtaggacatccatttgatatcagaaaaaagacaaaaacaacaaaaaaatccctgcacatttgctgtcagaaatgtcatacatcacagacaccctctctggccttgtttccacaacctgcaaaaattagagggttggaccaaataccactaagaccctttcaactagagtcttctgattctttgaattgctggtttaagaatttccacagttagcataggagactctcgctctctggaagccactagcaaattcagctttcaaaccccaagcaacatcatttctcaggcctcatttcctatttcgactaatgacgtgccagaaatctgtgtgatttctcctttgaggagcagcaaaaaaaactccacagtgtcctattacaggacccagttcttgtccccagctctcaaagacagcccaattctctgagatgaaagaatcagtctctctccattacactcaattttaaaccaaaacccgaaacagaatttttgacatgcctcccagactacaaggcttatgcttcattaatgattaaaagagcagctggtgatgtcttaaaagcaagttggtcagttagacaatttagcatgtgtttaaattccgtcttttcctccatccatcactgtagttctaaggcaaatccaaagagaaagtaaaatacacaggtcttccattactaagaagtgcctcagcgaggatataagaaagcacgtcctttgaggaaattctcagaaaacttactggtatgaagaggacacttgtacactgagttacaggaggaaaactgaaactgagtacataatttacaatactagtgtaggtctggatttaagacaactattactagatttttcagctaccaagttcattcaggcattcattcactcaatcccacaaacaatactaagctctctggtttagtggttaagagcaccagctctgctgcccacagacctgggttcaaatccctgctctgccactgataatccacagaccttgaggaaggtacttgacttttttttttctgagacagggtctctggctctgtcaaccagactggagtgtagtggcacaatctcagctcacagcaacctctgcctcctgggctcatgccatcttcccacctcagcctcctcccaagtagctgggactacaggtgcatgctaccatgcccagctaatttttgtatttttttgtagagacggaatttcgccatgttgcccagactggtctcgaactcctgagctcaagtgatcctcccatcttggctgcccagaatactagtattacaggcatgagccagtgagcccagctggttatttcacttctaagccttagtttcctagtcttttaaaatatgactgacaggcctgggtgacacagtgagagtctgtctccaaaaaaacaaaatagagtgataatacctgccttacagaattgttgtgggaattaaagaaaagaatgcatgtaaactacataacccagtacctagtaaggagagacattctgactgctactaatagcaccatccttatctttaaggcattgtgttagattcgactgaaagataagggcatgacacggaaggtacaagcaacaaaagaaaaagtagagaaactggacttaaaacttttgtgcattaaaggacactataaacagagtataaaaaggcaacccacagaatgggagaaaatatttgtaaatcacatgtctgataagagattaatattcagaatatatagagaactcctaaaaccgaacaacaacaaaacccaattaaaaactaggcacaggacttgaacagacatttctccaaagaagacatacaaatggccaacaagcacatgaaaagatgctcaatatcactaatcatgaagaaaatgcaaatcaaaaccacaatgagacaccaattcatacccattaggatggctactataaagaaaaaaaaatgaaccaagtgcaggggttcacgtcctataatcccaacactttgggaggccaagatgggaggatcacctgagtccgagaagtccaggagtttaagactagtctgggatacatggggaggccttgccactacaaaaaaataattttttttttaattggctgggaatggtggtgcatgcctatagtcctagctactcaggagactaaggcaggaggattgctcgagttcagaagttcgaggctgcagggagctatgatcatgccactgtactctagcctgggtgacagaaggagaacgtgtctcttaaaaaaaaattgaagggccgggcacggtggcttacacctgtaatcccagcactttgggaggccgaggcgggcgcatcatgaggtgaggagatcgagaccatcctggctaacacgatgaaaccctgtctctactaaaaatacaaaaattagccgggcgtggtggcaggcgcctgtagtcccagctactcgggaggctgaggcaggagaatggcgtgaacccgggaggtggagcttgcagtgagcagagattgcaccactgcactccagcctgggcaacagagcgagactccgtctcaaaaaaaaaaaaaaaatgaaaacagacatgaatagatatttgtacattcatgttcatagcagcattatttacaatagccaaaaagtggaagcaactcaggtgaccatcaatggaagaatgaataaacaaaatgtggtataaacacacaatggaatattatacagccttaacaaggaaggaaactttgacatgctccaatagagatgaaacttgaagacattatgcaagtgaagtcagtcatgaaaggataaatactatatgattccatttatatgaggtttcataataaatatatgattccacttatatgaggttcctagagtagtcaaattcatagtgacaaagtaaaatggtagttgccaggggctggggggaggagggaacagggagatattgtttcacttttgcaagactagaagagttgtagagatggccagtggtgattgttgcatatttttttttttttagggatggagtctcgctctgtcacccaggctggagtgcagtgacacgatcttagctcactgcaacctcctcctctagcaattctcctgcttcagcctcccgagtacctgggactacaggcgcacactgccatgcccggctaatttttttgtattttagtagagacagggtttcaccgtgttgcgcaggctggtctcgaactcctgagctcaggcaatccacccgcctcggcctcccaaagtgctaggattaaaggcatgagccaccgcgactggcccaatgtgaatatatttaatgccattgaactgcacacttaaaaccagttaaaattgtaaattttgggcctggtgtggtggctcacgcctgtaatctcagcactttgggaggctgaggtgggtggaatcacaaggtcaagagatcgagaccaacctggccaacatggtgaaaccctatctctactaaaattgcaaaaaatttagctgggcgtggtggcgcgtgcctgtagtcccagctacttgggaggctgaggcaggagaatcgcttgaacctgggaggcagaggttgcaatgagccgaggtcgtgccactgcactccagcctgggcaacagagtgagactccgtctcaaaaaaaaaaaaaatgtaaattttgttatatatattttatcaggttttttttttaaagaataaatagaaacaggtgccctcatggaacatttagtctaaatgatgtaaaacataacaacacattttgcttttacatactcacttgacccctgtaagatgtgatggtgcaagtgttcttgtactcccttcaccaccacagtttacagattgggaaactgagttttagcacagttactggactcatacaaaagcagtcgcatcgagaagcaaagatgggactgactccaatctagaacaaagagtgctaagtgctggaagagaacaaagagagagcaatgggaatccacattcctattggtggaactatgctatctttctggaattcctatttgaaatcagtttaggctccttcttgtccaaatggaaacagaccatgcttgatgtctaaaaggcaacatgaacaaagaaaaacgctggagctagagcccctggctggagaggaccgctccgcctacttgagccaggaaaccttgggcaagtttctgaacccctttaagtctctatttcttcacctgtaagatgaagataacagtgcttccagagaaaaaaatttttaaatgagataagtatgcacagcactcagcaaggtgcctggcacatggtgaggggccaggaaatgatggctagtaatgttagctttcaaagatgctaaataccagtgacaaaaagagtgaataactatgaagaatatactctaccatgtgctgtgaaggtcacaaggaaacagaaagtagaggagcctccagccttattcagaaggtatggcaataaacacatgataaataacacaagataaataacaacagtaacagtggagggaaggaatcaagaagtctatattagttgattgcaggacaccgtgctagggattttaagcacattatctcatttaatcgtcacaaaaacctggaggacaagtaatattttctgttttatagataagagaagagccaaatgaatgatatggatagcaagcactgtgagctcagagaagagattcatcaccataaacagggtggtctaggaaggctgcctgtaggaagaggtgagggctgatgggcatcaggcttgatgactgaatggagaaaagcagagaatctcctaaatcaagaaggttggagggagcaataacatatgtaaccaagtctgagactggttttaaaagtcgcctcttttaacctcaacaagccgggtcagcaggaaaagcctgaatgttatttatatcttctcagactactaggttagcgcaacatttctgggtgatttatctgctaggtcaagagcaacaacccctaactgatgctcctctgggcaatgtatttacaccgttttcctttcctaatatcccaagtaaataaataaataaatgtagattatacagaaatatgctaaaagttgttctacaatgtcgcctcttcaaggcatgagaagatgaagagtgaaatacaaaagtattccattatgtgaaataagcatctcaacaaatttgtgaggacgcacattgtggagatttttttctcctttgcattttttctatatctttcatattttctatcggttatacatcgttttgtaaaaagcacaatgaaaggctgggcacagtggctgaaacctataatcccagcactttgggaggctgaagcgggaggatcacttgagcccagtaggttgaggctttaactacgatcctgccactgcattccagcctgggcgacaaagcaagaccctgtctcaaaaaaaataaataaataaaaagcacaattatatgagaattttagatattccgatagcccactcctaagcagtggcattcctctagaaaagccctgggaataggtcagccctgtcattgcatatgataaacagagcaggaggaggagcaggctgacgccccacgtgactttcaatgtcaggggttttaagacctgtccaggcaattaaggacaaatgctctagactagacttcttctcaatgctccatcaacctgccttggcacctttctgtttctgagggggcttcatagacagtgtccctacccttgaccacagctgacatcccccctccttcccccaccttccctccccaattctgcacagaagcgggctttcatggtagagagaatgatcttctggtgactgctaaggagaaatctccctacctctgtaatgatattcatgcttccatgctattcccctccctagaagtctttcatgcctccccagtacctctaaaatatagttcaaactacttagccaacatatgaagcaagccctccacacaatcaggccttatcctcccttcccagtctcaccccctatcactcccctttgctaggcacacagaataaatcccatcacccccgcctacctcttaacatccagcatttgctcaagttgtctctgccaagaaaccaaacatccttttccatttctacacaaaccaaatcctccccattcatcaaagccctgctcagcagacaccacctcctcagagttttcctgagttcttccttccctcctacagtgttcctcctcactttactcttgctgagggcagcacagcgtgacaggataccagctctggagccagaatgctgcattcagactatagctccctcactgctagctgtgtgaccttaggtaggttccatactttctcattgtcttaatgtccccatctgaaaatggagataatcacagtaccttcctcacagcattgttgtgaggatcgaatgactgcaagatgtataaagtgcccacttcagtctctggcacataggaatacaacattaaactttttttaaaaccccaaaaacggggccgggcatggtggctcacacctgtaatcccagcactttgggtggccaaggtgggtggatcatctgaggtcaggagtttgagaccaacgtggtcaacatggtgaaaccctgtctctactaacaatacaaaaattagccgggcatgatggtgggcacctgtaatcccagctacttgggaggctgagacaggagaatcccttaaacccaggaggtggaggttgcagtgagctgagatcgcgccactgcactccaccctgggcaacagagcaagactccatctggaaaacaaagaaacaaaaaaacaaacaaaaaacccaaaagcctttagctattattattaccacctgaggtcacccctcccctcctacatttccttactgcatttatctatccaatcttgcaactactttctatctgatctaatttagatacctacacactgggaaattctcagcttgctatatacagatagtacagggccactgaataaataaatgaacaaattctaaataatcactcttttagcctgtccacaagaaaacctacatttaatgtttgaagaaagataaagaaaagattaaagaaacagaacttcaaagcaagaactacagttctcgaagtgaaccagtagcatcagcatcactagagaacttgacagaaatgtagaatgctacttcccaccccaaacctactgaaacagaaactctgagggtaggatccacttttaacaagccctccaggtgattcccttgcggctgaatcatgagctcagagtgcaaaaagtaacataaatggcagcacagaatgagcactggatcaggagtagattctaggcttcactctgccattgaccttgcacaagtctcttaacttctcagagcctcgatttccttatgtgatacagggatgataacacccaaatagttaaatgttgtgagggttaaatgagattctatgtacagagtttgcatatagttggtacttaataattataagttccttccagttatcttcctgtatatctcacaaggttgtgaacactaaataaaatgactgaagcaaaagggctttgcaaattcctgcccttgaacatcagactccaagttcttcagctttgggactcagactggcttccttgcttctcagcttgcagatggcctactgtgggacctcatcttgtgattgtgtgagtcagtactccttaataaactccccttaatataaacatctaccctattagttgtgtccctctagagaaccctaatacacatagcaatctgagggacaactaactattcttggtacaaatagccaggttaaacgtctaccattcacaggatattatgaagtagtttatgtccaacaccagtcagtctacaaacaaactctgcaacagaatatctgcttcttgcctgtttattaaagcagaacaatgaagagaatacatgcccaccacccccaatattctggtcagaattaactaactactcactgatctttgaatctaaactttactcttggaaaaggattttctgaaaactttttctagccaacacaaggaaaactgcaaactgctgcagacacaatggacctgacttggggaactccccatgtatgtcatccaactccaagcagttgtggaaggctgagattaagacagttaacattttgaagcttgttgcagaacagaaaattaagaaatacaagtaagtactctttcttccaccacacttcttagcctcgcacaccatggctaggctttctctctcttttttttcttttttggagatgcagtctcgctctgtcattcaggctggagtgcaaatggcacgatctcggctcactgcaacctccacctcccaggttcaagggattcttccgcctcagcctcccgagtagctgggattatacgcgcgtgccaccatgcccagctaatttttgtatttttagtagagatggggttttgccacattaaccaggctggtcttgaactcctaacctcaggtgatccacccgccacggcctcccaaagtgctggattacaggtgtgagccaccgcacctgtccagcttactctctccctaaaccatgctttctactcaggaactgccctccagaataaagggcgggatggatgcaagaaatgcacagttaactatgtcagactgtggtcttagccgctaacttgagatgaacacgctaagtgttctactaaatcgtaccaggttagaatgttcacatgaggcccacgcataagacagagtaagaattactccaccaaccgctcagacagacccaggacaccttttgtgagcatgttacctctaccgaaggctccctaagagcagcttgttaatatttgtatccccagagcctggcacaggcctggccccccacaggcactcataactgcctactgaagtgaacagacaaaattatttaggtgtaagccccatgcagctgttgagaagtattattttataagcagggaaaattaggtccaaagagactaaaagttgaagtcagttaaagaacgtagtctttgggccgggcgcaatggctcactcctataatcctagcactttgggaggccaaggagggtggatcacgaggtcaggagttcaagaccagcctggccaaggtagtgaaaccttgtctctactaaaaatacaaaaattagcccggcacggtgccaggcaccagtaatcccagctacttgggaggctgagacaggagaatcgcttgaacttgtggggcggaggttgcagtgagcttagatcgtgccactgcactccagcctgggtgatgaagtgagactccatctcaaaaaaaaaaaaaaaaagaatgtagtctttgatgccacccatccagagcagggcttcctcctgtgcccaaaccctacttgccaccactccccacagccacctctgctccattcagactggtactcacagatgtgcctgtgccccactccctgcctcattcagctgtccctaggcccaatgatattgttttctgcatgcagagttcctacccatcctttatgaacagccctcagactcaaagaagccagtccctgtcaccccagcctcttctgaattgtttctgactccttcagcacttacaatctacaccactcattgtttcatgcatctctgtcttctctcctgaaaccgtaaatccattgaggacagggatcagagagggaccagctctccttttttttttttttttggagacagagtctcactctgtcgcccaggctggagcgcggtggcacaatcttggctcactgcaacctctgcctcccaggttcaagcgattctcctgtctcagcctcctgaatagctgggattacaggcgcccaccaccacacccggctcatttttgtattactagtagagacagggtttcaccatattggtcaggctggcctccaactcctgacctcaagtgatccaccaccttggcctcccaaagtgctgggattacaggcatgagccaccacaaccagcctacagctgctgtttttaatcattagctttgtagttgttattttatttctgtattccccctccctcccaccaatcccccacccccgcacattcttttaaaagaatactaacaacactaaatatcaagaaagtcactttgacactttgtcacaacagtacggaatatacattagaacctaattctgtccattaatcatttacctgaactgaactgaaatgacctattggctacctggcagtggggagccatcatcatctttagtcaagcatcttatgagcaatggtgaatcctggggcctggtagggtattttccttcacaggtcacagacgggccagttgtttcacatatcctctccagatagaaaatccaaccctaacttaaatattctgttattaacagtggcagtttcaatttactgagcttctactatgttccagatactatgctaagtgttttcatacattatctcatttaaactacattactctgtgaataggaatctttctctctctctctctctctctcagaagactgacaaactaaacctcagaaagcaacacaattttctggggtcacacagccaagaaatgggggccaggtcaaaattcaacttaggtctccctgacagaagtatcaagctctttccacttgctatatatccctatatctcttatatttggttttttgttgttgttgttgttgtttgtttgttttttgagacagagtctcactctgtcgcccaggctggagtgcagtggcacaatctcagctcactgcaaactccgcctcccgggttcaagcaattctcctgcctcagcctcccgagtagctgggactacaggcgcatgccaccacgcctggctaattttctttttttttttggatttttagtagagacggggtttcaccgtgttagccaagatggtctcgatctcctgaccttgtgatccgcccgcctcaacctcccaaagtgctgagattacaggcgtgagccaccgcacccaaccacatttgtattttaaatcccctttaacttctacccctcatttactaccttgtcattttaaaggtgtagagcttcctattataaaggggacagaaaggaaaacaattctcgcaagttttctggctccctccattaactggctggaaattagtttttggagtgtggctgccatgcaagagcacctgaagagagtggaaaaggacatggggaagaagtaaggaagtgagaatccagagactctccagtgggcagcaagagacaagatgtcaaaaaggtgggaaaacactcttttggggtccctcatgcattataaaagatactacgccagaaagtaaagaaaggctcctaaatgctaattagccaacaggagagacctcaataagtttataggctccactaaaggctggaaagtaagctaaaatttcataagcaaagcagaaaataaacaaatcactactgctgaaatcaggcccataagaacaccaaagatcctggctcataaaagacgttttaccagtccttcaaccaaccaggaggaatccagttttcaaacaaactaatcagcattcttgactgatcaagtggcataagccactgccttgggtaaaaaggcaagttgctttcttagtaaggaagtcccatatggtggccatttcagtattcctttacctacactttgggctttccttatccatgattctggccatctctggtgtccccaggtgtccacatcccccctataggattaacagataatgctgagtaccattctctctacattgccaacaaaagatttcagctttggtaaacttaatatgaggtgggggaggaagcaacagtcaatgtgcagagtactacaaagaatatcaaaacttgagaactttaagggatctatcacatctcatctccaaacactttgacagacaggggaacttcaaaccagaaagggcacaaggtcatatggagtcactgacaaaaccactgctagagtccaggcttccatgattcccagtccagggctcttatcattaaataacacagcctcccttctttcctgggaggcactgcaggcatgccatccccctgccaagataatcaccctccaagagcccctcctcctatcccagtccctcctacagcacagctgagttgcagctcaaattagcaagtcccggagcagggggcatttctgggagggtgcccagtctgagggttgctggtaccgaagaggagggacaaagatggagaagaaggtgacatcccacaaagggtttgggagaactgggtccttggggcagtggcagtgagcctgctgggctggataaagacacatgcagtggcatctcccaaagcgcattggggaagcagaccagcagttggcaccacctctagcagcaaaaggaagggctgagccttgatgggcagggaagcctggggcatctccgagtccaagttgggcctcaggggtgcctcctggcagagtggcactggcgcgcccgtgaggtggcaccagtgcccgggaggaggcccgaggacacagatgccctgcctgcccgtgggatagcaccggcacccggcgaaggcccagcccccccgggaggtggcaccggcgcccggcgaacgcccgacgaccaggatgcccaacccgcccgtgaggtggcaccgacgcccagtgaaggccagacgaccaggatgcccagcccgcccgtgaggtggcacaagcgcccggcaaaggcccgacgaccaggatgcccagcccgctcgtggagtggcacccgcggctggcggaggcccagcccgctcgtgaagtggcaccggcgcccggcggaggcccgcggtcctcaccagccggatcagcggccgccgttgcccagcctcctgccccacacgcggccttaccgaggcactgccccactggtgtgctgaacgggttccccaggaggaactccatcttgggtggacaacacgcagcggcccgggccccctgtctgccacctaggcctccgctgtaacccgccggactcccgtcctgactgacacttgccccctccccactctctggaacgccgagcttagggcctttggccccgcccccttgccgcgtctctattgggggacacctacgaagcccgcctcctattggtcgttacacctctgtcagcaaagcccccacccaccccgcagcgtccgattgggcggaggagcgagctaggtcaccggagtccctgtcagccgtggcggcacctcccctggcccgcccccaaaggggaagctgcgcattttgattcctctgtatattggtcaatctaaaggattcttactattattggacaaaagacgagtcaatcacgcaaatggacggaacagaggtgaatctaggaatatccccgcccatagaaagtactgattggagaaacatttgttttctctacggctggttggtgtaaggagtgtttcaccacacggagatgtggtcacgtgacttgtcaactttcacccaggatgtctcccttctgacttccccttagcaaccaagtcgcggcgcttggttccccagcaaccgggagacgcgtctgctgcgtggaaccgccgagttcccagcgcttgagaaggtgagacctgggagctgaggctcccggaggacttgcagggacagatagtgcccgacgtaactctttcctgtgacctttttctcggagaacgccggcccggcccttctcatttataaaatgagcacgtaggtcctctcccagccactttacagtcgtgtgagacagccaagacactttagtcctgggcttgtcaagcttttgaataaaaaaaaaaaaaaatactaaggaagcatttcccgagggagcagggccagaatggatttttaaggggttccgtcttccagcctcctttcatagaaagagaggtacccggtccactgataacttttcccagaatttagccatcataactgacctcataactatcaaatgatttcatcttggtactgtatataccgctttggatgtgaatacggctactcaagttctgtatccgtctctgtcagtaactcattgtacgactttggacaagttcctttacctccctggagcctcaggttccctagctgggaaataagggcattaggactccctttttatggcctccggagcttacatgtacttaaataatgcatgtgcactgagcacacagtaagcattcagtaagtgattgattttattcttttttaagaaaaattttgttcattatttatttatttatttattttttatttttaaaaatggagacagggtcttcctatgttgcccgggctggtcttgaactcctgaactcaagcagtccttccacctcggcctcccaaagagctgggattacaggtgtaagccatctcgcccaaccaattttctccttattaattcatggccaatagggactatagttttcagatcctgttgacttcaggttatcatttcccaggaaaattctggatctgttatctgtgaggaggccactccgttgacagttgtgtaaaactctgctgctttccccagctccaacctctctggtcttcaacaacactatcatcaggcaagtca

SEQ ID NO: 628 - DNA, 157762 bp, Homo sapiens
  source 1..157762: mol_type = genomic DNA
tgatttacgacaatgttagcattgcagaagagtatgtgtgtgtgtgtaggggggtggtggtggtggtggtgatcttttcaataaagagtgctggtcagttggatatccagatgaaaaaaatggacacaggacaatggaaatttttttctgatgaggtgtggcattgtatttctagaaacaatgactgctgaaatttatttggaagttctttcctttctgagctataatttccctctgttgttcccaagccttcagtgaatgcctgtttcccacacctatcttttgttaatgcatctttcttatggtcctagttctaggccaggaccagcaaagcccaagcagcagttgagaactaagttctaagctagctcctgagtgggcaggaagctcaagtccttttctcccaatggcatcctatatcctggtgccacacaagaatgccattctggctgacttcgcctcctggcctctcccagtcagacatacctggagcagtcagtgagcagtgagattgctaggggagattgctagtgtagacaattcttgcatgaaaagggggatgggggtgcaacagtctagcaaccagcaagtgatatcaagaactagagggttttttttttttttttggttggggaggaaccccatttcacagtcacctttctgacccaccatcagagccatcccattccaatctcattttcttcctttcctcactccaagagaccgtgactgtgggcagatcctagacccctcttcagagcttcgggctctaggcattcctgcggccctcccctccctatcattaaaaggggtggggtcctgctgccttctccaagtggtttcagctctggatcctttgggggcaacggagcccacccgcctggagctccattactgatgctgcaagtttttgactcagtttccccatatgtgagtgagagtttaagcgcggcaatctccagggggggctgtcaagctgactcagatcagtgagacgaggagggggcgggcatgctaagagcatcctccggcgctggcctgcgtccccccaggtaaggcagcacccatctccaaagtggtcctgtcaccaccttcctcttccccccgcacccacgccgcggggcggggactagcgccgcctcaaatatttagggcaagggagtgtcccacttctggggaggggtgccgttcgggcttctctcctcaccgtgggtggcgaaaggcgggacggaaaagcgccgtctggacaggcgcgcccccctcagggatgcagggccgggcgggggacccggcggcggcccagcccggaggaaggacctccacgccccggcccgggcccccgggcccccggccctaggcagcgcccgaggccggaacaatagcgcgcgcgggcggggcgggggcgggggcggggcgctcctctgggcaccgcccccggcccgccccccgcgctcgcagtcccgctcgcacactggctcccacccgccgcccgcccaggcactgcccgcgggagccgccgccgccgccgccgcgcccgccatggacgtccgcctgtacccctcggcgcccgcggtgggcgcgcggcccggggccgagccggccggcctggcgcacctggactattaccacggcggcaaggtaggcgggggcgggcgggggtccccggcgggcggggccggagtcacctggcagctcgggactcaggcgctcccggggtcacacggggccgcgcacatcagccccgccgacgggcacgggcggctcacatcgatcccctcgcggccacgctcacgccctgagttgttgggatcgcgggcagaagtcatcccgacagccacccgtgcgacgacacagtggcccctcactcgcgtccccctgacagcctcgcagtcattcacaagccgtcacagtgacccacagccacacgcaggcggccaggcactgcttacacggtcccgccgtcccacgcaagtcaccctgacagtcacttatacacaacgacacgcaaccactcacccgcaaacagcctcaccgccacagacgagtcacccacagacgctccgatgccccacacaccgtgacatgcccccacccgctgtcacacccaggcacaacgggggacagtcacacaaagaagtcgcccgacagtcacactctcgcagccacaacgcctcacccaggcgcacgctgtcacacacagccacccccctggacggtgagcctcagacacagatcgtcctgacggccacacagtcacacgcggtcacacccagggacggccacacctcggtcatccacactcgcgcgtcgaggtttaacttctcagcgccgcagcacactaattgggcagtttactaattggccgtcactgcctggcggggcctcggattccgagtaggctgcggccaatcgaggcctgtgtcctcccgggagcggtgagccggcgtccctccaggctggggctgtagtgccggacaccctccctcctccatgtttccaggatctatccccccaccccagccaggtcccagctgcgctgcgccgggcgcattcccagtgatggaggcttgcgtgcctggaaccccgaacccgaggcgtcaggtcccactgccgggtctggcccagcctggatgggttgggtgcctctaagcagtccgcgtccccttcggtcgccggagagggaactttcaaacttagttaggaagccagactgtccgcgcgtccgccagtcggtgcgtcggtcccgggccggctggagccaagcgcgggttttcgtcactcggagcccggattgaacagcgcgcgtgggtttcccgcagccctggcgcagacgcgtgggctccgtggcgatgcggggtgagtgcgcgtccagtggctggatcggcgccccccagggtctctccccaacctcgcaggcttttcgtcaggcccctggtagtggggatgaggcaggagagaggcgtcccggcgcggatcccggggcctcccgggctgggcctccctgagtgcgccctcaggccccaggggagcggcttctggcaaagcctccctgcagttcgccaggggcagcaagcatccaggccactagggcctgcgcgatgtggggcggtggtgggcgacaagtgaggtctcgcgaagagtggcggtggttctcttttgtccagtgacctgcaaagttagaagccgatgaggggggatggtagcctcaggagaaggccgggagctgcctccagtctgatggaggaaaatagattaaaagtagcaagtggagttttcagggaggagaaggttgggtgtgggggcagctggtctgtcttctgcccttggctttgttatttttcaaaatgtgaagttggcgaggtaggtaccagcctctggtttgcgggtgtgggtgggctgggcatttgtgcctcaaagtctgagtgggtgggggtttagcctggagcgctccgtttgagggtggtgtttctataaatctcgccagggtggggctgtcccaaataggggcctttggaggcaggactcagccgaggcccctgctttattctgatgctctgtaaacctctgactcagcaccagaacctgtgcgaatctcgccgggaagggcccgtcagggagggaatgagaagccggcgattctggtttctttctgtgtgggatgtaggacccctggcccatagctgaggatgtgtccagagtggggcggggcagggatgggggtggggatgcagctgagccacttgataggtgaaaggaaggtctgactttgcacttggatgtgaaatctgctactcagtccttcaggctagagcagggtgaggcgggaggggagaggtcactgtattcatttaggggctagaggtcttttggtaagggattcccaagtgggcatggccttagtggtggtggttggggggtagggccaggctgtgatcaggaactccccttttctggctcaagaagtggatggggaggggttggggagggaaatgcccaagctccacctttacactagtcactatcaaagctggaggggaaacaggctcagggtgcagtagtgaccacacttggggcctgtaggcctggctgaatccagacattgtggggtggacacacccacacatggggggctctgtccgcagacaagaggctcgttgcacagggagccaggctttatatacataagggcaagcatttgcccaagtgatgcccgacacctatggggcagttgacctggaagggctcttggcgaccgtccccttggcgaccatccccttggcgactgtccccttagcgatcctctacacagagattcccagcctctttaaaccaaagtcacgaacattggttgttcttttggtatcttttgtttgagaaaatgcacactaatgaaaagctgttatggttttatttttgctttgaaatagatgtgtattttattaaacacaatattagcatgcattagaaaaatagcttaacaggtatgaagaagactcattactatttaatgtaataaaggtgctttttgagcatagggatttgtggccccatggctcccaggatctgtggctccatgctgggaaccattggtctcctccttctttgcattacagaaggggaaactgagtcacagaggagtgtaactcacagattacacagcaagtaaggaacaaagatgaggcctgagcccaggtttgactcccagcaggacacttgtttggcttttttgcaagtctctgtcatggttcaggggtttagagcctgtaacatctttcttagggtaactatgaactcctggttcagattttggcaaggcatcttaccaggctgggggacagctgggggatccctgctcaactatggcagactagtgtaaactagccatcagaactgggcaagcctgggttcaaatgtccatttgttgcttagtgacctagggcaaatgatttttagctcattttttactgagatgtgatttacatacaataacatgaagattttaagtgtacagttccatgagttttgataaatattaacactcatgtaaccagcatcccagtccagatagagaacatttccgtcatcccaggaagttccctcacatccctttatagacagcacgccttatccccacctccagaggcaactacttacctgatttctgttaccaatgctttctttaagttcaatttaggtatattaaccatgcttaagttctagaacttgatatgcagcataaacatttgtgtgtctgtcttctttttgctcaatgtaatgtcttcaacattcatccacgatgttgtatatatccatagtttgttccatttaattgctgagtaatattatattgtataaatataatacaattggtttatccattcacctgcaggtggacatttgggtttgtttccaagttggagctattataagtaaagctactgtgaacattcttatacaagtctttttgtgggcggggaaaatcatttaatatctctgagtcttggtgttctctcaaagacaacattgcctacctctgagtttcaggacggttaagtgaggtgatacaggttaggacagttattggcacataccagctactaattagataacaacaatatcaaccatctggggcccattccaggaagaggcttagcatctccgttccagcatccttcgtccctggactgaagggatgaaggccttcatcaaggccaacctgggtaccaccttccccatgtggtgcttcacagccagcaaacttctctttctttccaggcttccccaagaactgatactgcataggatgtggcatgttctgccatccatcattctaccaaaaatatttattgagcacttcttggtgctaggcactgtgcacagcaactgatgctgcagcagtgaacaaaagtcactcaaatcactgccctctggagcttatttatcagtgtgggaagtcataaatatatgggtgaaatatatggtatcatgattgatgggaatatgacttttggagaaaaatggaacaggaaagagagttgggagtcccaaggcctggggctggtttgtgattgttaaatagggaagttgaggaaggccttgtggtctagaatagtgtttctcaaatctatgtacacatgaagaatcagctggcaagattttttttaaattttattttaagttccaggatacatgtgcaggatgtgtatatttgttacataggtaaacgtctgccatggtggtttgctacacctatgaacccatcacctaggagttaagccccgcatgcattagctatttatcctgatgctctcactccctccctccccccggcacttgacaggccccggtgtgtgttgttcccctccctgtgtccatgtgttctcattgttcagctcccacttataagtgagaacatgcggtgtttggttttctgttcctatgttaatttgctgaggataatggcttccagctccatccatgccactgcaaaggacatgatcttgttcctttttatggctgcatagtattccatggtgtatgtgtaccacattctctttatccaggttaacactgatggacatttgggttgattccgtgtcttttgtctggcgagattgtaaaaacagattcttgggctccacccccagagattggattcagttggtctggcatggggtcctaggaatttgcatgtctaatgagctacccaggtgttgttactgctgatccaaggaccacactttgtgtagcagttgtttggttgtttgtgtacaggcttttgtgggctcctggcaggcaggaattctgcccagcacctggcatcgtgcctgactcataattgctcagtaaatatgtgctggtgggtgaaggattcaacttcccacccacacagctctgggcacagcatcttgtaaggatgagatctggacaagcttggttaatgaatgattgaggactctttttgacaaaaattcatgaagtggggttaaactatggacttgatctggacttgacctatgtgaggcctgcccggcatacttggtgggtgagattcccacagctcctttcttcaggggcacaggtggctgctaatgggtcccatggaaggtaccctgggatgggtgggcttagagctgagatggctggtcccagggaacgctagatggatgtctgcatctctgctaggaagctctcatttactttccatctaaacatgctccctatagctcctcccccaacctgtgctggaggctcctccaggaaggaccccaggatgtttgcatggcaggaccagcagcccaagcctggcactgctgcccccgatctgctgggtgaccttgagcctgtcagcacccttctttgggcctctgtttccctgtgtgcaaagggaaggcaaaccggtgaccatcagcctagagggatggtgtgggggtggaaatataatgaaataaaggctgggaatgtcatttctaactgtggagggtgcactgggagggaatgctggtgggaatggtgctttttgaggagatgggcctgctatccttcagaggacaggaaccactgtgtctgcctttacttttgtattcccagcgctagcctgacacatagatgctcagcaaatatttgctgaatgaatgaatgaatctagggcttggcagttgtaacctgtggcttgaggaacttagcatctgtttggctgttgtcatctgaagactttgtggggcacaaggagccagggcaggaccccgcagaggcacagagtctttggcggaccttccattcctagaggagcttccccaagtgggctcggaggacagagcctggcacacagagcagcctgtaggcgggaagaggagctgagcctgcatgaaggacaaggtcctgtgcctcccccttggtccagcagtccccctgctgtgtggctccttgccccatgtgattctgtagggcaatctattttgcttctctgatttcctagagttggtctcaggatatgaaggcatcatggattctggaacctggcagacttgggtttgaacactgccttcaccaccatcagggcaggcaagttatttaacctccctggactcagtctcctcatctgtaaaatggggacattgacatctcccctttggagcttgagggttggagaccatgtatgtgtagcacttggccccagcaggaaatgctttcattttcatccacaaagagcagcccaactgaaagttaaaatgcgagaggaacttgcttttctgtaccagctgctggaggatgctccacagctgccccgccatgttcttcttcttcttctttttttttttctagagacacagtcttgctctcttgcccaggatggagtgcagtggtacaatcatagctcagtgtagcctcaaactcctgggctcaaatgatccttctgctttggcctctcgaagcgctgggactgcaggcatgagccaccacttctggccctgggctgctggcagtcccaacgctggatgcttccatgtcttgatccctagacctgattttcctgagcctctgggttgaaggagcctcttattggagtgtccaggattatgaattgggagagagttgctcatttcctccaccttctgttaccttcttgaatctgtgcagcagagaaagtgggttttggaggcagagaaattggttcaaatcacagctgcccagtccactggcttgggcaggtgacctcatgcacatcacttagatgttcaggtctcagttttcttatctgtacaaggggacagaaatgcctgccttctattgttgctgcaaagatcagattaaagtaataggtatggaaattctgtctaatctagaatgatgtttcccagcctcggcgctattgacattttggacctaataacattgttgtgggagttgctgcatgcattgcggaatgtttagtcctatccctggcccctacctagtagatgccaagagcatcaccctgcccccagtcgtgacaacaaaaatgtctccagactttgcccctggttgagaaccagtgatgtgggaagaaagtttagcgcaggtaaactagaagatggtggtgaagcgaattgcagcaccacagcaggcaccgtgctttctggccagggcttcagtccactgtctcccttcagtaatcctgtatccacagggttgacagtcatcttatttacatggattcaaacctacaggatgatttttcagcatggtttgggagcaacagtaaaaacatatggtaagtgattattaacctaatgagttgtggtaaattgtaattttatatcttaatgaaatgatgttgtatgacacaggataatacattttgatcaatttccctgatatttaaaacttgctgccgtacagttgctaattctggtgcctgccaggatgagcaacctgattgtggtttttcaatatttaatggcctgtttactgctgggtttctcagatgttcaacaggtttttattgagtgcctactgggtgctggggattcagccctgtcctggaggctcagtaactccagaggaaagttttatttactgggtgaatggctatgtggatttgtaatcaattggcttaaaatgcagagtaataattaaatataaaattggctgagcagtgccaatgccgggagtgtgggaaggtttcacaatggcagtcttacaggaatgccaggtgggctgcctgggggcatgtagagtggtggggggtgttccaggcagagggagcagccattgtaggggtgctttggggatactgtcagcctaaggaggggaaacctgcctgcgtgggagttgggacaccagcagagatggttatgaagagccttgcaccccagcctgtggggctttaagtagaggactgtgcctggaaccaggggtacggtgcacaagtatggaatgcatcacattgctggattctgaccatcctcaacgactgtctcttggtcttctgctgatgggaaagtctaatgacttgcatttgatttcccccagtagcccatgatagatactctgcttctcaaactttagcccaccagaatcacctggagcacagttaaaacagactgctgtgttccactcccagaagttctgactcagcaggcctggggaggagctgaaagttagcactactagcaagtcgatggtgctgatggtgccagtctgggatccacacttagagaacctctggtctagactagaacgtggcaggattgtcctgccttaactgaggacagtagagatgtattgctggcctggggcatggagccccggtgtggacatggttaggtgtccttctcaagccccttggtgggttgtggggagagtcttcttcaccatggggaaagtctcacattgggttgcctggaaaaggactctgagatggagagttgctcgtggaaggtttatgtggggaagttctctgcggtgaggtgggcggaaggggtgcacctgcaggggacacaggaggaaacgtgcttgggccggggagaagctggcctggcctgacctgtggttctgaagaacgccatcccacagggagctgtggcgctaaggtggctctttagtgttgccccagatggaggtgaggggactgcccaagcctttgatttctgcatcatctggtcatttcagcataagtgagaggcctaaaaatgaacagcaggcagttcccttgggtgaaggagttcactgcagtagagggcagtcccattgaagggcgagctgcaagcccagccgctgatattcctgaggttgggggatgagcatatggaagagggctggagagtaccactgtgaccatctcagggagatttcccaggaaatcaagggccagcatgtggatgacttttagtgatggtcactcacttgctcaaggttcttctttgtctcatgaagtgagagagatgtgtcatctgctctgcgtaggaaaggcaggatagttactttttgggtccaagggaagacaaatggtaattaatggagtttttaggggctcaaagatgctcttagatgctccagggtgggattccagagtccttgcactgagctgtcacatatcttcctgtgtgttagggaggactccagatgggtctccaaggagcttctgggccatgcttaaggaggtcacctctgggcaagagccagggctttctctttgggctggagtcctgtctagttcaacaagaggccatctgccctgcccagcctcaatgcaggtcagtgtttctggctttgcctttcaccatcactgagctcccaggaagctcagaggcaaaggaggggtcacctgtagccataacataggctgctgtggtgtggctactgttcattaactcactcccaactgcacctcatttttctaccattttcctctttatcttgagtcctgccactgttttattttttaaaaattgattttgctctttgtaagacacacagaagtattttagaagaggaaagacacaagtgaagtccctctcactctctgtccctctcccttctccacacacagccctgtgtcccggggtgtccactgaaaagggagtggagggtgtacttcccatcaaaccctttcttcagttccttacttttaatacattcgttgtttttatttctggaatcatttttttattttcccagaattctgagtttcttgattgatctcatatcatcgtggtctattcttcttttatggatatgtgactatcttgaatctctttgaagatggtaattcgatttttaaaaaagtggtcttttgtttcctgcatttaactctgttttattggtgattcttctgttcacttttaggcctctcttttatgctgatattttctacaaatgcctggtgattctcggttgacatttaaatttgtaaatgggaggggggcatctagatctgttctgtggttgtgagtttcctcaacatgggtgaaagccgtgactgcgtgggtgggcagggtggatgttgagtagaaacgctctgtgtgtggtgtgtgagtgcagactctattgcggtgtgggatgagcctacgaagtccttgggggcctctttgtccctcgggtaggccagcagttacccccagggcgctggtgcactttttccagccttgtgctcacccgcaggagggagtctcccaggcagatttctcatttcaattagagaattcttctggttggcattagcctgggggcaaaaccaacaaacagcttctcccagggctttggacgggcacaggggtcccagcgcaggcttcctctctctgggaatgttctggggttcagttaggtgttgggtgccggttccttagtgctcacaggcttcgctgtcagtctgtttctttgacttcttagtttctagcagtctcataacgtttctgatcccagccttttcctattttcttatgtgccttaagttttcctaagaactatgctgggcacatttgtccccatttttttaggtgagaagactgaggtccagatgaatcaagtaacagaagggtggcagagggggctgttaggcagagctggaatttggcccgagcttgctctgcagctgtcagggtgccagggggagctcacttcctcctgctgcaggggtggaagagtgtatcactggctccttgtcctagagtgctttttacattacagctaattaaaatgtgcttatttcgaagctgggcctgatttgcaggaatgatttagaaacttgtcggaaatgaatcgactcagtagtagtataacccagggtcaatgccacgcatatattttattgtttcatcatgctgtgttttggcttgaactgaactttatgatgtggaagatggaccctgggccctttatgtctcatttattctgcaaatatttcctgtttacattatttaggaaggtctcccacccccactcccatgctttctctgttctctatgtccacctgagatggaagttcatttttatgcaaatccagatgttggatccaaatgtgactttgagtttgatggaagtgcctgggttcgtatcctgacacttataagctgtatgactttggacctgtcacttagcctctctgagtcgtggtttcctcacataatcacaattgcatctcaggttggtggttaggtctgtgggagagcaagtaagtcttcccctccctcatttcttcctccaggcactgtttaggtgaaccgagccctctgtagaacagcgagcatagaccctatactaggttttagtgcctttatacactgtacagtctaaggagcttttcagttcaggatcggtgtagcgcttgttcccattggggctgtctcttttctctcctgtatcagttcccttctttctcattgcaattcccacagggagtttttaaggaccaatgaaacattcagactcacaagatgaacacaggggacacttggcaccagtctcctcgaaagatttgggacacagcctgacacagcctgccagcaaggcacgtgagctgttctcttctgcacaagtaattcttgcaacagtctccgcagtggtccacgaaggtggccaggagctattctctttgctgccccctccctcccaggatctagttcaagtgcaaaggaatgagatacacaatgggtggctgtggaagccaccctggcttagaagccttattgtcccagctgccatatccattgtaacaattccgtaggcttagcttcaaggacccagggacatgtcaggtacaaatttctctgcatctaggaaaacccaaattatggcttctttttcagatatttataacttatttatagttcctcccagttcaaatgcaacttaccaatcaggggtcatttttaccataagcagagttgcctggtaacatagttaacgtcccactttcctcaggtttccaggggagttatgctccgcaattaacaaaggtgaaattctcttgcaacaaggaaaagggtttggttaaccctttcccccatattcatcatcctacttttttcccctgtgggctggtatttttggcatctcttttggaaggacgaatggagtcctcagaaatatattccacactgtgtacattttctgatgatctatataacacacacacacacacacacacacacacacacacacacacacacacacacacatcatgagatatgctttggagtcatactggcctgggatcaaatcttggctcttggctttgccacctatgaagagttaatttccttccttccttccttccttccttccttccttcctccttccttccttcctccccttcccttcccttccccttccttccttcctttcttccttccttcccttccccttccttcctttcttccttccttccttctttccttccatccttccttccttccctccttccttccctccctccctccctctttccctccctccctccctctatccctccttcatacagccatccaaggagcatgcactgcctgctgtatgcaaggctttgtggtaggtgccaggcaggaacaggtaattaagacatggtccttttccttgagaagcatgatcttattagagagacagaaataaacaatttcaaatgtgtgtggtaagcattatgttgaagtagcacaggggagtgtgggaccaccaggctaggctggggacagtcagaaaaggcttctcagaggaagggacacttgcctgtgcttgaaggtgagtagaacttggccaagtgaagaaggtagggaaaagcattccaggtagaaggaacaacatatgcaaaggcatagaaggtgctgagagtgtcaagatgtgaggctgaagaagggagccaggggcatttggaaagctgtttattatctctgacttcagttttctcgtatacaaaatgtgatgagcaatgcttacttgtttatgaaattaaatgaggtaatgatgtatgtttaagcacctggtgtagttagcttcaattccctttccaaatctgtctacagatgcctaagagccaggctttgattttaaatgagagaaggaataaaaagcactgaagggcctggccgcccacttgcacagtgcaggtttcctgcagctgctcttgtgttggtcgctttattgctgctttggacggagcactaaatgtctgcatgccgacctggattacgtccttcaggatcagcgaagcacatcattgtgttttcttaatggctcaatgctaacagcaagtcacggcctgtcgaggtgtcctgtgggacaatttttcatctgcctatggccatgcttctgtctgacgctctgtcaacacgccctgtcattcgcttctttgtcttgctttgccttccacatgccagctggggaaacttcgctttccatggagtttggagacatttactatccagtgaccaaaggtcaggatgagctgaggagccatggtggccaccatcaatgtctttatgatgcgtaaattggatcctgtctcttctccatacaaagctactcagtggggccgggcgtggtggctcacgcctgtaatcccagcactttgggaggcagaggcgggtggatcattcgaggtcaggagttcaagaccagcctggccaacatggtgaaaccctgtctctactaaaaatatgaaaaaaaaaaaaaaaaaacaacaacaaaaaaactgggcatggtggctcgtgcctgtaatctcaactacttgggaggctgaggcagaagaatcacttgaaccctggaggcagaggttgcagtgagctgagatcattccactgcactccaatctggcgacagagtgagaccctgtctcaaaaacaaacaaacaaacaaacaaacaaaaacagggaaaaaaacccccacaaagctgctcaatggctttctgttgtagcttgatgaactcttacaaacctaaatcacatcttcttaggtttctgcttaaagccttccagtgctttgccctggtgagtagataacatccaactcctttggcccataagtcctcacgtgagcttgcctctgcctgcatttccagcctctgttccaggaaccaggcttcatgctggggacatggtgatgagcaaagtcagagtcagtccccctcagtgactccattccagtcacctggccttcttgctatttctcagatccccccaccctgttcttttgcgcttgaggggctttgcacatgctgttccctttgcctggaatgttcttgccctcattctttacatggctggctcctgcccagcctctgacctcagcttcatcctcgtcttcccagagtctgacctgctcatctgtgcagttgtctttctttttgtctaccatagcctctgagtatttttattttttaattttttatttgtttctttatttttttgagatggagtctcgctctgttgcccaggttggagtgcagtggtgcgatctcagctcactgcaaccttcacctcccaggttcaagtgattctcctacctcagcctcccgagtagctgggattacaggaacacaccaccatgcccggctactttttgtatttttagtagagacggggtttcaccatgttggccaggatggtctcaatctcctgacatcatgatccacccgcctcggcctcccgaagcgctgggattacagacgtgagccaatgcgcccagctgcttctgagtatttttcttcgtggcatcatatatctgtgaaattacttggttgctcccccttcaggataataaactttaagaagcaataggctcatgcttattttgtttaccattgcatccccatggtgtctgacctatagtaggtgctcagtaaaaagttgttgaaagattgaatgaatgaatgaggcaggttatatttttcagagatgaccaccgtaacatagcccaggctgtgtttctaagaataatccactcaccctctctgggcctcacttaccctgtttatatgttgttgccaggaggattaaacacatatatgtgagggacacagtgtttggggcctgcaagtgttaatccatgtgaattctataattctccttgtagaaacatgccaggcccatctctagctgagtccaaggaggaaagttgagatatgactcaagagggatgatgtttgaaatccttgtcctcatggcttttaatcaatgcttgaccctttggggcaaggctggcagatgcagcccctgttttgtccccttcccatctccctgggaatgatgaccttgcctttgtcaggagggaggcgtcactcccagttgcttgggctggggtatctggggcacagttggcctggccttcggagataataaaatctctctccagcccatgggaatgtttctgttgagcaagcaggactttttggtggcttctctcctgaagttatcactcttcttttttaaaaaaattaaactgtaaattatgaacactatgttacctgccaaaaagtttaggaaatgagggaaatcacctgctatgatcccacggtgcagattcaagggcagtgtttgacactttgccttcttaatactcaaggcttgcaaactgcactgccctaccatggttttctggaagccccttacccatcgctttctttctacctattcctgatgtttattgtttatgtccttctctcctccctcctctatccccttcactagaatgtcggctttggaagtgtggggaatctctgtcgtttgctcatgggtggagccttcagagcgactctgactgccaggcctctggttttagtgtttcccacccaccaggcaaactcctacacatacatcttttatgttttttttctttaaaagacagaggcttgctctattgcccaggctggagtgtagtggtacaaacatggcttactgcagcctcgacctcctgggctcaagcgatcctcctgcctcagcctcctgagtagctgcgacttcaggcacaggccaccacacctgataatttttaaattttttgacaaggggtctcaccatgttgcccaggctggtctccaactcctgggctcaagcgatcctcccacctcggcctcccaagtagctgggactacaggcatgtgccaccacgcctcgctaaacatacacgtctgttaaatttctgctcaagcgccaccccctcctggaggctttcactgctatcctcccctgtgctcctgcccttcccatctggcatctctgacactgtgggctccctggggctgggctgcccaatgtccataggagacatgggcttcagaggccatgtctgggtgcttggacgttgacttaagagcagtgggagtcctggaggtgtgctgcgttttagaagaatctttgcagttgttctgtgggggaaaatactggacggggcaagagtggaggcaggagaatagttgggaggtggtgcctgtggctcaggggagaattgatgatggcttgtggccatgctatccagtaaggtagccagtagccgtgtgtggctcttttcattgaaaatacaggaaaataaaacaaaatttagttcattcacactagccatatttcgagtactcgctagccacatgtgggtattttagcccctattgggcagcgcagatacagacatttccatccctgcagaaagttctgttggtccactctggcttggactgtggtggtggagtggaaatgaagagaagtaagggcgtgggaggtaacaggagggaagatgtatgcagtttggggatgagttggatctggggtatggtggagagtggggtatcaaagaagactcaggaagtaaaatttctgggtcaaaaaagagtgagcatttttatggctcctgatttctgctgacctgtcattttccaaaagggtcatcaccactcaccagaagcatgagaaagtgcccattttatcctgccctcctggcacagcttattaccttcggaacacccttccattgtgtatatctcttgccaaatctgccttcatttagggtctagcatgtggaccctgaggtctttgtgatctcagggacttatatgtatattaatgcagatttcaataaaaagagttatgtttgccattgtggtacggtctgatgctgtttaaatgccttcggtaatatcttcaatcagacagcaaatagaaaacagggaagttagtaataaaaaatgaattaggacgattagcaaaaggtgaaccgcttccctcctcaggcgacaggcagagttgacggagctttgcagggtgcctcctgtccaaacacacgtctggattattgcagcctttggggctggccctggggtcttctctgcacataggacttggttattgcatttagttttgcaaaggtcatggacatcccctcggaggggctttgaggggctcacaccaggattgggggcccgcaccctgggttgggtgaaggcaaggggttggagaggggttgctgcccccccccgccatttctgactgagggcaggtcagcggcttcttcctctaagcagagacatcagtgggccttgcttccctccgtgcatcctccaggggcctggacaaatctcatctgcccctctttctaacaccttccccggggttgcttttggggaacatttcctggctgtctggtggcaggggcaaagtcccttcaagaaggaagtagaggcaaaggctataattgactaacgcagaccctggggcaccaaagagaaacagaattctagtgaccaagtaagttcactagagtttagagctcaacagaagggtgagaagcttctacctgggtaaagttgggcatcacactcacctggagcaaaggggaccacgttgacccccacaggtggtgaatgtctccgttacctagctcatttctgtagctgcaataccatcaggatttcaacatgtgaactttggggggaccacagcattcagaccatagcagataacatgcacattagcaatacgattgccatgacagagtggttggtgtggttaatacccaggttagttggctgatccccacagagggctggtgactgcctacctcaggccagcgcagctgaaactgaagagcacctgaatcacatgagggtcttgtgagaacgcagattctgattcagtaggtctggggcgggtccagagatctggcatttctaacaagggctagatgttgctgctcagggggccatgctttgagaatcaaggcgcttgtgttaggctgagattctagaagcagagcctgagacgagggttcttgtgcgagaggtttggtggggagtgattgcaggagaaagggggaaggccctggagcagggatgttacgagaaagcgggtcccacctggaggctggggtgttgcctctgcagcccacatgtcagttagtcattggccatgggctgcccaggacagggagaggtatcatgcctcctgtgccacctcccagcaggtatttctccagagggagcagctgtgggcagctgtgggcatcagcactcagcccccggggtgtgggtgcacagcctgaaagaggggttctgggtggaactcgtggtcatccagtcacagtatctttgcctgaggatggccttgaggagggtggactgggaggcaggactcgggctccgatgtggactctgctgtgtcccctggggtggccgcctctcctttctgggagctgcgtgtgctgcaggttcacaaggtgatggtttggttggtcctttgttctggtcctcaggctgtgatggaaggtgagggtggggatggggggagggtctgcacaggaagaggcagctcttatttcagagcccaaggtaaggagagagagagagagagagagagagagagagacctgccctcagtcagaaatggcagaaattaccactgaggcctgcagtgttcagggaggacttcctggcagagggaaactttaggtgggacctccaagaagcataggaggagaacatagaggaatggggaaaggcagaggcatttatttagcatccatcacaggatgggtatttcacttacgttatttatttaatcttcacaacaatcctatgtagaaagccacctccaccgtgcaggtgaggagctgaggcttgagaggtgagggcactgggccggggtcacagtgggattggaacccaagcctgcttgccaggaacatactttctcttcctaagggaccataccacatagggagggggtgtgtggaaaggggaggggagctggaggccttgggaattactgcagacctgactggatgggcagaggctcgtgtagagggggctgggaggacactgactaccaggctctggggtttggattctgtatggggagccatggagggctttggggcaggcgtgatggtgcagtgtcatgccctctgtcctgggaccctcttcccatcccaactctgagccagcttctccacattgtccaccctccctggattcagacttcatctgtgtgtgtgtttgtgtgtgtgtgtgtgtgtgtgtgtgtatgtgggggtgtgtgttggggtgggtggagtccatcctggaccctttctgtagaccattttttggacatttgggctactccagacaggggtcatctatttttgctgtaagtgttttgtggggcagaggccaggctaagctgccgacagcatccctggaatcatgctctgtccaggaatcttagtgacagctgggtgtctggccactgtggtgagccttccttctctacccttcccatgcagccagccccattctgtgcactggtgccttgggggtgaatggaggaaggagcacaaatcattatcccagatgaagacagattgggcttggggtgcgtcaggaccttgtggggaggattcggttctgaattattttcagtcttctttgctctgtccccacctctgtggcctgagttttctctcccagtcaaagctgggaacatccaactctttctccgccatcttccctgtaagcctctcctgcgtaggatgttatataagctatagtcacagcttggaacctggcacgatatgctgatatcaaacatggaaactgttagtgctaagctgctatgtggggataagatggtcgaatgaaaggtaccagtggagttggggcggggacgaggaggaactactgttcagtgaatacctactatgtgccaagcactgtgctaggtgtcttttgtgtactatcttatttaacccctacaacagccctgcaaattatgtattactattaaccatgtcacaaatgggatacctgaagctcagagaaacttgcccaaggtcacacagcctgtaagaagcagagtggatctgccgggtggggtggctcatgcttgtaatcccagcgctttgggaggccgaggtgggtggatcacctgaggtcaggagttcgagaccagcctggacaacatggtgaaaccctgtctctcctgaaaatacaaaaatttagctgggtgtggtggtgcatgcctgtaatcctagctactcaggaggctgaggcaggagaatcgcttgaacccaggaggaggaggttgcagtgagccaagatcatgccattgcactccagcctgggcaacaagagtgaaactccatcccaaaaaaaaaaaaaaaaaaaaaaaaagaagcagagtggatcgtgaacctgaatccgtctagctctgaagtcatggtctttattctgcaccacatattcttgcatgcacaggggtctttagcttccttttggagaccctttcatgtgttcctcattgagactcagaccatcaacctgagaagccttggcatggcgtcttgtcattcccactggtagagacaggcagacctacccacagaggtgagtgcccaccttgtcccagctcaaggcaatgtcataggccagcaggctcaaactcagggtctgaactttcctgatcccagctgcttcccagcccccaagaggctttgttgttttcaacttgatgttgagtagaccagacacatgttctttggctgtgagtattatcagcgcaaatgctcttatattagctcctgtattggttgtgtattgcttcacagtaagccaccagaattaatggcttaaaacaataaccatttcattaagctcatgattccatgggttggctgcaaggcttcctggctaggctggttgtctctacaggctctccctccctgcatcatggtcagttggccagtggcctgggagctgggtgatctaggacagcctccctcgtgcagctggcagtttgcatgctgctggctgggggctggctggttgttggctcagctccccacatgacctcctgtcctccagcaggctagctcgggcatgtgcacctggggctcccaggctccctggtgcatcaagagagagcaaaccccagtgtcctggtgcttttcaagcctctgcttgtgtcacctttgttgttgtcccatttgtcaaatacaagcatatggccaagcccatattcaaagcataaagagagagatgatgagaggagtggcagcctcacggtgccaagggcatgcatgcaggacaggaggctatgattaggattagtggtcatctttgtaatctacacagctgcccccactcttcagacagcagacattcatcgagtccctgctgtgtgccaggcactgtggcagggaacaagacaggccttgtgctgtgggcatgtggcctctagtctagccagtgaataatcacatgatgaaacataactaaagcagaacaggtgtgatgaaggagagccacacagggccgggagaccaggcaacagagagctctggggggactgtgggaagactaggagttgctagatgatgggcacgggggaagcattccaggcagggaagagcacgcgcgaaggtcctgtggaaggaggggcctggcacacttgaccactccaagaaagtgccagtttcttttaagtgtcggcaaccttgggctgggaaaggaacttctggttcgcaaaggtcccctgagcatttccgtgcgatgcagtctcaggagggaggtggctgataaccttcccacgggcagctcctgggttttgtgggctgggagaggagacccaggagggatttgagcattgggaagggtgttgtgggcacagagttcagtttgaggaagggggaggaggaagcaaggaaggggtcagttgcagaggatttgggagggactggtgtgtgagggaagtgaggggttttggactcagtcctgctggctggtggtctttgaaccatggactgagaatgaggtgatcagatgctggggaggcccgtagggagggtgcacagaggaatgacttggggaccctccccagccacaccccaggtctccaaccctaagccagcctctacgtccatgtgcagggctgggagggccatcctgggggcgaccgcagcatcgagtccccatgcggatctgcctgcccagtcccataagcagcctttgatgtccctggagccttcaacagcttctctgaaggcagatcaggggctgtggttttggaaaaggcctagcatcactgggtgccagaatcatgatcataaatgaaccagcacagattggaaaaatgggaggagtctggagtgtgggttccagcttcttgccaatgtctccatgaaaccgtgcaagtagctgcccagtcctgagcctccgttttctcacctggaaatagggccagctcccatcctccctgggtcaagtgaagaggaagctttgagggctgttaacctcagcaccttcagtctaatgcttgtggacaatgcgggcaccccagtgactgcacggtggagtgaagcaaactctcctcttaccaggacccatgtcagtggaactttcttccccagaataaatagaaaccatggcaaccgggatatgtcatgtggactggcagcctgtcccagtgatggccaggagaagggcctggcacagatgcgggccccactcacaactccacccgctgtgggatgacccaccgggaccccttagtcctcccctcctgcctgaggtaggactgagaagttcagtcctgaccttgggtttccattcaacctcagattttattattacttaatagtaaaatgcttgtcccggaaagcacgtctcaaatgagataagttgaagcaatcctggctcctgccccatgtcctgatgggtgcactaggagttatcaggatactgctggatgtgggcactgaaatggcagcaaatctactctgagagggagggcgctgagcctgtgagcgccttcagtcttcagatggccagcgaggtggtggcattaatatcccactttacggagagcctcagctctttacccgggattcacagctagtatttgacagagctggcattcgaacctgcatcttcatgccccaggacttatttccacactggctttagctgaactggaggcccagccaccacatggcaggcaaagagcatttgtcgctccctgcattgagggggtgactggtctgtgacgcctgcccccagcacaatgggtccaggggtggtagaggggcatctgaggcagctttgaaggccagggggtttttccagcccttgtgtttctgccttatggcctccttgtgcagctctggcaggagtggacaggtgccctcgcttctagaagcatggtcttgccttagctggaagttgagggtggagcttcctggagtcgctggcttcacctgcctctgcagccatccagacaggatgccaaagccccagcttgggtaacccccttgtctcttggagccccagtgtccttatctgtaaaacgaggagatcagtgactcagggacagcatagcatagtggtgctgtgcatgcacgttaggtcctaggaccttagttccaattctgtctgtgacaattactagctgtgcacatctagtaagttacttaacctctctatgcctcagtttcctcctctgtgaaatggggataataattgcatctacttaatttgtggtaaggtttgcatagggatttcatcatattgggactggaggagttgagtaagaagaaagggcaaaaccttggtctagcttccgccaatttctgggcaaaagctgaagttagcacaaagtcagcccaagcatgctccactgcactcaaagtacagttctgctgccagaacccagccagggggaggggatgggaactgtataagagtaggacggatgccaagactagtgaggcattttaacaacatgaggctggaatgtggcattgtgtaagtcccacaaatgaatatgtgcggtgaggttggaagataagcgagggttcatttggtgagaccattcgtatagtcagacatgagtttaaactgaccctgcagcttagaagctgtgtggcctcaagagcttacttaactcctctgagcctgttggcacacccaaaaagaaaaacaactcatttcattttgctagattgtctaaggattaaagagatgacagaaagtaccagtgcctggcacagagtagatgcttactaagcaccccaagagtgtcttatggggtgcttatgtgattcagtcggtgctgctgctgagtgaccacagggatatgctcagatatgctgcagaggtttccttctgtagttaaagggcagggagtcatgccctgtatgagacatttttccttagggaaaatgaagtcatgggacttgttcatctggatagtgcagtccaggggtgtatggggcttggggtactgcaggcaagtccctgggacagtgtggctgagggatggggcattgggtctaggagcttggtgcagagctcaatcaggaaccttgaaagaaaacacaatgtgaagactttctaccttgaggacagtggggccgtggaaggattttaaatggtgggacgtcactttttttttttgaagagttggtgtcctactctgtcacccagactgaagtgtagtggcatgattatagttcactgcagccttgaactcctgggctcaagtgatcctcctgcataaggctcctgagtagctgggattacaggcatgcgccaccatgcacagctagctttttttttttttgtctgtttttcagagataggtctcgatatgttgcccaggctgctcttgaattcctgatctcaagcaatcctcccatctcggcctcacaaattgctgggattacaggtgtgagcaatcgcacctggcaactttttttttttcccccaggaaaactctactaattggcctggaaaataaatgggggagggtgagctaaggggctgctatggggatccaggccagaagggtgagaggctgagccagagtcgcagggatggagggagaagaggtgactgcagaggatgaggcagctatcagggcaccctaggggtgtggtgtggcactttagtggtcagtgctttgcagagacgaggcacatgggattaagcaaacacaaaatcccagtgggcatgaggatgtagaccagggcaccttagaagcgcaaagcggctttagtcacttcccttgcgtgagatttgtttaatagaagcttgcagcttcgcagcacttaacaggtgctgacgggggcatcacaatattgtgaaattaagctgtgaagccgacttcattaccagcttacctggcgatgaagcagctgccttagttagcactgatggttgggcatgacagagctaaaattgaacttggcaattactgctcatgagaggttctcagtactgtgaaaggaaggttccatggaaatcaaccctggtaatcacagggtttaaaattagtcagttactattaaggttgctctgtcagcatatgcttcagggtgatgtgagggaagggggcgtggaagcttgggtttgggctgttgtgggttaccttatgttcacctgcactgcatttaagaaaaaaagttggttctaggacaaaggttcgagagtcccagggttaatatcatggtgcagggtggccatttggataataggtggttttaaagcctttttttttttttttgagtattttttgagacagaatttcgctcttgttgcccaggctggagtacaatggcgcgatctcggctcactgcaacctccgcctcccaggatcgagtgatgctcctgcctcagcctcctgagtagctgggatgacaggcatgtgccaccacacctggctaattttcgtatttttagtagagatggagtatcaccatgttagccaggctggtctcgaactcctgacgtcatgtgatccacccacttcggcctcccaaagtgttgggattacaggcgcgagccactgtacctggcctaaagccctgttctttttatttgcgtaagctcacaccctctcagctttggtgttttctattgacttaaggaggtttcctgactcgcttctggtctctccttgggatgttgcacaggaagagctcagctctctgtgggttcctccttgccctggaggaagcaatgatgtgataggatgggaggttcctgagtccttcacagaattgtttttggtaaaccttggctggaacatctcagcaatctcagaagatttgtccccgttttgtgaataaagacagcaaggggctgatatgggcttggttgctactgtagtgaaaatcaaaggacaaagcttataatgattcaattgtgagtttgcctgggctgtgtgcactgaccctcatcaataagaagatggaagttgactccttgctgtgagcctcaacttcctcatctgtaaaaggggaacttgttttgtgcaagtgtgaggattaaatgagatcatcaaagcacagtagaacctcagcatggtggctgttggctattaacagtgatatttatggaccagaccaggcactttccatcgatgacagctgctttgacaaaaaccccaccaggagggaactattattcccatcttaacattagtaaacagaggctcagagaggatctaagtttggccaagatctaagggtacagccaggattcaaacccaggcattctggccacagagcctggccattgtccctgcccctcaccctgggaacagctgaacaacaaggaaacaagtaacatcatagctcatgcctgtcatcccagcactttgggaggccaagacgggaggattgctttaggacaggagttagagaccagcctaggcaacatagtgagaccctatttttacaaaaaaagaaaaaacacaaaaattagcagggtgtggtggcacatgcctgtagtcccagctacttgggaggctgaagcaggaggatctctcgagcccaggaattcaaggctgcagtaagttatgctcatgccactgcactgcagcctgggcaatagagggagaccctgtctcaataaataaataaataagagaaaaaagaaaagaaaaaagaaaacaagcagcttggacaagctgcctccatggataagaagagagaagcattaaaactgaaagatcatttgcaaaaggctgcagcttctccacaggaagctgagtcatctctctttgttttgaaccgtaaccatcacgttgcctcagaatctgaaaaattaaaaaagaactaaaaaaatgctgagtttcttcatggtgcagaggcccttcttgtctccacaccagaaggagctgagcagaggggccacagcgatgggaccccctccaacccacattaaatacctccacctgaatatttattgcaacggcaagagcactgcacctggaatccggtctcacagccttggatttgccttgctaagcctcagtcatccaacctgccaggcaggtgcacctgccgcagccctgccttctctgtggagctggtgctctcggggtgcacgagtcagggttgggaggatgctttctcacctgtacacctgtggatggtacgatcacaaccccaaatgcctcctcccagtacatttggcagaattcagtccagaatctgggccttggcctagctcctataaactccctctcctacagatggtggggttcagtaagagtttgatgaagaatgcaggggctttctgtgcttgtctggtatcacccagcttctgccttttaaaatgcctcattccttatctgtgtactcaaactctgccccttctccaaatctcggcttgactgacacctttttcatgaggccctcgcccaggtgaccaccctgagacccttaccggtgagtactgtcttccttatactcacctctgtgtgtaagctgggcttcctgtgaggacaggggcagtgtcctgatcacacattgctccagcttctggaattatgacctatgtgaagtagggaggaggcagagggaacaacaaaaaaaaagttttttcagtgaatgaataaataaatgagacttgaaagatttttacctttgtgttttctctctgacaatcaattatacctttcacttatctcttgtttctgatgaacaagtttaacattcaacaagcaacatggcttcttgcaacatcaacaaatgcccatcattttcaaggccgcatagtattccattctatggagagccatgatttatccaatcctctatcgatggactttattgtcattttcatcttcttataaataatgatgcaataaatatccttgtccacacgaatttgagcctagaaagttctttatcatcctaagcttatataaatattcatggacaatttcctcttgcatgcttacagctttgtgtgtgtgtgtgtgtttctaaatctttggtatgtctgaaattttcatccatctttgtatcgcggtgcaaaatgcacctctcttttgccttgagacgagtgtcatgtgccttggatctatgggttgtgtgcactttctatctggtgagcacgcactgtgtgtcaggccccatgctgggagccaggacccagagatgagcaagacagacgatcctgaccatcaagaagctcagagcctagagaagaacaataaacacagaaacaaaagccatcaaacacatgaacagaaacgattggctgcaggagtgtgctatggacaaagtaactcaggtgcaggtgagattagaggagctctctttggggaagaaggagatctttgagcagagctggaaggatgagaagcagtcagttgtgtgaaggtcaggggaagagcattccaggcagagggaacagcatgaaaaaggtacagaggcagggaagcaagacttttttcctttctggagccttttgtaatcccccttccagcctctccctcctcctgcagacacgctgggcaccagccccctttatcacatgacatttgctattcccaggccgttctctctgtcacttactttagtattgttacaagtgttcaggaataggatgattccccagagcgcttcctgcttagtctggatcctctcagctctgtggtgcttcctcagcagcctttgctgctactgaaatgtccaaaaaattaaaattagtttaatagcacctggcatagtacatgacacttaataggtactattatccccattttacaggtgaagaaactgaggctcagggaagttagccattccagcaggcagagctaggattcgaacccagctctgtcttatttcaaagtctgccttcttcatggagccctagtttaactgcatttgtgcgaaagctaatgagagactgctggttaatccttagtgcccggggccagctttatcccaagcccgatcaaggcttgtggtgggtgaccttggcctttggcctgatggcttcagaagagtggaaaggaaccaggggaggttcttatttttttgttttaaattacaaatgtaatacacgcttgtggtaaagaaaaaaaaaatgaaacaagaaagaaaaaagcagccactgaaaatatctcctcctccctagtgtaactgctattaacagcctggtatcttttatagtgcatgttcaaacacatacatatacaccgttattgtttttataaaaatggaaccatgtccttgactttttcttgcaggcagttccaagtcagtacctacacaccttcctcattccatcagatgtatttcagtgtattcaaccagaccctggctttcgacatttagctgtctctaattctctctgtaacaagcaacatccttgggcatgcatccatgcactgagtacaggtatttctgcaggatggatgctcagaagtctaattgctgaatgaaagggcatgcaagtttcacacgttgacaggtgctgccaatttgccttccgaaggctcttccagtgcaacacccctcccaaggcagcgtgtgtgagtggggaaggctcttaagccacaaatgacgtggagccgcgctgtacttaggggctgcctccccttctgctccccgagacctggcgtggagaccgccaccaggagctccgaacacgcaggcccaaattggaataggagatggattttgataaaagaggttaaataacaggtttttccatttcaccttatacgaatgggatggggggtgggggtgctgggcctccagccaatagaggaccaagagttgtcaggagggcttataaagcttgctatttctggcattttttcctctttctctgctgattatgcagcagactcgcacagaggctgtcgcgggcgcgttctctcgctgcctgggcttctgtggaatgagactcgggctccttctacttgcaagacactggtgcattgcaggtgtgtttccgcagaaggtaagcagcgggtgcccaccgccccatgaggtggaggtggtcaggccgtcactgtgggctgaagataggtgatgtctggatgggggcaggcagggacctggactggtgcttgtcacattctggaatgaagatgctttagaggggccaggaggcctgcagttggcagctccttcttggagaggaattctggaggcggtttgggctgtcctctggagagcagggtcaggctgtggccttggtgcccaggctgctcaggatcattcattcattcattcattcattcagcacaccctgcagtaggcctggccaggtgtgggttggggggtctggctgattcagactggaaacaatgggagcagtaatggggatggcccatggcttgggaggagcccagaagatacctgggctgaagagtgacaggggccttccaagaaggcaagacgggtgagaagcagctgaggacgtcaccaggaatacccgagctgcctcttccactagattttggagtttggggaatcaataaaaatttcttgccaaatttggtgaatgccaccttttccgtttgtgaagtaaggacattaaaaaataaccagttgggatctctacgcagcatactttcgtagaagaaaggacagcaacaaatgagaaaggaactaaggggacttaaggggacacacatgcccttaataggtggcagagatttcaaatgcagaaacctaacgtgaaggggccatcccagctgtgcctgggaggctatcttggtgatgggagttgactgggttgggggcggggcttgttgctgttgatggtgctgcacccagcagaccaggagacccgacctcttctcgtgctctgatttatcacagccattgttgaaatctggcttcgtgcatgtgtgtcccagcaaaagaaggctcccgctcaggtccgctttccgtcatttggaacatcctgggtgaactgggagagaccaggaaacaccagcttctgtgcctcctgggatggtttctaccttctccactctgggtctgaaagcctgcaggaggcagtgggcccaggtctgcaagggaagcctgaggagccagctggacacagaatgtagctattgagcacctactgtatactggggtctgggttaggcactgcttacatatctcagctcggccataaatacaatctgtgacatagggcaagttccttgagctttctgtctcttcatccataaaatggggacactgatgcctactttcttgtgttgtcatgatggtgtgtgtgtataagcatttacgtgtgttcatgtgtatatgtatgcacacatgcacgtgtgcacacactcactgtgtaacactttgcctggtgtgtggaaggacctcattaatgaggcatgaatgaatgaacaaatgacctaggatgtcggctcagctcatgaggagggcgtggctcacaacggcatgtgtttgtgtgcatctgcgtgtgtgatccagggagctctcttcttgtgcttaagagtcagaggctctggaatctgtttggggagcttgaagggagggccatgtctgtttcacagccctggctaataggaattctttgtgtttctggtcacttccatgggttcttgactgggagaggagttcatggcaaggactgactggccattttgaaagagaaccaaccgatccttttagtgttaacacttcctgaacaacttactgaataccactcatcagcactgtgttggtggggccctgggaaaacagccagccagtaagccagcattcagattgctacctgacgacctgtttgctgagagcccctggctgggaaggaaggtgctggaaggaaaggagtcttggaagggagagagtggctgagaattgcaccctcacacatgctccctgcctggagaacagaagctgagccaggtttaagaccttgttttaagtcatggctctgttccttacttgctgtgtgacctcagcacagcaacctctctcagccagagcttccttgcctataaaatgacattgttaggaggactaagtgggataaaatatgtaaagcacattgttggtgctcagtaaataacgtgttctcctggggagggaagaggccctggagagcttttgcctgaaaccagggtgtctgttggcacacaggggcccaaacacggcaggcacctgctgaatatttatgggaagaatgaaggtgtgcagaagtgggaggcctgagttgcagggcttttcctgccattagtaattgctgtgtgatcttgggccagttcttcatcccctttggacctttgattccctcagaagaagagtccaggctgatggcttcaacccctgctcttccactgtgttggaaatcgggtatgtgggagcctccagagcaggatgagcttcatgtttgaaattaatttcctttcctcggccggcggcatccctgatgactctcccctgctgccttgtgcatgaacaaaccggtaattaatgaaattgggagcaggggcagggaggtgaggtttccagtggaggcagctgggggtctgctggggcagcctctgtgccacccactgggaggccccgggcctgctggggcagcctctgtgtcgcccactgggaggcccagggctgcccaggagctgccatctccgtctagccagggggcctggcagatgttcacacatctggacagttgcaaagggaggcatgaaatatagatggggagatggggagtgaattctccagcttctcctgggcctggggagccattttccagggagggcctcgggaacctcctgctgttgggtgttgagatgagcctggagtagcaattgggtggacctggatttttagcctttggtctcttgacttctagttgtgaggcttgaggcagctcacttaacctccctgggtcttccttgctgtgaagagcaattgaggccatgggagcagcagccccctagtcatggggggattggtgtagaaaggcagctttgatttgcatgtcctcaccccaggggctcatctagaaggaaacagttactctcaatggcccttttcctgattcacaccctccgtcacctcaaaatgccccttctactttgtgcccactttttatatatgactgtccacccctcggcttaggccacaaatgtgggatcatctttgacccctttctctgccttactccttgcatctaatccaactgcacttgctgctggctgtaccttcagggtgcaatgacttctccccgcttcactattacttgtcaccgggatgaccgcaggagcctcctcccaggcctccctgcctccacccttcctccttagtctgttcttctcgcagcagccagtgggatctctgagaaccacctgatgcgcacatccctccctgcttaaagcctgtggttggttgtcttttgtaatcagctggatctgttctgatacctttaatatacccacctgggggagctgggcacctgtctgatctcactttttgcagtccacaagctagcttctgcctcctgcagaatcactgtcctgccacctcctaaatccgcttccccactgaccaagctattgtgcctcttaattttactttcagacccctttgtctggaatggttcttttaccccttggactcctgtttattctcgcaggtgtggtcacgacatccacggctttccagaagccttctctgattgcccccaccgtctagccgcaactatcagagccagggtccccttccctgtgcccgcttctgtcattgtcctccccatcagtgctgtgatgctctgggaggacatcacccacgatgatgcacctttattctcacacgtgctgcaaggccagacagcacagaaatgttaatttaggcagtagatgcaaaagacctccctgcaaattaagggccttcagacctagacagactggaataggatcctcaaactggtttgatttggctgtgaccttggacaagccacctagcctctctgctttggagggtcacgaggattgacgagatgacatgtataacaaacatcctcctctttcccacttgctggattgtaagtgttcccaaagacacttggaatgtttaacccctcacatctgctctgagcagagcaaactcaacaatgcatagacgagcccaccacagaaccccaaacaggagcaaaaatagcagccatcggggcaacctgagatgcagaagccacaggaagaagccgcaggccaagcggatgtcagcggctctgaggccctgctgaggttcctcggatgtgctgagctctgcagccctctcgcctgccctcgctggctccccaaccacagcatcagataaggccggtggaaaaagtgctggcttcctctttctggggaggggtaatctcagtgccatctgtggggcacactccatccccagttgcctctctggcctcccctccccctccccactgcttgctctgcctgtctttgctggtctctttgctgaccgaggtcacacctgccggcagctcccatcttagggcctgtacacaggctgtcaggccctggaatgctctccccaacacatctacttggctcactccctcacctccttccagtcttggctccactatcacttcctcaatgaggcccaccttgactgctctgtttaaacgtgcataccctccatctcgacattcccaatacccctcacctgctcaactctttcttctttccatataccatgtaagtcacttattgactatgtgtattgttttctatctccaatgcaagagcgtaaactccaggggtctttgttcactgctgtctcccaggatcccagaatagtgcctggcacaaagtagatgcacagcaaatacttttttggtgcacggacgcatgagtacatgagtaagaaccagcccagcaatcagaagaggttcaggctagattttggggtgaggggggtttgtttctgggctccaggccccagggatgggctcacgtagtcattaaggattctggccccatgattgacctgcattggccagaagcccctgctgaccttcagggcgatagctgtctggggccagagaagggtctggaagcctgtggtccctttcaggagggacccttgcagtagttaagagtttggctttggaaccacattgctgtgggtttgaatcccagctccaccacttcctaggtagatagccttcacgtctacctctctgtatttgagttttctacctttaaaatagagtagataggccggtgtggtggctcacgcttgtaatcccagcactttgggaggctgaggcgggtggatcacttgagtaccggagttcaagaccagcctggctaacatggtgaaaccccgtatctactaaaaatacaaaaaaattagccgggtatggtggcgcacacctgtaatcccagctactcgggaggctgaggcaggagaatcactcgaacccaggaggcggaggttgcagtgagctgagatcgtgccattgcaatccagcctgggcaacaagaatgaaactccacctcaaaacaaaacaaaagtagtgaattctgaccttgcttgggtggtgattatgagggttacatgcaatatagataaagtgcctgactcatggtagatgatcagcaaatgaccattactattaaacttattatgtttttttttttttttttttttagagaaagggtcttgctctgtcaaccaggctctagtgcagtggcatgataatagctcactgtagcatcaaactcctgggctcaagcactcctcccatcttagcctcctgattaggactacaggtacataccaccatgcctggctaattaaaaataattttttgtttgtttgtttgtttgtttttttgaggccgagtctcgctctgtcgcccaagctggagtgcagtggtgcgatcttggctcactgcaacctccacctcctgggttcaagtgattctcctgtctcgccctcccgagtagctggaactacaggcatgtgccaccacacccggctgattttttttttaaaatttttagtagagatggggtttcaccatgttagccaggatggtctcgatctcctgacctcgtgatctgcccgccttggcctcccaaagtgctggaattacaggcgtgagccactgcgcccagcagaaaagtaatttttttttctaagagacggggccttgctatgttgctcaggctggtgtcaaactcctagtctcagctatcttctcgccctggccccccaaagctctggaattacaggtgtgagccactgcccctggcctaaacttaactgagcatgttagggttatgctgccgtaacaaccccctgaatctcagttgcttatcataaggaaggcttatttttgctcttactatgtgttccatgacaatcagcagagaagtaggggttgggctctgctccacagatcactcagggctgtaggttggtcaagtctcgaccatctggaaccttgctggtcctctagagaaagcctgcagatctcaagtttgcttttttatacttctacccagaggagacccacgttgtttctgctcataacccattggtctaaactagacgcatagctccaataaatggtaaggggagcctgaggtgtagtgtcctatgtgccaggaaggagaggagagccagatattggagagcagtagtaaagtctaccacagcaggtacttccctctctgccctctccagacatataggcagactgagacacagttagtcggtacttacgggactcactgtgggtggctgaataatgacccctaagtatagctaggtcctaatctttgaaacctgtgtatgttactttaaatggcaaaaggggctctgcagatgtgattaagggtcttgggatggggagagtatcatgggttgtctgggtgggccctataggatcacagtggtccttataagtgaggaggggttgcagaatcaggagaaggtgatgtgaggatggaagcagagactggggtgacggctatgaagatggaggaagggaccacaagctaaggaacacaagcagccactagacacagggaaaggcaaggaaatggattttctcctagagcctacagaccagccagccctgatgacaccttggttttagcccagtgaggctgattttagacttcgggctttccagaactgtaagagaatatgttgttttaagtcacctgtttatggtgatttgtgacaacagccctaggaaactaatatatcaccttcagtcagaaaatcatttgagacccagtgcatagaagccgcctctgtctgctcagacagaactgaccccttcctcctgtctgttgtggcgccccttgtacctgtctgtcatcacgttcatgcacaggcagaggtgtctcttaacatagtccttccactcccaacccgcatgctccaacatgtatgcccacactctcagccactctttgagcctctcattgcttgggctgatccgggttggtgtgtgtccacgtctgtaggaatgcagggcaggctggtggcaaggtcagtgtaaaggacttgtctctggggaaagggccctggcatgccccaggagtggctcagttggcgggagagtagaggccctgtggaagatggtgggagggtgaaggatggggctggagaaatcagcagggaccaggtcaagcaggaccttaggaccaagagaaagaggtggatctttgttttgaggacagagaggagcctagtaggattttgagcaggggggcgactatggatgactgatgactgggttctcctggtttgcgactaggttagaagactgtctttgtcctcccatcttctggaagtcaactctatgccagacactcctgagctatgcttttcacaggatttctcatgcatccattttatagaggagaaagctgagactcaaagaatggaacctcatggaatccatcctccacgtggctagctgagtcatcttttaaactataaattaaagcatgttactcccctgcaagaactctccaagggcttcccatctgggatgaaatccaagtgccttatggtggccctaggaccccaaatcacgtccttgcctcgcccctctgcctactgtgtcctgcctgttattccccctgcatgcgagagcttctacttgtggacctcagggactttgcattgctgctccctctgccttaaatgctcccacccactacttgttgcctgacagcctccttctctctcttctgggctccctcagtttaattgctgcctctacagagagaccctgtctccacacttcctgtgtttgctgcacagcacttagcacaatgcaacgtgtgaccacctttgtgtgtttgcttgtttgttgcctgcctcctgcagtggactctgaggcctgcaggggctgggactgtgtctaccttgcttctcgttgtgtcccagcccccaggagctggtatgaagggggcactcagcgaacaaacctctgcggaaagatgaaggatgggtcctgtgtgcagagggagctctggacctttgagggtggctggaggctcctggacctgccttggaggacagacaccaggcaggggccagctgaggaggagtgccagtgatttctctgggcacctgggcagccccattcctattgcacctggccttgacccactccctgtgctgtctacattctctgtcacattaaatgctctgcctgccatttcagcctctgggaggatccacgagggtgtggggagagacgtcagacctgggtttggatcccagctcagccacttaatagctatgagaccttgcacaattccctttaactttccaagcctcagtttcttcctatgtaaaatgggcatacagagggacagccttctagcacgtgactcctggtgcttgattcgcttgaaactgccttatctacaatccaaaaagccctgcgacgagaagttgttttgtcaatatgctgcaaactcatttggcccccaaaatctgacctgagctgacgcgaggctctttgtaatctttactcaccccacttgtgtgaatattcatatgttccactgcagaaatatgaatgtgttccattgcaggtgttgcctgaggctccactgaagctatggcataatttgcagaatttgcacttcattacttttctgaaattcaaacaaattctgaaactgcacgagttctggctgagagctgtggatctgtgcatgtgagtagctgctgaaaaccctcctgggtcacaggagggcccatgggggcctctggcagccatcgcagagcctgaaacccgttgtttccccttggctggcttctggtttcttggcagccagtgtcttcttagccacctggggttatgttgggttttgctggttcaggggcaggggttaaagcttagggcagggtgagccgaggtactcagacatttctgatgtgaatttaaaaggagaatttttttttaatgaatcatcagaagaaagaaatcagaaggaagtgtgtgaccaaggagaggaaattagggtttgcaaattgcatgagtcaccccctttctgactcctgggtgatcccttgcccttggcacttttcactcatctctgagactctcaaggccgtattctgcataacatgctggggctgtcatggttttattctggctccaaacctgcttctcattctagccatcagtataaatttctagttttgaatcactgccacgctgttttacttattattgtgttagccagtgtttcttccctgcccaagccctgctcagactcccgtttccccatcttagttagcatctacaacccattctccacccagaagccagaggccagtttctgaagtgcagcccacattccgggtttcagtctcatctccccagtgtggcccttgaagctcccttgtgataaggccctgcttgcctttctgtcttatcttgcaccgccttactattccatgaatgggcccttccctccagctcccaggctttggcaaatgctgttcccactggcctctgccctcgcctggctagttgtgtgcatgctgcgggtagatctgcttagaagccacctcttccgtgaagtctttttacaaggcccttgtctaggccccacgaacctggcttcccatctacttatcacccacccatattctgattcctggtcctgtccccttccctagaccatgagctccgggacaaagactgtgtgtccaccaggtgcagtggctcaggcctgtaatcagtcctagcactttgggaggctgaggtgggtggatcacctgaggtcaggagttcgagaccagcctggccaacatgatgaaaccccatctctactaaagatacaaaaattagttgggcatggtggcgcatgcctgtaattccagctactcaggaggctgaggcaggagaatcgcttgaacccaggaggccgaggttgcagtgagctgagatcatgccactgcactccagcctgggtgagagtaaggttctatctttaaaaaaaaaaaaaaaaaaaaaagactgttttctgtatatcactttaccatccccagcactcagagtaaaaggctgttttaagcaagactgttttaagcccttgagtgctcgtcccctgcctctggctagctgtgtctgcctaagagtggccaccatattgtcttccattaggctggaacccgtttcccatgtccgcagtggtgtgaaatatcccagttgcattgcagtaagtttattttatgtgcatttccccacttgccattgaatcaggtgtcccttttttcccttccatatttgtttcttaagatatcgcctcttgtgtgacttttgtttgaatcccatgtctttttgtctgttggcatcttgctttctgtttaatgtgactgagccatttctaccttgtatatattaactgtcttatagttggtgctgatattttcttagtctgatgtccttttcattttggttttattatgttttcttccacagaagatattaatgcatatatatttgaatctgtcaatctctcttcctctgtgattgcttcgagggctgaagaagttatcctgctccacagatctgataaacattctgttctgttttctgattgtttccctgtaacatgactttttatgtttaactctttaatccattcggagtgcatgcattttggttggtgtcttgcagtgggtatctagttcactgttcctaaatagggacaggataaccctcttgtccccattctgtttattatataattagcccttgtctctttgtttgcaaaaggggagacaaaatatagtagctgttataagcgtgagctttagcagaattaagattttggctttgccactttctgtgtgagctatgagcacgttgcttaaattgggcttgttttttcctctgtaaaactggatgatatcttcctcctaggaccgttgtcaagattgagcagaagatcatgtgcaaagcacatcacatgttacctggcataaagtaaatgccctcttttttttttttttttttttggcttaaacaaatatttattttctcacagggctagaggtcagaagtatgagatcaaggtgttggcagggttgattccatctgaggcctctgtattagtttgttcttacacttctataaagacatacctgagactgggtaatttatgaagaggtttatttggctcacgattctgtgagctgtacaagcttctgcttctggggaggtctcagaaaacttacaaccgtggcagaaggtgaaagggtggcaggtacacttcacatggccagcaggagagacagagcaagtggggaagcgttacacactttcaaacaaccagatctcatgagaactcactatcacgagaacagcaagggggatatccgcccccaagatccaattacctcaccatgtccctcctccaaaattgggcattacaattcgacatgagacttgggtggggacatagagctaaatcatatcagcctctctcctaggcttgcaggtggacagcttccccttgtgtctttacgtggtcttccctctgaaatgccctccttaatcttgatacgtttccatacctagttgggtccaacattgtacttttccttctgtttcattgattttagaattcttgttttctgttactgccacactgctttaattgtggcttcacggaatgtttcactctctggccagattgggcatccttccattactctttctttaagaatattgctttaaacacgcacctgttttctttagtggatgttgattttctctctcacattctgtactgtagcctacctcagtgacttctagacaccccttcttccccttccccagcacacataccggttttcccccaacctggctgcccagcctttgctcactctggacccactacctcacaggtatgtaccaactgctctcacctggcctatctccaccttagtgctttatcacccccctccaggtgccattatgcagatacccattttccctatggacctgagcttccctgggaattggttctaggtccctagtgcccctctgcacctggcatatggccaggtacattgtaggtgctgaggtcagggcttggggaagacaggaatgttcaccgtgcccttgggcttttgacagtaactgggctaaatctggcttcttctggaggtgcaggcttacaggactcaacaatttggtggttgtaaccctggacatgctcttgccaataacggtgggccatccatcagccctggccttggtttccccagtgggatttgcagaagccagaggattaaagccctcccagccctgaggcctcattatttatcttagtgggtccacagtgaagatgaattagaataactcattggcacatgccatgccttggagtgcagttttctgttttctgggagagaaaaggcctcttaggacagagccccccactgccctcctgggtctccaggagacagcccagatctgggtcagaagggttcaatagtcaagaacagaggggtggctctctgcctgggaaggcaactggggtgaaagcggggagctggcctttctctgcatactgctaggtagcatgcaaaaccctgcctgttccattcctgttctccaggggaggaatctgaggacgagaggggtaagatccctgcccactgccatgcagcagcttagtgcagagcctggacttgaacctagatctgcctgcttccagagctgtgctgcaccagtgttctcgcagctcccagtccaaaggccgacgttgagacagcgcttaaaaatatatcagcagtgtttacaaataccatttcctgtgttatctggtactgacagaaggaagtgaacctggcactttgtctgtgttaggtttggggttagaggcataagtgccaagttcagatgacctagaaaaacctttctaggtcaaattacaatttcaaagatttcttttcttcttctttttgaaccgctccaagatcgaacgctgtcgttgacatatttcccttccgacaacacgagccttttgtggcatgattgagggcttgttttgtagtgctggggagaaaatatcttccacatcatctgctcattgtctcagtcacactcgttccccccacaccacagtgcaacccgacgtacgctcatgcggcttttagttaattgcctttggtaagaatcagttttgggacttgttcccaactgcttggatgatagataattgtcaaatacaaatattggcagcgcagggcaacctgaggctctagactgctgactgcatcccagcctctagggagagctgggagctggccagctccatgttatgggaggtaacggggcaagacctggcaggagtacagccttctcattagagtgtaggctctggagttgaacttcctgggtttgaatcttcattccaccccttcctagctgtgtggccttgggcaagctacataacctccctcgacctcagtctccttttctgtaaaatgggagcctcagtaacttaccttgtgaggttgtcgtgaggattataggaacggatgtttgtcattcaattaagagtgcctggcttgttgttagtgtgatgtaaacattgcatgcattcgttctaatgagtaaatgatcatagccattagtggatgctcttgcgtgtcaccctagtccctcctcagatccaggcacacattctgtcagctgcttagagtgttggctgctgcccctatcagctgagcctctctctgggcagctccatggtgcctttggtggaaagaggaagccttggccaaggtcatcaacactcaccccctgggcatcctggatccgatggccatcccatgtggggatacagaatgcttagctccctgcctcaaactgggacacctctgctgggccatcccagttccagagctccccttgggacaggtggaggcctccgttgtgactacatcacagtttggcttgtccctctggcctgtcctgctcccccacttccctatagcacttcccagtacatttcttgtctgtagatttcacactcagagtctgtttggtacctgaaacaacaggtagctatccagacgctgaatggaatctgatttccattttaaagcacatgctgatttcacttgcttgtatttttggaagctttttgaggagtggccttgggttctctaccactcctgtctcctaccctgtgtgtgcacctttcgggcactgtcagcatgccttggtcacctccatgactcctggtgggaagaatgtggcctagctcctgggcagaccataaaacttaagactgatggaacggcccaggggctcagagggcatcacccattcaacccttccaggtatgaatgaggaaactgaggcctagaaagggggaggcctttttcaaggacacacagtgagtggtgcctgtcttttccatctttgaaggtgatggtgtcttgggatatagtgagcaggctggtcttaggagccagacatgtggctgttgtgatattatggcgctagggtccaatacatgttttacggggtgcccccatggcagaggggtggccaggccagcccaagagtggctatcagcaatggcttctggaaggaggacagcacaggagttgaatgggcatgaacggtgtggaagagagaaagcagggagtttcaggtggagacacagctgctgcagaggtctggatgaggtgtgggggagagtgtgatctgggcagggggcttggaaaggcagaagaggggatgggcgcgtgatgggtgggaggcagcctggactgttgggctggcaggcggcagatgctcaagtgaatgttgtggccaagaattaaaacttttccccagtggaggggatgggacttgatggagagtgacttggggagagccacgcagaggccttacccatcatggtccccactgaccctgcactgcctgagccaactgatgctcagtcaatggttgtggaataaatgagtgaacgaatgagggaagggaagatggtgctgaagaggaggcctccagctgcactgtggcgggtgggtgggagcagggacgagcccacaggctctgatgaaactggcttttggttgggggttttatccttctgagccagactgtgggtccctaccttccctcctgtcactggagaggtccatgggcctggcttcgatgagactctggggacgtggggagtgccggtgggtgagaccagccgagagcacgtacattggcatcccccacagcagaagcccagagaaaggcctcaaagtcgcgagcccaatcagatgaggtcctggccctgccccttggatggcctcatctcattacaccttgacccacttcccagcccagctccctccagccccaggcagcgtctgcagccctctttgaaccattccccctcacagcgccaaatgaaaatgtttgttgaaaacaacatgtgcataattaaagcttaatgagcgcttgtctgtttggaatgtgcaattagatttacaatcggggatgggagagagctccaaatggctttaaatggagctgagagagaggataatttttgccataaatctgcagtaatgcagacggtgtgtgagctaccagtggcagtaccagggaaggaagaaatacaggcctgccaggcctccatgctatctatgttagggggctgccctgcccatcaggcccggccctctgggcagctgcagctggtgagtgtactgggatgggactcactggtggtcctgggggcagagctgccctaggttggagctggagttcctgcctgcagcttatgagatctgcgatccagccaactgtgaggggctgaggggctggtgctgagtccagctgcccaggtccccaggatcccatggctggggcgagattcctgcgtcatcaccacgttcacccccagcctgcaaactggcttcagggcagagccctagactgggatgtggccctctactttgttctctgctgtttcccagtacccagagcgtacatagttaaggcctcagttaacatttgttggatgaatgaatgcctcgttaccagactcttgccttcaacaggtcactctccctctgcaaaccccatttctcccatatctatcacagagaaatggattcggctactgctgatgatgtcagctcttccgtctctggggttctgggtcaggagcagataatgactagggcagtgtctagaccagcaccatccagtagaaatacaatgcaggccacatacatgattttaagttttctaatagccatgttcagaaaaagtgaaaagaaacaggtgacattaattgtaatactttagttaacccagtatatcccaaatattaatattattccaatacatcatcaatatacaaatattgacaaggtattttgcattcctttttgttgtcatcgtcatcattcttgctctgaagtctttgagattcagtgtggactttatacttacccacatctcagtttggactaggcacaattcaagtgctcagaagccacgtgtggtaagcggccaccattctagatggtagaggtctagaaagagcacagttagagcgaggtaggtgggagggggcaatgattcccacctcccagaggagcccaggtacctggcagccctcacctgtggtgctatagtgaccactgccatttttacactacccctcgatgccttttattgactgaaataggtggcaccatccaagccaactcttgttgggggtggggacaagggtcctgaaggggcccacagcactgagcttgcttacaagggacattcccagctcctgcggcaggcagtgcccaaggcgttgtccttgcttctgatagttaaggtcccaggcctatagtcatgaggtcaccttctctggttcacgtggcttggaggcagtgggggtgggaagccaggatgtactcttaggagtcagcagcctggacttcagactcagctcaggcaggtcttggctgtgtggccttaggcagatcccctaaactttccgggcctctgtgatggggaggatttatcaccaggcagaatacgaatgtgcgttgtgcccagcaaagcaggcacaccaatcaggagaaaaacatttttgaagaattgttaatatctgatattttaggaacaaagcatgaaaatcatcgttgttgggaaaaatcggccctggcagttggactttcttataaagactttaatttgcaaattttatttcaaattacatacagtgggcacaggcatcgagggtcttttccatgattaagacctcagagatttgcacaaagccccactcagtttcttcatctacagaagagaggtagttatagcaactggcaggattcttaggaggattcaataataaaataagaaatagctaacaatgattgagtgccttctctaggtaggcaatgttctaagcactttccgtatatttatttaatccaaatgatagtcatacccattttgcagatgagaaaactgagacacagtaatgtagtttaaaaaaaaaaaaaaccaacagcttgaaagcaacaagcccaggatttgaaccctggcagccagaccagggcctgtgtttgtatccactgtgccatcatgtttctccaagtggtgatggacctggagttggtgtacagggcccgggtcaggctgagactgaggcttcccaggccgtgctctattcctgttcctcttccatctgtgccgggctctctgcctgcacccctcccccggcatcttcctggccctgatgtgtatttccccatgagacttccacataaaaccgcactctcggcaggacctaggttgcagctgtctctctctttagagctgtgttttatctgtgcagaatgagcgttctcaccgcccaatgtggggcaggcgggagcagtgtgtgctgctttgattgtttcctctttagatcttggtgaggctcagctctcagtgcctgtgactggctaggctgagggctgtgcatccctaggctttgatctgtgtctctgtgcagaggggaggagcaacagcttctacagaacagctgctgctttggtacctgggatcaaggccaagttcagacttcctgggtggctttggacaagttcccaaccactctgagccttaccttgctcatcttgacagtggggctgctgctcatggaagccttgggatttctagggggttccagtgagatggctggtcacagctctgggataagggctggtatacagtaggtgctctttggccagtgctcacagcagccttggatgtcatattccctgctccttgcctagtcacctcctttgcttcctacatcatggagcctccaagtcactttttcaggatgcttctctggaaagaccctctgccttgcttctgctccccttggctaaccttatcctggcctttgtcacatgtgtcaaagaagaaggcatcattcaatatcgaaagcaagaagctgaattcattggtatacttcgcaagggtagtctccccaaatcaagcaagaggctgatcttttcagggtttggggaagcatggggtcctgggataggaggactttcagagcaggaggttctgagactggctggctgtctccgtggtggacatgtggctattgggagtaagactattgattgactgactttcagaggtggggctgtaaagctcccagtgacaaatgaggatgagctttaagctggtttggggattcattgtttgcagcttgggactgtggtcaaagaacatcttttcctttgtagatttggagaataggaaggttttattctccctccatagctgtcatcttctccaaaggactgggggttccttgaaggcaggggccgtgtcatcatcattctggcatgcctggcacctagcacactccctgtcacatagtaagcacgcacaagagatcgttcaatgaacagtgattgttgcctccaagtccctttgcttttctctcttttcagtgcctttgtgatgatctatttgcatagatttcccaaggggcagtggcaaaattcacttgtagattccccagtggctgggagcatattcctcagcacgagatatgtgcctggtacacgatacaacaaaggcactgcctggtctcatttcgcctcagcacatttgaatgagatcttagacccaggaccaagagtgggagcaaatgggtagaagacatgggagggacagggtcaaggtgaagaggctgaccttgaacaggagagagataccttttcagactaaaggaaaggaagtcaagatgagcatgatgtaaataacgtaggggaggttgggagaattgagggaatatctgatggcttcaattcctcagtgacagaggagacaatgtcatctgctagactgagggagatgggggctgataaggggataggagttgatatatcataacaatgataataggtaacatttattaagcacctgtcaaaaatagttaatatctgtaacataatgcttaataatgctaactcatagctgatgtctgataacagataccaagaaccttatgaggtaggaatgtagctgtcataattgttgttttataggtgaggaaaggaaggcaaagtgaagttaaagtcactgagctcgtaagtagtggaaccagtcgtcagatcaatgctgttacccagtatgttacactgcacataggagttgaattaagtccaaagctgattttagatggaagcttttggttaggtccaagaatatgggtttataaaagcaagcaagacagtgttaaggttggagtttgtagccagaaataaagaagggcctaggaagaggtagatttcggtggatagagaaagggagagtgttccaggctcatggtgggacgatgtgtaagagtgggggcacttgctgggtgtggtggctcatgcctgtaatcccagcactttgggaggccgaggcaggcaggtcacttgagagcaggagttcgagatcagcctggtcaacgtggtgaaaccccgtctctaaaaatacaaatttagccaggcttggtggtgcatgcctgtaatcccagctactcaggaggctgaggcagcagaatcacttgaacctgggaggtggaggttgcagtgaactgagatcatgccatttcactccagcctgggcgacagagcaaaactctgtctcaaaaaaaaaaaaaaaaagtgggggcactggaggctcccactatgctgaggacccacgggaactgagacttggggctgccctggagggtcctggatataggctaagtgatgtggagtctctgcagggtttggatctgaggagtgaagcgattgcccaaatatcgctagtgatagccaaggtgtacgatggattgtgtgacacggacccaccaacaccaacatgggtttgtggtgcctgtgtgtgcccctacgctgtgcataccacatgcactgtatacctttgtgttcacactcagcatactcttagggaagctcagcagaaggatgttgcaggtgattggatcagagggatgtagatggcagggagaccagagtcaccccaggggtactgactgtgggactgtgtggaaggtgacagtttctgttaagacaggggagtgctggagaaacagcaagtccatgtacatgttatgagttcagtgctggaggtgttgaatttgaggtgctcatgggcaaatgggggagatagggagaaaactatatattagaatctggaggtaatttggctaaagatgaggatttgagaattggtgatgttgcaaccgtgagtagccatgacattttccagagaaagtgtgaatcgagtgagaaggaaatgccagacccacattgctatgcgcctatccattccacccaaccactcaacccattttacccacccgggaacccacacgtccaggcatctatccacgcatccccaacacccatctcacccatccatgttcatctcgtccaccatcccaatactcttcccatacacttgtctgttcacactcatgcagccatcccttttcacctatccattcatccactcctccctctcatcccagccatcccatccatacatcccaaccacccatctatttgtccatccacccatctcattaataaaccattcattaataatcattttatattgattacatgttgaaatcatgttatgaatatgttgagttaaacttaattttgatgatatattttatttatctgttaatatttttaaacagtggctactacatttaaaaataatgaaaagagtataattggattgtctgcaacacaagggataaatgcttgaggggatggaaacccattctccatgatgtgattattacactttgcatgcctgtgttggaacatctcatgtaccccataaaaaaaactgtggctactagaaaatgtaaaattacatatgtgggtcacatttgtaacttttattatatttctgttggacagtgctaatgtgtacaatccctcacccatctattcattcacccgtccgtcatctgccgatcatccgtctatccatcacccatctatcaatcatctatccacccatccattcgtccacccatctgcccatccatccatcccatcctttactccttcctcctttccatccattcatctacccacttatcacatctgtttaccccacaaatattttatttatacctgtcatgaatcagtgactctgtggtcataagaatgagaaaactgaggcttaaagcagttaagcaatttgcccaaggtggcacagatggacctgggatctgactgtctaagatcagggctcctcaccttggctgcctatttgctaagtttccttaaaaaatcctttggggaagcatggtgtgcttaggttgggggctggctgttggaataggggccgaggagctcttttccctgaggggaccacacagggaaaggagaggtaggggagagacagatgccttagaagcccctgtaagctgtgtccccggtggccgtcatgaaagggttatccctacacattcgatatttgcaaaaatgtgggttctttcagattccaaaactcatttccatgacaaaactcttgggaagagaagatgaaggcctggcttttgcagaacaatcttccagctgtaatgaggactgaagatggcaatgggaaaaggaattataattagaatatgaaatggggaaaattaatctattccagtcactggtaagaggatgttctcctggcgttcatggaaattcttaagctgttgtttctccctgcatttttttctcacattttaaagcatagggaaggctgtgtggtatgaaaaaaagatttttgaccaaggaactgataaactgtgaaatatgcatagaattgaagttcatgtgcatctttgctttgtatgtctctgtatgcacattcagtatatgtttgtgttcacatttgtgtgagttacatttaaatggctgcagatgcatggaatgtttgtacacatatgggcacaccctgctttccttgtgtgcgtgctgtggttattgtgtgcccagttgtataaaggtctctgacatgtgcacactcatgcctgtgctgtgtgtgcgttggttggtgttacccatggacatgatacatgagtgagctgaacgctgccgtgttgaacgctgtgctgcatgacctgggtccacacaaacatgggtttgtggtgtgtgtgtgtgctgcccatgctgtgcacacggtgtacatcatatacctttgtgttcacacagtgtatgcactgcggtgggtgtagatgtgggtgtttttgatcttgtctgtgcacatgtggaggaggaagtagccctgctgtgtctgagggcagaggtgactttgtgacctctccccttggcttccaagttcatttagccagaaaaggtcccaaatgaggagggggctgcaggggtaagccccaggccttagagtactggaagccaagccagagggagcctgggaaccctcagtgtcccccaactattccttcatgccctccaagggctccgatgtggtggaaccctggcagaggtgggcaaagaacaggcctccccgcccactcagggcctctgctcactgctgctccgcagctggttctgagcccagcaggctccagggcactgtgcaaggtgcccaagggtaactgaactgaggagactcaggccctgcctcgggaacctctgccagcttctcaagtgccccttgaaagccagaagcaagctttactacagcacgtggcagctctttcctagacattggttgaataaaggagtgaatgaataagacaggctctggtgacctcatgggaatccactgcccacccccttgcctgcccctaacacactcgtgtcggagaccaggcccccttgccctacatctccagtaccattcccactgctctctgtggataattcctccctctcctgaacctctaacacacttatcaagcacctgttatgcgccaggcccaaggcagactattgattatatagtaggctctagaaaagcattggtccctgctgtgaatgcacttgcagctagtgggagagtccaagcagaaaaaatccaacaagggactcttaaatcccatctctccccagctgtgtgatcttggacaactgcttatcctctctctatctgtttgcttggttttagcagggaaaagaatattttcttcattggatcatcgtgaggattaaatgaggtcttttatgtaaagcattttgctcagtaccaggaatattcattctgtcaccaaatatttattgattgtctactgtgcttatcggggaatgaagcagatgttggcccctgccttgcagtggctctgttctcaccagcatttaataaatggtgaccattcaaaggttttttggacatctttccctctgtttctcatgcatattcctataccatactgttcgattactattgctttataaaatgtttcaaacacttcattaaacttaatgttcctccatctccaattattcttcctattagggtctacttataagttacatgtgatttttaaaaaattttacttttgtcaaaatgatcaatggccatggtcacacatcaagtcaagtacccaggagcttttgctgagagcgcccccaccctgcctaatttatagccccatccctaatgccaggctctgggagatttggagatgaccagacacagttccagcctccatgttgcttccactctgggacagatgacaaatgtggagacagtctatgttataagagcaacagccagaggagatgcgagcatggcaggcctcctggaggaggtagcctctgagcagggtcttgcagcatgagctctgtgtgcagtgtggtggatggagtcctgcatttggggtcagtgcccaaactctaggcatggaagaacctttttttaaatcatccagtagtcaccaagggactctccccgtccctgtgctggggaggctctttggtgtaaccatcaacccaactgcctagatgggaagataggcctggtcagaggtgatctgcatgtggtagtgactgctttatttacttattcaacaaacatttattgagtaccttctctgtgccaggcactgttctaggagcttgggagacatcaaggtacagatagacaaagatccctgatccctgggagcctccattttagtaagaggaatctaatcataagcaatgaatatagtaaatatagagaatgctagaaggtaacagggacttcggaacaaagaccaagggaaggcggggcgagggcgcgtcgaaaatggtggtagaaagggtggtgggctctcagcccacaggggctggggctggcatctgagccagttatcaagcaaagcttctctgagtgaaggcggctgggtaaacagacatttcacatggttgtgggcgtgtggatttctacggcctccgtgagggcagctgggtgatgtctgtctaaattacaaatgcacatacagttggatccagcaattacacaaatgaatcctacagataaactcacacctatgctcaataacagatgcacaaaaatatttatgggagcaatattgggatagcagaaaactagaaacaatgcaactacccatgtgctcagctagttgaatatatgtgttatatccacactgtggaatactgggtacagaaaaaagaactatgttctgatataaaacattttctaagatgtgttgctaagagaaaaataaagtgcaaaactgtatagcatgctgtcatgaatagaataaatgactctaaaatgtgtatatgtagacagtctttgaaatgatataaaaaagctggtagacgttgcctctggagaggggcagtggatggctgggaggtggggtggtgttgctttttgtactcttggaattttgaaccatgtgaatatatcttaataaataaatggttcaattaaaataaaatggctgtttgctattggtgccccactcagaaccctttactgaccagcacagacatctcccacctgccttgagcacaagctgcctgcaaatggctcacagccagtatagttctctgaagacttgtgcttggtcaattgggggccaccttgctcagaaggttatgtctccccatgtcccctaagggcagcccatggcctatgacttccttacctgggctacaacagccaccccttgcttcgtgttggtactaactctgcatacaattcatgccccagagttccccatcagagcaggctgaaagaagtcttcaggcaagaccacatccttgcttagctgtacccactcctgtccggcttgcctcccacacttacaggttattcccaaggagtactttcttaatagccacatgcatctgaacccttgcctcaggctctccttctagggaaccctatctaagatacctagcttaagggaagggaactaactggaattaagtcctctccatattaatgtgttgagtcaagtgctctacagtgcaacatcctatgaggaggggcctacaggcaccatccccatttaacagatgaggaatctcagaagttgaggcaccaacttgagatcacacttcagggcaaagagggaggcgggggtcccagagcccacatctcttcccctgcacctgctcctgactttttaggcagatttacagggaaatcttcctgaatccagacttagcagcttctctgcacacaggatatagttcctgtacatggtctctaccatagtcctcactgcctgtagccaggcgtggccctaggggctgggatggcataggtgatgggccaaaaccactcaggatggcaggacccggagggcatgtctggggaaggctgtcatgatcccaaggctctggtgttcttggcctcccccagcacatgggattccagctctagctgatcacctgatataattttgatcaagggaggtgtttgcatacttccaaggatgggcagctcagcacatggcaaggcagcctgttgtgtctatggacaagttatagagggcagaaaggttttcctatttgcattgtaagtgtgattaacagcatgaacctgagcactcaagggccgtggaacaggggctgctccttccaccctagaggtagccctgctgaaatggggctttgggcatcctgggctctgatttgccttctgcagctcccacagtcccctgcagtcagtcccctgccctcctccggctgcttctcctggtgccttcctgagagcattttaatcagagctgcttctccctctctctctattctagtttgatggtgacagtgcctacgtggggatgagtgacggaaacccagagctcctgtcaaccagccaggtgggtgcctcatcctccctgaacgggtgtcttaagatttgggctggctggatctgagctgttcctgggtggaggtagggggtgcagaatggggccagcacagcccgctgctgtcttctctctgaatgatcaagaatagcaatagtctccttaaaaggtacaatcaaagtgggactatagtgttcgtaaattaactacctggctactgttggcttaaaatggattgggaacttgatgaaacttgaaatgtattgcccatactccccacgcttggggcagcttttcagcagcagtgagttgaggtgcctgctgctctctggtgccgcctgcctcttgccaccacacagcacccacggggacatgttctggtttggatgcacacatgcccttgcgtaggcatgcatggttctcctgcctgctgggagttgttgaaggccacaggggagggttgtggacagggcacaaggaaagagagcagaaggtcttactggtggcaaaggaagcagagtcattcctgggcaaggctgtctcgaaccccagcctggccctctggggggtcatagttgccagttggaatcagattttccactgagagcctggtctctgaaaattaatgtttctctcagctgggagcatcctcactatagactatgatgccacagagggtccttgctgcaggctgagggtccagggagggtctccctgcagaatgtgatgccagggtgggtcctcactgcaggctgggaccccagggagggttctcactctaggctgagatcagggagggtcctcactgcaggccaggaccctggggaatgtcatccctacagaaagtgatgcaagggtgggtcctcactgaaggctggggccccagggagggtcctcactgcaggcgggggccccagggagagtccttactgcaggccggaaccccagggagggtcctcatggcagaatgtgataccaggaagtattctcattacaggcatggcatcgtggaggatggttccctaaggcagtggtgcttgctgggtgggaccagctcgggacactgattggagagccaaggagggttatagctgctgagaaacttgggaagctggagggcaaccccggccctggagctgacctctaccctctgtctctgccattgtgggggctatggcagtccaagttgggtggcccctcagccatcaggctgggcacatattttccagatggggcaatagaagcctattaattcacaaatatttatgtccctattctgtgacaggtcccatggaggccatagatgagtaagacatgggcctgtggccctagggggcactactagtgaggaagatactgtagtctcagtggggcatggaagctctgctgcagggtgctgcgccccctcccctgccgctgcaggatcgctcatgccggggccaccataccatgcccctctctggcctgtccctgtgtgagcataatgctgctgctgcaaagctgcctttatattgcattgacatgcgccaacatgcaagactggtgggcaagactccaggccttggaagtggttattttggaagagtacactgatgtcatttaattgtacataatcaactgaagtctcatctcagcagaccagagttagccctgacatctcatctgagccttttcacaatgtttaaatagtatttttgttaacatattgagccctggttttcagaactatattatggtgaattctgttctggaacctactggaaagcattggcaatgtccttccaccaagaaggaaaagtgggactcagtggggctctgtgtctgctctaggcctcggcagaggagagcacagtcgtttggagaggagacttggtacaaataaatgtcaccctccccaaaccattaacagtcatatcctcaacaattcccccaacactttgcagcttgcaaagcctttttctcaatggttatttcagctaatcttcacaacagcctcgagaatgagtagacgttattgttcagtcaattttatagatgatgcaactgaagatcaaggatgttggctgattcaatcaaggtgactcagccagggagcactagagctggcattcaaacttgtgaagctcagactcggagctccacaagcctcccttgccttgtccactgacttgcctcagcctaaatgtcacttctgcagagagctctttgtgactgccaaacccacgttaggtcccctttccatgattctcattaaaatggcaccaggtctttttaattcatagtgacaaaaattcataatttttgtcacagtggtcatctacttaccttgtgatgacttagttaatgcctgatttccaccctaaactgtgaccaccatggggaaaggatctggtctctctggtccaatgctgtgtatcccagtggggcatagtgtctggaacaccgagagcactcagaaaatatttgtgtaatgagtgatggtagcccctgctcttctctgaacttcaatgtccctaacagtggaacaaggtggttggacttcctgagggtccttctaaatcttttatgctgtgacccagagggtctccctaacttaggactttatgaagaagatatcaaaattctctgagattaattaagtctagccagtggcatgagccaatcttaatgtgaacaaattttgcaattgcagttagatttcttatagtgtatccgttagtttttcctgcataacaaacacctcaaaacttagtggcttaaaacaacaaatgtttatctggttaatgattttgtgggtcagcagtttaactgagttcagttgggtggttcttctggccttgcttaggatcactttagcagcagcaatacattgccagatcagcagtgggctggttggtatgggaggctcacctgtgttccacatggtctctcagcttccagcaggctagctccaggttgttcacatggtaggagaagggttcccagagcagcaagagcagaaattgcaagatttcttgaggtccaggcttgaaataaacacacatctacttccaacacattctattggtcaaagccagtcacaggaccagcctagatcaaggaatggagaaatagcctctacctcttgatgggaaaggctgcaaaatattgtggcctttttacaaactaccacatgtaggaaacatatgggatatgattcatgatgattttgttgaaaaataacttagacttttctggtacctatagctccttgcagctcagtgggaccctactagcttctagacttgaatgatgaaagttctatatatttccttcctcttttccctggagtgcttcttgaactcacaacgcgagcgcgcgcgcacacacacacacacacacacatacacacatacacgtgaacaccctctcacaatgtgttgtctcatcaactgcaagaattgtattgtccaaattactggattaaggattgacatcaacatttgggtaaaatgaagccctcacagccactagaggattcagaggataaacactctaaatggcttaaaatatgttttataaatacagttaaatacaaggttcacccaatcagtaaatgtttattggacacctgttatatgcaaggctgtgaatatcagtgggaagccatttctggaaaacatttgcttccagaacatccaatcaatatatgtatatatttttgagatggagtctcactgtcacccaggctggagtgcagtagcttgatctcggctcactgcaacctccacctcctgggttcaagtgattctccagcctcagcctcccgagtagctgggattacaggtgcctgccaccacacccagctgatttgtgtgtgtgtgtatttttagttgagacagggtttcaccatgttggccaggctggtcttgaactcctgaccttaagtgatccgcccacctcggcctcccaaagtggtgggattacaggcgtgagtcactatgtctggcccagaacattcaaatcgtattacaaatttgttctttaatgtaacacttctcctgagatgccatcttctttacttagaaaccgcagctgagacagaggttcccctagggtatgtattagctgactgtgtccctttttgaaaactttcaccgccgctctacgggcttgaagtgtttttttttgcaaatacattctccattgtttggtttttgcaagactccacataaattttcccatagctgctttagcttctacaaatgatcacactccctctccctccttggaccttgggttacttttgtaccagacttgccggggtggcctgagaatgagatataattctcagatagggctgtgtccccatcagcagctccaggggggtagaggacctggtagaggtcagttctttcctgttgagagcagactctgtccaggagttacagaaatggatatttcctgatgatgtgacccagaaagagtctcctccttcctgggacgaggtgaggaggaaagggaagtgggcttgggactcagcagacctggattcaaattccagctcctccatgcctcagcatgggccagatttccttatgcaagtgatagcagcttcctatcaaatgggaggagtagcagcgtctgcctcctagagtgtcatgagaagtaaatgaggtgtgtgtgtattgtggattctgttgctgcctcaccagagtcctgctcatcattcagctgctgtgagtgttggctgctaactattcacagctactctttctttggaaaattggaactgtgaacccaggagaggatagaaggggaggtctagaaaccgatatccttatctcaaggagtgaccaactctgcaactcctcatgggctccagctaatccagccagactccagccaccaaggccaaatctttactcagctcctcccctgtcatgtcctgcctccctcccgcccttcttctaagagccctcttcaagtcactttcacaggcatccccatctcaggctgtacttcagaggaagctaaactaagagtatgtaaagaaccagagtcagaaaaactagctatgacttattattttttaccatatataatgctttggtcacacaagagcttctgttcacctcttgcgctcatttacaacttggtgtttttgtatgcattgtttcctctgatgggaatcccctagtgtttttcaaccaacaaatgcctatttgttccttcaggggcactgcaaatgtcacctcctcatcacagccttcctggctgtgtgtagagttttccactctcttagctctaaataccacttctgctaaagagctcacattttttacaggaattattgaaagaacttgtgtgtgtgtgtgtgtgtgtgtgtgtgtgtgtgtattagagtcagactgaatgacatgaatgacatcagatttgcagtcttaaaagctctcaatgacaagaatgaatacagggagaccaagttgagagggttggtaataggccaagtaaaggatcaagatctagattgtggcagaggggatggaaagaagtagatgcattggagataaagttagtgggtcttgacagtgatggacatagagggagagagaaacggaggggtaaaggatgactcctaggcttctaccatgagcccattttcaggcatggtggtaccattttctgagttggggaaaccctggggatttgcaggtttgatgatgccagacttggatgtgttatatttgagatgctcatccacatggagatgttcaagtagatagatgatggtacaaatcttgagctcataagagaagtaaatttggaaatcttcagcccatgatatcaaaaccttgggagtgaaggagatttatggagagagggaagaacgagaagagcagaggaccaatgactctgagatgttgagctccaacatttgaaggcaaagtagaggaggagaagactgtgaaatagattaagaaggagtggtttgagaagtaggaggagaacttggagtcttagaaaccacgggcagagtaattcaagaagagaggggatctaggtgaaaaggatgttggatccacagttccttaaaatttatcaaaggataaataaaatcctttgataatgggatcacatcaagttaaaacacttctgtacagcaaaggaaacaatcaacaaagtgaagagacagcccacagaatgggagaaagtatttgcaaactacctgatgagattagtaatcaggatatataaggagctcaaatgactctataggaaaaaaaatctcgtaatccaattaaaaaatgggccaaagatttgaatagacatttcttaaaagaagacctgcaatggcaaagaggcatatgaaaagttgctcaatatcactgacaatcagagaaatgcaaatcaaaactacaatgaaatgtgatctcacccagttaaaatggcttatattcaaaagacaggcaataacgaatgctggtgaggatatggagaaaagggaaccctcgtacactgttggtgggaatgtaaaatagtataactactgtggagaacagtttggaggttcctcaaaaaactaaaaatagagctaccatatgatccagcaatccaactgctgggtatataccccaaagaaaggaaatcagtatattgaagatatcggcacttccatgtttgttgcagcactgttcacaaagctaaaacttggaagaaacctaagtgtccatcaacagatgaatgggtaaagagaatgtggtatttatacacaatggagtattattcagccatacaaagagaatgagatccatttgcaacaacatggatggaactagagatcatcatgttaagtgaaataagccaggcacagaaagataaacattgcatgttctcacttatctgtggggtctaaaaatcaagacaatgaacccatggagatagggagtagaaggatggttaccagaggctgggaagggtagtggggcagaggggggacatggggatgattaatgtgtacaaaatagaatgaataagatttaatgtttgatagtacaacaaagtatagtcaataattgcgtattttaaaataactgaaagagtataattgggttgtttgtgacacaaggataaatgcttaagggaatggataacccattctccatgatgtaattattacttattgcatgcctgtatcaaaatgtctcatgtactctataaatatgtacacctatgtacacacaaaaattaaaaataaaaaatgatttgataaatgttaaatcaaacatttaaacatactcaagggaaccataaaggcaccagcaaaacaaaccttaaggtatactttacaagtttggtgtggggaaggcatttctactatttaaagcctcagaagaaaagacttaaaattggaccataaattaacataaaactaaattaatataaatataaaaattaacataaaatcaacatatgacttttgtatggccaaaccagcataagtaaagtcagtagacaaaagttgggcaagaatattttcaacttacaccatagttgaagaactaatcacccttatacatgaagacttgctagagatcagttcaaaaccctggtagaaaaaaaggaaggagatatgaaccaatagtttacagaaaaagaaatacaagtggctcttaagtatgtgaaaagtgctaagaatcattcataaatcataagacagccattttttaccaattggattgaccaaaatccaaaggtttgataacacactcggttggagttcttatggggaaacaggtactttatacatttctgtgggcagggtaaatggacaacatctatcaaaattgcaaatacattgacctttaacccagcaattcgtttttttggaaatatgccctacagatatatttgtacatatgagaaatgacatattcaagactattcattttgatattgctttactaaaaaagatgtaaaacagtacagtatgctaccatttatacaaaaaggtgataagaatgtatatttctaagtgcttgcatttgattaaataaccttggaaggatacatggacgctagagtggctttgcgcgttgtacatgcatgtacctctgtgtgtgtgtgcgtggtatgggaactgtgcaggtgctgggcagggatagaaaaagacttttcaccgtatctttttatgtttagggagttttaaaccatgggaatttattataactttagaaagttaaataaaatgtaagaagaaggagagagtcagttagctcaaacacttctgagggattgggtgagatgaaagttgaaatgtgtccagtcatcttagcgaaaaggaagtgactctgggcttcagtataagcagttttgatgtgcagggtcattgttctggtcccatgggcagattgagaagcgtgaggtgaggacatgtaaacagtaaatatagacaacttgtgtgagaaatttagctgtgcaggacaagggccagggccgagctcaatgagatgaagattccatagaagggattttcttttttttttttttttaaagaaaagtctttagaatatttagtcatcaatggaaagtgtcaggagagagggtgaagctctgggtttaggagggggaaaggctaagggatgctttcagatttcagagaaagtgggagggtctggatcctgctcagaggtggtggctctggccttagctgggagtgctgggtgtggaggacagcagagaaaaggagtgtggctttgtagatgggttggctgggagcagagggtgtctgcacctgaaggtgtcagtcttctcagagagttggtgggccaagagccaggggactgcgggtgagaggtggtggggaggtctggggtatttgctgtggggcatgggagaatgagctcccggtgcttgtgctgtggggcagacaggtgggttaatccagggcaagagatctgccaggcagttgcaccagaaggacacaacagcttttttttactcaaaagagactaatgtaaaggatcagggaatctaagctgcttttagagagaagacgggtcccagggcctggggtccagtgcagctaaagagctagtggggagcagctggatggcaaggacaccttattcagagtgggacgctggctggtgattttggaagtgagcaggccatggcattggcaggggcctggtatgcctggggagcagggagctgcatgggggagaagctcctgggaggtgaggagcccactgcccagcacagcatggtggctgagctgaagggccctggaaggatgccggggtagggtggatgggaaggtgggacccagaactgaaggctggaagaatgaggggctggatgctgatggggctgggtgtgatgggatttatagggacaatcagcaggggtctgaatggatggggcagtggagagggagaaggatgtcagttcctctgaaattcctgttgaggcaggaggcaagcagaaggcgtgttctaaggcaaggctgggaaatagggtactttgttcctagagtgagaatcccagtggctccagagctgtttgcaaggggaatgacactgcacaattgaacataaagattctggggacttacacatgaggtgctccctggggagctctcaggtctctggggtgcggtgtgtgccaccaaatgtgaacctgctggctgtgagcctcacagggcatgcgcagcacccagtgtggcccctggccccactgcccctgtagcatcccttcccgatgctccagcagaacgtgtgctggagtacagccatcatgtcatacaggccaacatcctcatgctacagaatgaggcttctcagtgcctcacaccacacctggcatgcaacagacacacaagaacttggagttcgtgattcttgctcttggttccagcaccaccatcatgtttgtgcagcaaccttccttcacagatccccaagtttgcctggtctgtttctctcaccacttggatcaagcatctccccactagggtggggagatggtaccatcaggaggccagaagacaaggtgctgttcagcttctagaggagaactcagacctgccgctccctgagcactgaggtccttgcggcctcaaagtcacagcctccttccagcagggggcagtgtcagatgcccagaatgggaaaaagagccaggagctctgagttcgaggctccgccctgctcttaggccttcacctgtgctggtatcactctgaacctgtttcctcatgtgaataatgagggtagatggtctgttttttccagcactaaatgatgataccgatgatcaataacatttgccctgcacctccttaggctcaggctcaggggctaaatgttttccatgggtggtctcatttcatcctcacattaactgtgtaggtgggcactattgctgtcccattttacagaggaggaaactgcagcacagagaggcagaggagggtgaggctcttcgaaacaaataaaaaccctccccagtaaatgtattggaggcaggcgaccctcctgctgctgttgaaatctaagatttctgtcttagtaattctggcctctgagtctgtgtacactgtaaagggcaaagatgacaaggcttttattgctttaattaaaacctgggtgaagagctcgcgattcatattaaaatgaaattgtgtttcacccgctgtggtgcggagaaggtaacagcggtgattactgctaagattacaaacaatcaaagagaaaaggccttttgcaagcatttcctattaaagccacaaacatcacactttaaaaataattatggttgtgttatcagaacatgattcatgagttctgaataaataccagaggccttaaaggaaactgtttcaagaccatagattttgttcaaatctgatgaaatttaatatcacttcacagttggagaataaaatacaaggagggggaaaaagcccatcctgtgtatatggagagaattgagtatatatgtcagattgaactaatgagctcttccccatcaaccctaaacacatactcagaaaaaatggcctagcttctcttattttcactgagagaaaactgccgaggaggagtgagtacttatatctcaccaatcttaattttacatcccaatggccaaaaatatatttattttaaagctcttgattcctgcctatgagacgtttaaatatttgagggcgcaggcatggagacattggggaatggatggggggaggactttggtctgcatttatggtgcctcccctgtcataaagatatttttcatacaatgcagtgaatgtttatggcatatagttttgtttccttccaactattatgagagaaattgaatcccaggaaatgttcactctctctaaatgggatggaaacaatgatgatgatgtgggaagtgcaggggcctgggggaggggatagcagtggggtggacacgtgatttcaaggattttcttaaaaacagcacccttccccctcccagccacctcccagccacctcgaacttagcatcccctgtaggacctgagtttttactggggagggtcagagaatgaagattttatacattgttcattgctgtgtgtgagctcactggtgaccaagaagtggaaatgaagccagacgtggggactttctcagaatgggactgggttcttatcttctggagggtcaggatcctggttccggcccctcctcagcctctctccctgtgtcccctcagactggtcatttgtcctctctgggctctggtttttgcatctgtgaatggggattggatgaatatctctgagggaccttccgggttgacttacagccaagggctcagcccccttcacccactgcctgagcgcccaggagggacaatggtctgtcccagaggtcttccccacctggctgagtcacaccaatgctgagagggccccgcaatgaggctggaagctgtgtgtcacatttcagcccaccaggcatgatgataaggagctgggttataaaggtaatgacatgagaaggcagaactgggctcaaatgataatcttgacacatgtggctggggaagcttggacaagttaaccaagttttctgagcttcaattttgtctttagaagttcctcagagtgatgcagaagtaaattaagtgtgtttatatccaaagtggttattctagtgcttggtacatagcaattggtagttagcctgaggtgctactaaaatccccattttatagatggaaaacattattttcagtaaggtaaaatgggacaggtacatactcagccccaagtagaggcccggaagccctggggtcaggccagtgatgcaggccttcgaagatgcatctgcttgcgaggtagcagggtctgtgccaacagccacccggtggcgccgagctcatagttgggagggtgcttagagcagagtgaggagctggggcgcatggctttaagaggagtgtgtgtccagctgggaaggatgagcaggcggtgagagtgacccatgcacttggagagagagatggggaaggagggctctgaggaaggttgctgtgcattgggaggtgggatcttcctcttataagtcccctgaagaaaaccttcagtgaagttctttgtaactgcccaaaggctttaaaagttagcacagtgtgacctttggctattgactgctgggatggccctcaagggtgggaagtttgtggctagtggttatacttgtgccatgtgtaaactgagcagttgtagttttattgttgccactagccttcataaacaatggttggcaattgcaacaggaaagatataatgggaagggacgaggaagccttttaaaatgtatgtatgtatgtatgtatgtatgtatgtgtgtattttttgagatggagtctcactctgtcacccaggctggagtacagtggtgtgatcttggctcactgcaacctccgcctcctgggttcaagtgattctcctgtctcagcctcccgagtagctgggattacaggcatgtgccatcatgcccagctaatttttgtatttttagtagaaatggggtttttccatgttggccaggctggtctcgaactcctgacctcaagtgatctgcccaccccagcctcccaaagtgctgggattacaggtgtgagccactgtgcccggctttaaaatttattaacatggtatactcccaccgaaacggagaatatgtaaaagactaagttgagaaggatctggaggaaccagtaccctcactcactgctgtgtaaattggtaccaccatagatgccattttgcagtatctaaagctgaatatatgtctctatgactcagtaattcaactccacaaatgccttcgtatgttcaggccaggcgtggtggctcatgcctgtaatcctagcactttgggagtctgaggtgggaggatcgcttgagcccaggagttcaagaccagcctgagcaatttagtgagacccctgttttaaaaaattaaataattagccaggtgtgctggtacatacctgtagtcccagctactcgagaggctaaggtgggacgatcacttgagccctggaggttgaggctgcaatgagccatgtttgctccattgcactctagccttggtgacagagtgagactgtttcttaaaaaaaagtttataggagtgtttttcattaaagctcaaaactgaaaacaatccaaatgcccatcaagagtagactggatacatgattctgaaatattcttacacagtggaatactatgcagcaatgagaatgaatgatgtgtaaccacatgccatcaagcagatgagtctcacaaacacgttgagtgaaagaaaccagacaacaagacagaacattctagacaatgccatttacatacagcacatgaacaggcaaaactaatcaatggagatagaatgtgaattgcagttaccctagaggggggtggggagtgactataggggctttgaggggcttcagaggtgctgggaaggttttctcccttcctttgagtgctgtttacacaaatctgttcactttatgaaaattcattgagctgtacatttatgatttgtgcacttttctgttgtattctatgcttcaataaggtgtaaaaaaagaaagatcaaggcattgtatttttacaagtatctcaatttttagagacagggcaggcagggaagggaacctagccaggtttggtcatttgtatcttgtgttaatccggtcaccagggtagtaaattcccactgagagcatggatgggcgagccttttaccgcttgaacaatgtatttaacttcctgggagggaaagaattattttagcctcataatggatgatgagctgtgaaattgctctggctgtggcttgccccagggaagcaggtggcacgggcttccccagatctgctcagctctgcaggctctggccttccacttctatttccttgtggacagagttttaggaaatgtttgaaatatcaacatctttttttttttttttttttttttttggagacagtgtctcactctgtcgccaggctggagtgcagtatcacaatcttggctcactgcaacctccacctccccggttcaagtgagtctcctgcctcagcctcctgagtagcggggattacaggcacatgctaccacacccagctaatttttgtatttttattagagacggggctttaccatgttggccaagatggtcttgatctcttgacctcgtgatctgcccgcctcggcctcccaaagtgctgggattacaggcgtgagccaccgcacctggccgaaacatcaacacttaaagcacatgcatatgtgtgtgtgtgtatgtgtggtttttgtgatgctgtgctgtggtgccagaaaatcttgttaatggaatatgtgaagatgtctaagtttctctgggcacagacaacacacatgcttgtgtacagacacattcatgcacaaatataagcaaatacaaacacaacttgtaggcatgctcagtgtatggaaaggcacattgagcattgctgtgtgctcctgggcaagttactcaatctctcattgcctcagtttctgcagtgaaatggagataataaatcacctgactcttgggctagtgtgagcaatactctcacatgtgcacaagcacacacaaatgagattttagtttccgtttatttgcttaatggctgctttcctcctagactgtgggtttcgtgggggcagggacctggcacagggtaggagtggagttggtatctggtgagctaatatctggtgatgaacaactctcacaagcctactggtacacatgctgtttagacacattcacaagcacatctgacacacttattcacaggtgtaggcacatacagggatatacacacacacactcaaatgtgtccagactcagaacttaggagggtggatttatctgcagtttggggactctggactagaagtgagaacactgggttttggttgtggctccaggtaactctaatttattatgtgaccttgagtaagtctctcttctcagaggtcaaggactcccagctgcatgtgatggactggaatttgaaccacagttagtctgagtcaaagtgcttttaatgattcaggccgtgctatccccagtgtggtcatggacatgcagcatcccctggagcttgttaggcatgcagcatctcagtccccacccagaatctgatttagagtctcctaaatcagaatcttcattttaacagatccctacttgatttgtgtgcacattacagattgagaagtgctggcctagtgtactttgccttccccaagcactgcaagcaattagcccatgctgagggggttcataagctggtggggcacaggcacatgcctaccctgaggagcagttagagaatgggagaggaggcagtcgggagctgcctataaagacagaatcaacatggaagctcagcatcacacatgcgggagcccagtcccttctatttataaagaagcagaatcacacagtcgttaagagtgccaattcatgagctaggctttttaattttaaaaacagcatatattagggctaggcacagtggctcatgcctgtaatcctagcactttgggaggcccagacaggtgggtcacttgaggtcaggagttcgagaccagcctggccaacatggagaaactccatctctactaaaaatacaaaaattagctgggcatggtggcatgtgtctgtaatcccagctactcaggaggctgaggctggagaatcacttgaatccgggaggtggaggttacagtgaggcgagatcacgccactgaactccagcctgggcaacagagcaagactctgtctcagaaaaaaaaaaaaaaaacccacccagcatatattaatcatctcatagttactgcatgccaggaatcaagtgtggcttcatgtggtgcctctggcttaagatctcttggaggctgtgctcaatgtgatactcaaggctgtggtctcatctgatggcttgactgaagggggatttacttccaagttccctctattggttgttggccggattcagttcccctgaactgaaccattgagttggaatcatggctccatcccttcttaccagttgtgtggctttatgcaagcttcccatctctgtggctcctctgtgaaatgattataataataacacctgcctcatagagttgttgtgaagattaacaaattcatgtatgaaaagtacataggataaggatacctctacacatggtaagtgctatataaatggtttctgctattttttgaaaaaagctatagaaaagcaggtcagaacaatgtgactatgggggctgagctatatattttttaaaaattttactggtaactccgtaggttgcagcacaagcctagttcagagtggatgcttactacattttaggggagtggatgagctctgggtggcagccccctgatgggatgtttggggcatagttacaggagcacggggtccaggctgcaagaggagcaggccttgctctattctgcccagatcactgggccccatttgtggtgccaccacctgggaaggcagtagggtattgtggaagtcctctcaatgtcacctgggaggacaatggcatgagcagaggggccagcacacctaggtgataccacagaatgcagtgtttgggggctacagtgagttcactgtggctagtatcaggcaaggttgcaggacttggtccaggaggccttggatgccaagcagaggccgggaccctgttctgaagggtctgagcagggcagtgtccatggagcagtgtgctctaggggacttcactgctcagcctggtgtcctgggatctcggggcactcatgaggaccattctcagagaacttaagtgccttcatccacaggcagctggcgtgtggcacatttttaggcaatgctacttctgtcattttcagaaggtagaaatgggaaagaaaaaaaaagctgcaaatagacatcatttttccagaagcttattttaagacagaaacaactagagagcctactcatcatttttgctgcttttaaaatcagcactgccttgtgtgtgcctgggtacctgcatacaaggagcacaggcatgaattgaatttgatttttaaaatcccttgatccaattgcctctttttacagttggtgtaactgaggcccagaaaggggtcagtgatttgtccaaggtcacacagcctgtcagaggtaggggctcagatcttcatgagaagatgctaagataaggacaaggaaccaggagaccccgatgggccaagttagaatgatttcatgctgaacagcgtcactgagcgggctgcttcagacctttgctgacttcttagagcttgcaggaaagatggtgcagcactgagcccaatgccatagcagaccattaggatgttcattcattcattcactccaaaacatatttactaagcacctactgtgcgtcaggcagtggtgtaggtgctgagacgaaactgtgaacaaagcagtcaaacactcctagtccttactcgttcatgcatccttttattcagtaaatgtttattgagggcctactatgtgcaaggtactatccttggcccttggaatatatcagtgaccaaatggtggaatttatatcctagtgaaggggacaggcaataatcattattattattattattattattattattattattattattattttgagttggagtcttgctctgtcatccaggctggagtgcagtggtacaatctcagctcactgcaacctccacctcccaggttcaagcaattctgctgcttcagcctcctgagtagctgggattacaggcatacaccactatgcccggatcatttttgtatttttagtacagatggggtttcaccatgttggcaacgctggtcttgaactcctgacctcaggtggtctggcctcccaaagtgctaggattacagacgtgagccactgcagccagccataatcattattttaaagaagtaaagtatactgtatgtttgcaggtaaaagttctgtggggaaactgagcaggtaggggagctgggtgtgccagcaggagctgcacttgcaaacagggtggccagggaaggcgctgctgagaaagtgacatttgagcaacgacttgaaggggcgagggagttgagatctgggaaaggacattgcagtagagggaacagccagcaccaaggccccgcagtgggagtgtgcctggcatgtttgaggaacgtggctggagtggaggcagtgaggtggaagaactgggagacttatctgatcgacggctgggatggtcaagagcagctcccaaccacgtgtggcatgggcagaggtaagtgacccaggacagcatcaggagtgatcgtgtaggagcgatcgtgtaggagccaggatacccctacctcccttgtaaggcctcccagcattgacatgagggcagggcacgtgcatggggtgtggcatcccttgcagtgatttaaagggaagtctcagcatctcgcaatgtcttggagccaaaggagctcccattttgaggccactgtgggaaactcatgtggcgtaaggaaggatcatagccttcagatcgagccaggcccatatctgaaaaaatgtcgtggttgaatgtcttagtaataccagcatggagaagccattttctaagcatgatgtgaaagccagaaatcatacattaatacatttaatgttttaacataaatgtaaagcccttgatatggcaaaagttataaataagatcaagtgacaaattgggagtaatatttgtagcatgtaacatgcaaacacatagaataaaacaatagaaaaatggcagaggtaatgctggttttagaacatgaaacacattcgtgtagggtttacaaaaaaaaaaaaaaaaagaaaaaatggtggagggccagatttggtccacggcctgtgatttgctgatccgaactgatttaggaatgttgacatgtccaaaactgagctcgtggtcctccttatacccaccaagcatgttttcccctcagtattcctccaccagtggctcgagatgggaacctgggagtgatgttcgagtccccgctgaatgaggaaggcacgtggcatgtcagacaccatccaggctggccatagcgatgagggggtgtcataggaggtgagactggaaggagactgggccggatcatgcaggactttgcaggctacagagagggtttcacacacactgtatcctgagcgtagaggacatcagctaatgggagtatcaccatcagttttgtgtgtggaacctctaccctggctgctatggagaacaatttggaaggaaagagattagaagttaggagatcattgaggaggtgattacagcagtccttgtgggaggtgatgaccgcttggactaggatggttgctctgcagatggattgtggtgggaagatttgagatacatggggaggtggggctgacaggactttgtgattgattggagatggggatgagagagggaggaattgaacatctctcccaggtacccagcttgagccaccggtagaggaatactgagggggaaatggacttggtgggtacaaggatgaccacaagctcagttctggacgtgtcaaagaaatcatggcccttggaccaaatctgaccctccacctgttttgtgtaaataaagctttactggaacatgggatcctcctaagtttaaatattgcctgtggctactttcatgctatagcaatagagttgaatagttctgacagagaccatatgactcacaaagccaaaaatacatattatctgcagaaaaagtttgctgggcttttgtgtaggacatccaagggaagtaaagtatcaaagaggcagttggatatgtagctataaaaatgtaatttgaggctgggcacagtagctcacgcgtgtaatcccagcacttcggaatggaaagcagggaggattgcttgaggccaggagtttgagaccagtctgggcaatatagcaagacccggtctctacaaaaaaataaaaaatagtaggacatggtggcacacgcctgtagtcccagctccttgggtgtctcaggtggaagatcgcttgaatccgggagattgaggctgcagtgagctgtgatcatgccactgtgctccagcctgggcaacagagcaagaccctgtctcgaaaaagaaaattcaattaaaaaaacaaaaacagtttggcacggtggctcatgcctatactcccagcactttgggaggccaaggtgggtagatcgcttgagctcaggagtttgagaccagcctgggcagcatggcaaaaacccatctctacaaaaaaaattaaccaggtgtgttggctcgtgcctgtagtcccagctattcaggaggctgaggtgggaggatagcttgagcccaggagtcagaggctgcagtgagccaagatcatgctattgcactctagcctgggtgacagagccagaccctgtctccaaaaaaaaaaaaaaagactaccacttattggaaaactgagcttccttatctgtaaaatggggccagtgcctgcttcaggctgcctcttctcattcagatgctgttgcccacaagttatccccagccttgcgacttttgctacttaagttctgctgggactgctgcttcctaaagaaaaggacccccaaacccacccaccaatcatgtatctttccagagcctccccgtccctgcccggtgaatcacccaggatgctgctgaaaccttagcttgagtcagattgtgtcctgagcgagaacacatggggattatcatgtttgttcccagatagggttttagtcaacaaaactcctgtctaatgtgactgcctgtcattgtcccactatgatgcctctgtctgccctgatccaagcatttcggggtcaggaacagccacagagcagccgtggctggcagcgtggcacactgccggtgggagggtgttagatgcactcctgtgtgagtggcctggctcggcttggaggttctgcctgtagataaaggctgagaaaagatattacattcccctcccccacctcctccagaatccacgcttcattttaccggtatggcttttctctcctgtttggcttatatatggtatggacttttagttttttattttttaagaagcatttttagtccaggaaaatgacaggccaagcaaaaggcataattgtcctgattttcagaagtgctacaatactccagatctgatgtatggtgagactcgaatcagaaagattctattaaacatgtctggggtgggtgacataggggtattatctgagatgattaatttgactcggtcattatggacacagacaagcctgacaaaattgcatttcattccccgcagaattcataaaatcactatacccgtgataagaagttacagtgctaggagctcagctccagttgttggggtttggagttttgataagatgtcattttctgttgtgaaaacagagttgagaaacactgaatcgcactacagtcttttagcagagatggctttttttaaacttttattttaggttcaggggtacgtgtgaaggtttgttatataggtaagcttgtgtcgtggggatttgatgtacggattattttgtcacccaggtattcagcctagtacccattagttattttttctgctcctctccctcctcccaccctcaagtagaacccagtgtctgtttttccttttcttgtgttgatgagttcttatcacttagctctcacttgtgagtgagaacatgtggtatttgcttttctgttcctgcattagtttactaaggataatggcctccagctccatccatgttcctacagaagacatgatgtcattcttttttatgactgcatagtattccatggtgtatatgtaccacatacaacattttctttatccaatctgtccttgatggtcattcaggttgattccatgtttgttgtgaatagtcctgcaatgaacatttgtgtacacatgtctttatggaagaatgatttatattcttctgggtatatatccagtaatgggattgctgggttgaatggtagttctgctttttgttctttgagtgattgctatattgctttccacaatggttgaactaatttacactcctaccaacagtgtaagtgttaccttttctctgcaaccttgccaggatctgttattttttggctttttcataatagctattctgactggtgtgagatggtatctcattatggttttgatttgcatttctctaatgatcggtgatgttgtagctgagatgttcttgctggtgcgggttttacttgttaaaatggcaagatggtagggcgaccatataatttactggccaaaccaggacactgtttagagtgaaataaaacattattaacgtgacactggaacaagaggcgtggagcaggcctgccctggcctagccaggactcgtgtgtgttgggaggagcttgaacagtggcagagcaaagctttggctactggtaggcagggcttcttgtcctcattttcataaatgctacccatatgactttggataagtcatttttcccttttgaacctcagtttcctcatctgtaaaatggaaatgccattttctacttgttctgcatatcatccgagggctttttttttcttgcttgggtgtgtgtgtgtgggatttatgctgacttcctgttaatgtgttttcccatctgtttcctggtataattctctcagctcttaggtggggttttgtagacaaggaaactgagtagtaggcagtttggataaattgccagaagccctcagcaagtaagattccccatgtcagtgtaactccaaagccagagctctttctgcagatcaacaatgtaactctcaatacatgagagttacagcacctcatgtttccatgtatttcaaatattcctcccaacaaagctggaaggttgttggaatacataatcaggattcaactctggggacacaagttgggttctcccaagaatcatttctcaccatgcatcaccagggagtgaatgccacttctccttttatgctatactccaactctcaacaagctctttggaaaaaggtcaaatcacctgctactccctcagtgaatcttcacctctttcttatacagcattgtggtgggaaatggagatcgatagtcaaaatggcagcctgagaactttcatgtaagcactaactgggataaagtagaaagccatcactaataaaaggaacacttcaacaagcagatacaataacaactgatttgtaaatacctaacaacatagctttgaaatatatgaagcaatacagcaggttgataaaatcacaatcacagtggaaatttttaacacatttctctcagaaaccaaagggtcaagcagaaaaagaaaagtaattgttgtttggaagatttaaatgatagaattaacaagctgaaaattataaatattgatcaaaattagcctgatactgtatcaaaggaattctcaatggcttttaaagaattaatatatttttcattcccttttgggtatctttttcttttttcatgtcagtggttccttattttattagccttttcaaaaaaacaatctcttccttgtatttcttatctaaaatttgttttctattttatttttctcctacagactttcggtttattttgttattctatttctaccatcttgagttgagtgctgagtttgtctttcttgtcttctaataaattcattttgataaaagtataatttttcattgtccatctctcataagttttgtcaggtagtgttctcatcatttcagttgtgatttcctttttaacacagaagttacttagatgattgctcttaaagtgtttaagtatgtaggaggatttccctccctccatttttttttctgctcgtttgtttttgttaataactaggttggtgcatgtactagtctgttctcacattgctagaaaactacctgagactgggtagtttataaagaaaagaggtttaattgattcacagttctgcaggctctataggaggcatggctagggaggcctcaggaaacttacaatcatggtagaagggtgaaagggaagcaagcacatattcacatggcagcaggagacagggagatggggaaagggctacacactttcaaacaacccgatcttgtgagaacttacttactgtcacgagaacagcaagggggaaatcagcccccatgatccaatcaccttccaccaggcccctgcctgaactctgagaattacaatttgacatgagatttgggtggggatgcaaagccaaagcctatcagtgtagttaggtcttagaatttgatctatctaatttctaccttttgaagagtttgagattctctttgtagtttacctggttatattttgtaagtgttctatggacatttgaaaggaataaatcaaaagagtgaattgcgtcattcagatcctcaatcctcactcatttctatctgactgatttgcccattttatttatggttttatactaacagttttttacattttatatttctgtggttttatcaatttacataaaaatttgtcatttcttcttagtagatttatatcatttattgacttaagtgttccttttgatattttttagtgcttttttgccctgatttgtacttaatttgtaattaattttgccactctgctttttgttggcctgatacatctatctatctatctatctatctatctatctatctatctatctatctatttattttaagatggagtctcattctgttactcaggatggagggcagtggcacaatctcagctcactgcaacccctgcttcccgggttcaagggattctcctgtctcagcctcctgagtagctgggattacaggcactcgccaccatgtccagctaatttttgtatttttagtagagatggagtttcaccatattggccaggctcatcttggactcctgacctgaggtgatctacccaccttggcctctcaaagttctcggattacaggcgtgcgccaccatgctcggctggtgtctatttatttttatcttacaggtcattttattttaggcatgtctattataaaccatatgctgtatgtattttaataaaaatattttgtcttttaataaagcaattgaaatcattcgtattatgttatgaatatttagtcttaatgctgccattttatgaatattctttattatgtttgatagttcactcctgttttctttgcagatttttctagattgataaagttctgttttcttctactttctttggttcttccaatggtgtaaaatttttgcttttccttaaaattataacaaatatttaataaattaattcatcaaagtttcagggcaagatcagtatggaaaaatcactggtgtttctgtaaaccaacaatgaacaacccataaaggaaactaaaaaaaaattccatatataataacatctaagagaataaaatatgtaggaataaatttaaccaggaaggggaaaaactcctaaactgaaaactacacaacattgtcaaaagaaattaaagatctaaataaattgaaagatatccatgtctgtggattggaagacttaataatgttaagatggcaatactatctgagcgtctacagattcaatgcaatctttatcaaatttccactggtcttttttgcagaaatgaaaaatctgatcctcaaattcatatggaattgccagggggcctgaatagcaccagtaatcttgaaaaataacaggctggaggactcacacttcccaatttccataaagcaacagtagtcaaaacaatgtggtactggcataaggatagacatatagaccaatggaatagaattgagagtgtagaaataaaccaatacatctatggccagttgattttatataggggtgtcaagaccattcagtggggaaagaacagcaggctgtgtggatattgagagcagagtattctaaaggaagggaacagccattgcaaagactctggggcagaaacgtgcctggagtagctggagtggtatgaacaaggggaataggagatgatgacgtcagagaggtaaaaaaggacgtgggactggggagagcaagactacatagcatggggccgttgttccttatctgagtgagaaggagagctctagagggttgtgagcagagcttatattttagcaggataattctggccctggggtgagaatggaccttagcaaaggtggaggcagggaggccaagaggccagggaggagactgctgcagtcatccagggcaaagagggtgatggctcaaggtggagctgatggtatttttggacacatttcgtgtaggatgtgagaggaagagaggggtcaagggtgacaccttggtttctggcctgagcaaccagaaggatggagtggccattagctgaggtggagaagactgtgggaggggtaggttctctcttaaatgtgttaagttgtttgaggtatcaattaacatccaaagggaaggacaaataacagtgggctatatgagtcagcatttcaggggaaggtctggctcggtggtaagaactggagctcagcagcatacagatggtccataatgccatgagtctggatgagagcaccagggagtgagtgtgtttagaggagggtataagatctgagctctgggaatgtcatcatcaatagattaaggagaagaatgggaaccaacaaaggacatacagaatggcctgtgatgttggccatggacagaagaaatggcctgtgatgttgaaggaccaatatctctggtgtcccagaagccaagtgaagaagtttgttcccagggaggaggatgaactaattatatcaaattccactgataaggtcaagatgaaggccagatgaagactgagcattggccactggatttaggaagatggaggtcattgatgaccttcccaagcagttttggtggaagtgggatgaaaacatgattggagtgggtttaagaaagaacgagtggaaatgaagaggtaactctttgcagatttcctgtaagattttactaatatttttaactggcaaagctcttacgacttagcatctctttctatattttcatgaggatgccagtggtagagagaaaattaggcaccatggaacggccaattctactgtaggaaaatgctgggtttggagtcacaagaccagggtctgaatcacaaccaggacctactagctatgtgacacctctactctctaagctccatgtccctcatctgcaaaatgaagataataatcacttctctacagaacacatatgaactaaatggagaaggtacatggacatgctgggctcagtgcctggcacatagtaggtactcaggacaagttgtttagtgttcagtgtcatgcatgtaggatttgattgcattcagaagaggcatgttcatgtttgcgtgcttagttatttttaagtgtgctaattgcctctttaagtgaattgtcataattgtgtgattccaatattttgatacagcatatgcttattttttcaaaaggcttctggtcaattgggccggttccagtggattgaagttttgttttttgactgaaaggaatggacttgagcagtcagttagcattcactgggcaccttctctgtgccagcacctgctctgtgccagcacctattttaacagtgctgagggacagggagggaggtgtcggtcaaaacacatgaacagcaggtggctgaggggcgtgtagtatgctgggaaggagagctgtggtttgaaactagagcctgggacattcccccatttcccgtgcccatttattgtgttgtaatgagtcattactgtgcactgtgctaggcactgaggacaagagagttaaaggacttccccaaagacacagaataagtaaacagcagctcactggctcaggatcctcatttatgagtgttcctaactcacacagcacaggtctgagcaccacagggtgatgtgtgtcttcagcctgaccaccaagatgggctgggggccgattgcctttaggtggcaataagccacagatatcatatcaccccagaaagtagagtcccactgccagctttccagttcagagtcgccacctccaggaagccttcccaacccctctgcccattctaaggcaagactctactcctttgatgctccctatacaattccttgtgtgtgtcccccatagtatcataatattcatgaccacctgcaaccattttgactctacttaccttttgcttgtgtccctgtcccccatatcccagtgtgctactgtttgcttattctgtgtccttggggaagtccccaccatctctgaaactccagatgagggcagcaaggatagcaataactaacgctgacatcactcactgtgtgctcaacattgccctgagaaacttacatgttattgattcatttattctttatagcagccctgtagatacatactgtcattacctgctttctcacacatgaggaaactgaggcacagagagggtgttttagtctgttttgcattgctataaaggaatacttgagactagatcttttacaaagaaaagaggtttaattggctcatggttctgcaggctgtatcagcatggcacccacatctgctcagcttttgatgaggcctcaggaagcttttactcctgggagaaggtgaaggggggagcaggcatgtcacacggcaggagaatgagagagagagaggggaagaggtgccagtctctttaaacaaccagctcttgcatgaatgaatagagcaaaaactcactcattaccacagggagggtcccaagccactactgaaagatctgccccatgacccaaacacttttggctcagccccacctccaacagtgggtcacttttcaacatgagatttggaggggacaaatatccaaactgtatcagagggtaagtaatgcacccagagtcacacacaggcagtaagtggcagagccaggatgcaaacccaagctgcctggctcctaaccactgcactgcactgcctcctgcgtgatagggacagtagttcccagctccagggcaatcatgaaggttgagtgagatgcatgtttatggtgtccaccccaggacctggctgtacattcaactttttttttttttttttttttaagatgaggtctccctctgtcacccaggctggagtgcagtggcacaatcacagctcacttcagccttgacatcctgggctcaaatgatcctccacctcagcccccgaagtagctgggactacaggtgcatggccacacacccagtgaatttttgtatttttttttgtagagatggggtttcaccatgttgcccagagtggtctcaaactcctgggctcaagcgatcctcccgtcttggcctcccaaagtgctgggattataggccaactcattgtttctgagctcttactttgtgttccaactctgtgccaggtcctgactgaggcattggggatatagggagcaaaactcatgttaaatatcagacaaataatcacacaagaagtcagttaactacttataacgatgagtgcttccaaggaaaaattctgggcaatcttggggtgtgaaatggggtttgatctaccctggagtatcagggaagacatttaaacaaaacctattgtggagagatgagtaggaactaaccacgggagggacagtgtgtggcaggcggagtgcagcagagggaactgtgtaggggagagcccagaggcaggagaggtcactgtggttagaggggtggtggggccaggccatacaaggacttccagggctggatctgggactgtggacttcatcctgaaggcagtggggagctcatcatttgatgtgggattgacatcgtgtgatgatcatcttgacagagaccagtctggctacagaaagagaatagagcagcccgagtggccaatgaaaacggctggtaagaggtggtggtggcctggactaggatagtggcagtgggaaagaaacagattttaaagatattttggagacatttcattggatttgagagatgtcagggggtgagtcccaggttcgtggttctatgaacgggatggaaggtagtgtcacttgctgagatgtagaggacacagggacacggcaggggaaggggtattatgatcaacaaacgagaacattgactgggcatcgagaggctccgccctggagctcagatgagtgaccaaggctggaggggtaaatgtggcacttagatgagaatcgaaacccagactggttgaggtccacctggggaggcaatgtagggcaggaagagaggggagttcaggacagcctgaggaaccctagatgagaacagagaaggagaaggtgaagcaggaaggtggacatggtcatggcctgttcccagatgactgtttgcccatctatgagatcatcccactgcagccctgcagagggaggaaatgagcaaggggccatgtgggctctgggtcccagtggtgggtcccagggtggcaaggcacttaccctctcagtctgttctacgactgtaaagggtagtctagggctctcccccatggaatttaggtatcttgtgctttctgctgttgccacaggctgtacacacacccagctatccccgctgctcagtaacttcatccagcagacactcagggaattggccaccaccaaccaggtcctgtgccaggctcagtgaccttcactattttaacacacgcacttaaacaatacaatgatgctagaaggtgttatttcttacatgctattgtggtttaggtttccccccacctctatgcatatttcttgattgatttaagatttagcactgtaggtaacaatatatgttacgtagttatatagtctgaaagagctagaaggaagatattgaatgttcccaacacaaatgataaatgttcaagatgctggatatgccaattaccctgatctgatcgttatgcattatttgtatcaaaacatcactgtgtaccccataagtaagtaccattattttatgtccatttaaaaaatgaaagaaaaagtgtagaaaacatttacctttatatttaccaatgcctttgatatgcttcctctgttctggaacattctcaactattatctcctcagttctcccctgacctattattctctcactcttctccttccagaatgctgattgaacaggcatccattagacactcttactctgtccgctgtgcacataaactctctttcatatttcctttttgaccgtctatgccaaactctggataatttcttcagagtcatcttccagttgacacacctcttttctgctaggtctaatctgttccagagtgtagaaatggaagaatgactcctcaagctaaagtaaccttgttactaaaaccccaacaaagacagtatgagacaggaaaattataggccagtcacacttgtgaacctgatacaaaagtcctaaacaaaacatcagccaacaaaacccaacaatctatagaaagaataatatgtcatgaccaaatagggtttattccaggaatgcaagattgatctaccattagaaaaccaaattacatgtttactatgctaactgaattaaaggagaaaggtcatttgagcctgtcagtggatgcagggggaaagaatttgatacaattgaaaagccatgcatgattttaataaagccacacactttgacccaccaggaggtccctcagcttgcttaagaatacctcaaagaacctgtggcaaatggcatcctttgtggtgaaatattgagctctttaagataaggaaaaaggcccggatgtctgttctcaccatttctattcagcgttgtcctggaggttcctggacagtttggcgaggtgggaaaaaaaaaacaaggaaggactggaaaggaaggtgcacaggtgactcctggtttctagcttgcactcctgcaaggatgtttgtgccatttaccaagatgagaaagactgagaagccttgggctgagtgttgggagcacaagagaaaatggcctggcttccctggaaagatcaccaggcctggaatcaggatacttcagctccattcccaactcttcccccagccatggatggactgctttcctccctggacctgagtctctatctgtgaaatgggtgggcaggaaagatggatccaaggtggactgtgatggccagatctggtgggaaaccagagaggaacagggggagccggcccccattctccaggagggcaggcttctgtgtgcagagcctctggtgggaggaaacatctgtttggggatagggcaggagtctgaccgagttagggcaccgtcttgaccctctgccttgcagaaacatcatcccttctctcctttgccaaggggttgctatcgttattattgttgctgttattggtgctgttgggtatgttctgcggttgtaaggcactgacccccaccgacatgtctttttgatgttttagacctacaacggccagagcgagaacaacgaagactatgagatccccccgataacacctcccaacctcccggagccatccctcctgcacctgggggaccacgaagccagctaccactcgctgtgccacggcctcacccccaacggtctgctccctgcctactcctatcaggccatggacctcccagccatcatggtgtccaacatgctagcacaggacagccacctgctgtcgggccagctgcccacggtgagtccctatcgcctgctgcagttcctgctgatgacagcagggagggggttgagagggaagcagaagaatgttgatgctttgataagaactctctgctcatgggcagggtctgggtttacctggttgcttggagttggtaatcccatgctgggattacctggtagcatgggagtctgtgggacacggtgggtgggcatggagagaaatctaatatcagcacactgcttccttctggagctctgcgtacagtatctcggtattggtttgcattatttgttaatagtataatctcatttttattttttaacagttttattgaggtataatttatattccatacaattcacccatttaaagtatactacttaatgacttttcatatattgacagagttgtgtgaccattaacacgattgattttagaacatttcatcaccccataaagaaacactagctaggcacagtgttgtgtacctataatctcagctacttgggaggctaaatgggaggatcgcttgagcccaggagtcctgggctgtagtgccctatgcaaatcagttggctgcactagctttggcatcagtatggtgacctcctgggagaggggaaccactaggttgcttaaggaggggtaaactggccacggtcggaaacagagcaggtcaaaactcccatgctaaccagtagtgggattgtgcctgtgaaaaggcactgcactccgggcatcatggcaagaccctatcacgaaaagaaaagaaaaatgctctgttgccgggcatggtggctcacgcctataaccccagcactttgggagactgaggcaggaggatcacttgagtctaggagttcaagaccagccttggcaacatagcaagaccccgtctctacaaaacaaattagccaggtgtggtggcatgtacctgtagtcctagctacttaggaggctgaggtgggaggatcactcaagcccgggaggtcaaggctgtggtgacagagtgagaccctttctcaaaaaaacaacaggaagaaacatcatatttttggccatcactcccaatccaccccctgaaatcttcagccctaggcaaccactaattgactttctgtctctataaatttgtctgttctggacatttcatagaaatggagtcatataattaaaaaaaaattgtatcttgcttaagctgccagagaagagggtgattactgagttaaagttcatgggataggtaaaaatgtagcaggcagacaaaggcaagaaagaacctttcccaggttgggggaatatcaggtacaaaaggaggtggcaagggtgctcgtgccatgcttgggaatagcatgtggttcatgctttttattgggctggagaggaaggacctggagccaaggagagagaggagatgaaagagctcagcagggcctggatcataagggtcctgaatcccattctaaggagatatatatccttagaatggctgatttgaggccaggcatggtggctcacagctctaatcccagcactttgggaggctgaggcgggggatcacttgaggccaggagttcaagaccatcctggtcaacatggtgaaattctgtctctactaaaaatacaaaaattagccaggcatagtggcacacacctgtaataccagctactcagaaggttgaggcacgagaattgcttgaacctgggaggtaaaggttgcagtaagctgagatggtgccactgcactccagcctgggccacgcagcaagaccctgtctcaaaaaaaaaaaaataataatggctgatctgaaccatcaaaatctatagaaaaatggtagaacagtagagcattttttttataccacagaaaaatctccttaagggaattctattgcttcttctgaacaactgtgacttgtgtttatttttgctttttttcccttcacatttaatattacgtactagtcatgactcttacgttcatttttaagtgacagggaccaaactcaaacttatacaaaagagtatgaaatatccagggggtggatacagggtttcaggcatggttcaatccaggaaccccaccagtgtcacaaggcccatttccacacaacaggcttgatggctgctggcagccagcatcttccctgacatctctggcagagaggatgatgacagcatcgctggacagaccactatgtctaggaggaagcagttcactattttgtcagcttgagtcacacatacacctgtggcacaggaggaggcctgcttagttgattttcctagcagaatctcatggtttggggtggcttgtgtctacctctgccatgactgttcagaagccacagtcgaatttgtggcccaattctagcagacccctgggaccttaggacacggctttatagtcaaacgatctcaactgtattttgtttactcttcatttattaccaccaaacttccttgttcaaaaaagcggtgtcctctgtgtatttttataaggcacgtcacatttttttgtttgtttttgaagctaggtgggaaataaaaggagacaagaaagggaaggagggtgggaggaaaccaactcgagatccacatttcatagtgtttggttctcacgaaagagttcaatgaaaatggatgctccgtttctccagaaattttttcctcgtgggtccatcaataatgcaagtcctcagcttcctcttctctctctcaaacctagcgattcagactcacactgccatgtctggaatggttttaacccatttatgcctgaggttgcaattttttgaatttttgctatcagaccttggcaatgagcttgagcagtaggatataaataactcccacatgcttagcgtttcagtaatggaacactaggcataaatgggtttccagttcgttagaatgcttgtaccgtacttgcttactgggctcattttctagcagaaacctcactgctccggaccatccctgtttgggatttatggtaatacaaacaagagcagggccaggtgggcactttgtcatctgctatgagggctgtggtgcaggggtgagcatggctacagtttggggccactgtgttgccgcctttggtactggggtgaatggagacagtgtggggtggtggttggtcccagacaccagaattagatcctggcttcacctttgaagcctcggtttccttgtcttggaatcataatcgtacccacctgaggattgtgatgaagtgtatcggagataatgtatgtaaagtcttagcaaatgtctggcagagagtaaacattcaatgagcacttgctattattatttgtaataaaaacgaatttgactgtaactgaatggcagtgttttcccttaagtctcatttacctaaaggagcagactgcagacgccctcaggtacatttgtagggccacctgattataatagctctgataattacaaagcatgttatctttttgtcaaagatggccccctaattgcccctcctaggaaatgcttttgttgggctctgtccaaataggcacttgcagtcgttttccagattttctttaaaagtagctcatgtttaagaggcttcacaaattcagatagccttaattcttccattagactttgcaagggttcactgaattttatattttctctttatgtcatgaaagataagccaaactctattacccaggggagggcacccggaccaactgggaaaaccagataaggagatgtacatgcattgggactatctggtgaagagagacaagggactcttcaagacaagagtttttaaattcatctgaaccacaggacaaaggggcgtggctctgtgtgtgcgtgggcatacacgctacgtgggtgacgctggaattggtgttaacacctgctgggtttcaagcaccgtgcagagggctttcaaacgttttcttgcataatccccccaagaagcaaaccgagggataatgataatagtatcatgaagggatggagaccccaaggtggcagatgattatattagtgtctcatggctgttccaagagattgccaccaacttgggggcttaaaaaaacagagatttattctatcacacctccagaagtccagaagcagtctccttgggctgaaatcacggtgtcaggaggaactcactttccccagaggctgtcggggagaatccagcctcgcttctcctccggctcctgggggttgctggtcttccctggctcgtggctgcatcattctgatctctgcctccatcttcacatcgccttccctctgtcagcaaaactccctttgcccctcttctaaggacatttgtgatggcatttagggcatttggggataatctaggaaaatctcccatctcaagatccttaatcacatctgcaaagaccctcttttctaaatacagtaccatttacaggttccaaggattaggacctgatgtctttgggggacatttttcaacctaccacagtgatcctcagctgtgcgacagccttcattgagtgcccactaggtaccaggcattgttctaggcttgtgatctacaagatgcccttgagggactcctggtgcagatggagagaaggtgaaaagcctatttctaagactgtggtaaattctctaatagcatcagtgtgtggtgctctgtgcccggaagaggccccttagatgtggggttatcacttcctagaggaagtgtcccctgatgcagagtagattctataagtactttgtgaatgaattactgtcatgcagctcttaaacagcaaggccagaatgcaaacccagctctatcccctgccatccacctctcagttttaccagatggctgagggatggtgcggctgggctgcagggccacaggtggcacagaggatgcgctgatggccagggtgcttcaggcgttgtctgcacagatcgagatacactgaggatgtcatccctggagaggcgggcaaggccaaggcatttgacagccatctcataaatgccaaagcccccttggctctgatcccagaggccaccaattctttccggtcccctgccctggcctgttcagccttgcaggcgtgggtgggagttagctttctgctttgaaggtatggcagctagcaggagtcatgtacagtattggaatcgaaccccttttacaaaattaaatatgcttaaggcttctctctcaacttcagcgtcttaactgattaaacatttatttccaagacaaaaagagtcaatttagtatgaaagatatattttgccggtttaatttaaagtgctgcacctctgtctgaccctgattttcataactcaataattttatcctgtgttgattgtctcatttcgagagagatattgtatgtataaatcagtttctaaaatacccaaagaaactcgaagagtggaatttattaagctgcttctgttaagtctgaaatcatttattttggagtcgtccttgggaaatgtttgagcttatgctcctggcttacccaggagaggaattaccctgggagatgacagagttggacattcccagacaggttcctggggaacctgcatcttttgtgagaccagagaaactcctgggagagcctcgggcagatggaggctgggcccagccagaaatgaattctggcaaagctcccccgacagtagctatagattctgctgatcagggaaatgtgggtttttcctgcaccaagccctgtgggtccctggagttgtgtggtcttgctgtgggactcacttagtgcaggagaggtatgcagtgtcattcatgcattctcctcccagctttgactcctgtttgctatctttgggatcttggacaagttacttctctcccagcctcagttttcctatctatgaaatggggattgggatttcagctctggtgaactcacaaataggaaaatgggtagaattgttttgttagcagtgacatactagacaagtatatggatctgaagttcaatagtcctcccactaccaacgtcacacatatcactggcctaagggggctcaaatactatcaaatgcagtacttagtgctgcgtttcagattctttgtgttctaggtccccgtcccaaagcatcttgccaagataggcccttcatgctgcacacacagggctaggggctgtggcccagggtcccccaccccaagtgaagggcctttccatgctggtgccctggactaggctgttggggaaggggctgagctgtaccttagttgccacttgaccaccttgctttagagatggttcctgtgcccggagcctgggggcaggatttaaaacttggagtggggacttgatcctgggggcagggccttggacttagggacaagttctgggtattgactctgggaggtccttgatataccttggagtggggacttgatcctgggggcaagggccttggagttagggacagggtctgggtattgactctgggaggtgcttgatatacctcctaacacctcccccattttcttcctgttctgaactattcccctccaatctcctttctctctcctcttctcttccctaccactttcctcctccctgcagaaggcatggtctatccctgttggattctcacaagttgagacataggaataccctcccaagttgcagacacaaggaagaaagaccctcaacccttggtcctctggtcttctgaaacacagggggcagtagggaccccctagtccaacccattcatttcattactcttaatgcataacatttttggtttggtcttgtcttatgaatgtatcaattagcttttgctgtgtaacaaactaccccaatacctagtggcttaaaacaatgaattcttatgatttctcattatttggcaggtcagcgaggtagttgttttgatctggactgattcaggtgatttctgaggtccagcttaaagcctgcctgcagctgcttattctaggatggccttattgacattgcagtgcttggcccagggtcagctgacaccaaaggggaatgatttggccactctcatatctcgtgatgagaggtgtatgtctcaaggctgggcatcgtggctcgcctgtcatatcagtacttcgggaggccaagatgggcagatcacttgaggtcaggagttcaagaccagcctggccaacatagtgaaaccccatctctactaaaaatacaaaaattagctgggcatagtggcttgcgcctgtggtcctagctactcgggaagctgaagcaagagaatcacttggacccgggaagccaaggttgcagtgagccaagatcatgccacttgcactccagcgtgggtgacagagtgagactatctcaaaaaaaaaaaaaaaaaaaaaaaaaaaggaaaagagagatgtgtgtctctcatcacatggtggcctaggatcattcacatggtgatggacacagggtgcaagagagggtacaccccaatgtgcagtacttttcaaacctctgcacgcatcctatttgccctagcccattggccaaagcctgtcatgtggcaaatcccagagtaaggggtggagaaatagatcctacctcttgaagagagaaatggtagagtcgcatcatatgagggtgtgcacgcagagaggcaagaatgtgtagctaactttgtaacctaccatgatgacattttgggttttctctgtgcatttttggtttcttggcatacagtatcatctagtagtcaggtgtataggctatgtggtcaggctgacctaagttcaaaccccagctcccctccttgttacccccaaccctgtgacccagatcaaggggttgatcctccctgagcctcagtttcttcatctgtaaatggagatattgttacctgcctcataggagtttataaagagtcagcgatccgatgcaggtgaagtgtcacgcataggcaattggtaaatgtaagctgctctgtttattactttaaccactttattgacggggttggggtggcttcagcctcgtctctaagtttgtccgggctgacctgctgcttaccaactttgtcgggggctgaggtggccagggatagtgggagggccccagctgggggacaggcaggggaaggcatattagttacacttaggacctcggtcagggctcagagcttaaaagcaacagcggagtgacagttccactgcttgccaagaaagcgggggcccaagacgcaatgcttcttggcatcgtgaccaagggaaggatccatcttagtcgaagcagggggttaccaggggcacctccgagttgggcttttccaaggtgccatgcttttgtctaacgtccctctggggatggaagtagggggagcactgatctcccaaatgggtctctgagggtcctaaacagtggtaactagaggccctgggcttcctttgtatttaccagagtccagatgaaactcctggcccctgtttttcagaggcattaagcaaaagaaatatgtctttttacattttataaaactcagaaaaatggctttaaacagcttttgctctcctgctataattatttattttcaaacactcctgcaggggaccgctccgttttcttaccctgaactcctttttctcataaatgaaccatcacttcaataaatcattatggaaacagagactaacaccggctctgaaaggttgaaagatttatgtaacacatttatgtttcccattttctcattctggtactcggctgcaaaagctaagctaataaaagctgctattaatatttcttgttgcctagcaaccccagagcgggagtaatagcttcggctagaaaaatagatgaccgataaggaaaaattcaattcttttattatctcagggggaaatggccttttactggaacattatgatgtacgagtgtgaagttgaacacaaaagatttttttgtatgtgtttgtttttctgtttttaatgaacattattttacctccactaactcttttagggcacttttacttttctttcgtaaaccccccatcccatccctcatgcttaatttagcagctacagtagttaagaatctgtcggcgttctttagtttaaaaatggtttttgcaaaggtttacaactcggtcataaaaattcactccctgttaaaactcaggccagtgataagctaacacgcaggctggttttctgtgaacaggatcacgtttgttgacgagataagattcatggttttccctacaagaaaggtcggaaaggaacaaaacatgttcttttccatgtcccagttttctttggaaccagggacactgtctcttttgagaaccgtttgctctgcagtttgggatgcgttcacactgggagaggatggggcacagatattcactgagcacctgctctgcagagccttggtgccgttcccttctcccagcaccctttaaggtaggaaccattagggtgcctatttttcagatgcagaaactgaggcttagagaggccaagggatcaggctgaggtagcatcttttttatttttagtagagacaggatttcaccatgttgcccaagctggtctcgaactcctgagctcatgcaatctgcctgcctcagcctcccaaagtgccaggattacagacgtgagccactatgcctggcctgaagtagcatcttaaaccatggtgtttcccacctgtgttctttagcgcaggggttcccaacctcggcaccactgacattttgggtgggatgattctctgttattgggggtgtcctgtgccttgtaggatgtctagcagcattcctggcctctactcactattcctggcctctagtagcactaccctagtcaaaataaaaacgaaaaatgtctctagaccttgccaaacatcccctgggagcaaaatcacccctggttgagagcctccgcctgctgttcgctctgctgagaaggctgttccaccttgtccacccagtgaactcctattcctgtatgaggacccagttcagaagttatcttctcacagaggctgcctggatgctctgggctggaacgagggtgaggcatgtgagatgcgtgcctcaaccataaaatttaaaggtgtgtccaaaaagtcatcaagataaaaatagtgttttaacgaaatattttgaaaaggcaagattaacacagaaaaccatgatgaacaacatatcagaaatgtaaattaaggtgggatcagtctgaattcatggcaatatgtggttgtgcatttaccaggggccaccagcctgggatggcctgaaggctgggcctgggccttgtgtctttctctggccccagaatctagcaaagggcctggttagcaggtgaccttcaatgtctgtttattaattactgaatgaatgggagaagggaattacttgtccagggtcacatagccagaaaaaggatagagctgggacttgaacctgggcctctgactctaagcccagttcttcctgcacccgcctggctgagtatgagtatggggtgaatctttgttgtccgctgagtagggacctaagctgtggacgattgaaagatgctctggggtgctcaccgtctaggagtggcgggcagggaacagtggccgtgatttcagcttggtgtcaacccggctttccctggggctgttatttcggcttcaccacctctgtgccaggcgagagctgacgtgggcagctcagtgacatgtggagcatccccaagaacatcacgatggccagccccttgcagcactgctcatgcccatggggccagatgcttcaccttggcctttggaggtcaagaaccacaccttatttgaccttgtatcctctcagtgaacttttcctaaaggaatgggtgaattatttataactgtcatgtaacatttatttagcagttactatggaactggcacctacttaaaccctttctatttataatctcacttaatccttgaccctgagaaggaggtactgttattgttgccattttacagatgagaaaacagaggcacagaggggtaaatgacttggctacacagttatcaaaatgatggtgccaggaattgaacccaggcagcccgactccccagcctgggctctccatatctagcccatgtagccttccaaaatgaatgagtgaatgagcaaggcagtgagcgggacaagatggagacccactttatctgcccagctctgagttgagctattcatattcataaataatctcaacatgaagtgtgaggcacttgcagcttggaacaagaaatggaagaagtgctgagctcaggggactgtcccggcaccgaaggcttcctggagggggtagccttgggggccagaggacagtgggaaagcctgagaggaagaaatttcatatgtgcatggacctccctgttcagacctgatcaccaccccttccgctgaaattcataaaacaatttgtgatgttttatggttgctcagctgccctctggtacccaccctttccatcccctgctgggctcctaatcagagcactcgaggctgagtgcaagggccaggtgtttaacttccactccaggcagcatgccaagcctaacagggtatgaactctgagagctgctcctgagtcatgagggagaattaagggaaaatcgcagcgacattcgtcagctgcagcctcgatattactgggtgtaatggctctttcctccgagtgcatattcaggaccatgtttgggaaaatgagcttttaatgtaccgtcggcattgctgagaagccatctttggctccgcagaatgtctggagcacataaaacttgagatttattggagtcattttccccctgctctgcctggataataaaaagtcagtctcatgagctctctttctctcatcttgtggctttgtccatttagaactcggagcctttataaaaggcagcaagacaaatacagctcatctaaatattaaagctccaggagagagtgtcgggggactatggaagactggaggctgggagcgtttccaggacaagcgcgccccatcagagatttaagctcagcagctgtgttgggctggggcccgggctatggtggtggcagctgcttgcccaagcagtagcacttaactgggagtctggggtcctgggtgcctgttctaccccagtgggtgaccttgggtgaattactgtctctctcagagcctcaagtaagatggagctgatgctgtctactccacagagtgtgggaatcaaacgtgccaatgaatatttctgatgctttgcttcatgtgtggcatgtagcaggtgtctgaaaaaggtttgttgactgactgactgactgactgactgactgaaaaatgaatgaatgaatgaatgaatgaaaaataaatgcctctgtaaacacctcaaacatcatttttggagactaagttacatggggaccctatagcatcttctgtcttacacagcagtctgcttcatatcttctaaccctcctgttgactttaagggagatagaattctgctcatttacagatgtgttcccaagacctaaagggaaggtggcttgtccaaagacacacagctaggaagtggtgaagacaggatgggaccctgattcttttgaccccaagtgctttatgtcctcaacacaaaaacatccctcaccctatccttggcccaggcctctgagctgggatggtgggcaaaggtgggacccttgcccctgtctccctatcgagtgtgggtgttggtcaaagctctcagctgagacagggttaggagggcaaaagtgttggtttaatggctctgtctccaaactcctggtagcaaggaaaaagggaaggaatatcaggtgagtagtcagaacctgtcatagggtgtgtgtgttgggcagagctgtgggactgggatgctggagccctgaggaatctctaactaactaactaagcatggttagttcttcctgtcatcccggaaactgataacaagaccgcgagtcaggaagcctgggtttaacttcctgtctctgccaccactaagagattgtgggagacaagtcactttccttccggcctcactttcttcacctgttgaatggacaaaacctaaatcaccccagggagttgtggaaaggatcaagggagagggggcttctaaagcatttcatgaatgagctcctcaagagattcaagtctctggagggtgtggatcacagccggctcaggagagccccgggattaggaggtagggctccaaggtcaggcagcatcagctgcacatgtaaccagctgtgcgacctcagccaagctgtttaacctctctgtgccacagtttcctcccagggttgttgtgaagagtaaatgagacattagagatgctatctggagccgcgctagagggaggtctgcctggtcccacaggcagcactgcagcgtggattaggccacggagttgctggcatttgttccccagtgtgaactgtgaatcagtcatgggtcacaggccagaagtaggtggagctcctgcataacttcctacgtaagacggccccccaagggagggagagcattaggacaaatacctaatgcatgcggggctcaaaacctagatgacaggttgataggtgcagcaaaccaccatggcacatgtatacctatgtaacaaacctgcacgttctgcacatataacccggaacttaaagtaaaattaaaaataaaaataaaaataaaaagatggcccctcttggccaagggcagttctcgagaaaggggcaggtgtgtgcctttggcagccacactcccagcaggggatccagcaagacagactactgctgagctgcttctggaaacgtgatcctaaggccagcagcagcagcattgcctggggacctgttagagatgcagattctcaggcccctccctagacctggtgactgggagactcggctgggcccagcagcccatgcctaaccacgcctccaggggcttctaatgccagcccagaacactaggctgtggtcatcctcagttgagccctgaattctcagttgttttaggacacataggatgcacttgtgtttctgtttgccttgaggatttcatcacactgaggatggttgcagactttttccccccagaggaactcgaggaccgacacctctgcctgtggttcctggttctttcctaccctgtgcacctcccattgggacaggccttgaagcggaccctctggcatgatgacagtcccagcctgtgatcagaaagactctaggttttcctgaatcgcacgacgcctcatcctggggtgcttcatgggcaattgtgcaccaagggcctaagaagaaccaggaacaaaatgcaacagggaaaagaaagggggcctaggacaggggaggtatcagggacgtcttgtgaccagaacgcaaaattcctcccactgcttatgggggagaggggtgtgcatatgccggggaagggatggatcagcaaagcccattctttgagatcataggaggacagagtgtgagcaggtagacagactcagacatttgcagcactggtagcaactggcccgggagaactggaccttcgtcagaagcacagggtaacagcaaattatggggccgtaagccgagattctaagactgaaggatcagcctgagatggtcgctaccccatcccacaggactcctcttctcctttgggagccccagacctgaggcccctgtccctgtgcacacaagacccccaaccactccctttttgtctgccttgtgaacttgacaccttcttaccttctgcttctgtatccctcctctgagaagcagattaactctagccagtacattggctgtgccctgcatgcttccactaggtcgacttttttttgagaaagagtcttgctctgttgcccaggctggagtgcagcggtgcaatcatggctccctgcagcctctaccttcctgattcaagcaatcctcctgcctcagcctcctgagtagctgggatcacagacacacaccaccatgtctggctaatttttgatttttttttttttttaagagatggggtttccctgtgttgcccaggcttgtcttgtactcctggcctcaagtgatcctcccactttggcctcccaaagtgttgggattataggtgtgagccaccacacccagcctaactgactttgatcacactaaaccagaactgtaccttcccataacccactgcaaaatgaattccagatgtggtagggagcaggctcactttgcccttagcacgtggcggaaggcccgtcacccacacatgcgtccacagcacaagtgagcaatggccggccgatgacgctggagacaaaactgtccttcgggaacagccccttaaccgggactctccttgtcttctctgtgcccatggccctgctgagaggggggtcagcacattgccagaattaatgtcactggccttggacttggagagaactggattttgagtttctccagctacatgcgtgttgaggaagttacccaggccctctgaactttagtgtttttttttgtgtgtgtaaaatagatgtattattcattcttaccttgtgggttgctttgaaaatcagatgctgtcatgattataaagtactcagcatgggagccatggcaatgctattatttgtctctaagcactttacgtgtgagctgtctctttttcttccctgccaaccacatagagggctctgtatcctttctggttcccccaggaagtccaccttcccaagcattggtgaactgacagtggatacccacatggtctcacaggggtacctggcacaaacagtttactcatttttgcagttccatgccttattgtggccacagtcactgtgagcctgtgagtgtatccctgccctgtggcatgttccatgcctggttcttctctcggttctgtctgtcacactgtgagcccctcagccctggcatctcccctatacttacctctgtgcccatgaaaccaaagctcctccatgggcaggacctgccttcgttagaaattagcttagtgacccctgagtggggtgtccttgggatccaccctccaccccaagcaggtcctcagtgtgtttctatcaaacaggtacaatttttctcccagagacagattctagttgtacattagttggagtctaccaagaaacaggcaccagacgggattagatatgtaagaggagagagagagggaaagggaggtggggggaggaagagaaggccagaggaggggggaagcttcagaccatgatataggtctgaaaccagagggaaaaaggatgggaaggagggaggaaagggaagaaagaaggaaggaagtgaggtaggagggaaagatagaggaaggaagggacagaagggaaggaaggaagggatcccagcactttgggaggccgaggcgagcagatcacctgaggtcaggagttcaaggccagcctggccaacatggtgaaaccctgcctctactaaaacaacaaaaatttagctggatgtggtggtgaacacctgtaatcccagctacttgggaggctgaggcaggagaattacttgaacttgggaggcagagtttgcaatgagccaagatcgcaccactgcattccagtctgggtgacagagctagactttatctcagaaaaaaaaaaaaaaaaaaaggagggaaagaaggactgactggataggaagatctgggtagcaaggactggacaggaagcatcttggactgcatcagttttaagaaagattggccaggccaatggggagtcctcaaaccaaagctgcccatcagaagagctgcacaccttccccaaatggacctgccttaagcaccaatgtgttcagacactgactgggcgtgaccacaggccagcgtggcctgggaggcgcatgctcagggagccgaggagctgcagctggtgctctcagcatcagtgccacctggcacagaaggtctgagtcccacattttggtggccagcacagtccatcccttttgccacacagctctgcttctcatgcaggacagtgagcagcacctccacgtcccgtgggccctcacttctgcagggaaacttaacaaatgacaacctcattgctgcctctggtcttggggctgccaccagcactcacccccttccctccttcctcagccacatcccctctcccttagcccgtcccctctctgatccggtggtggctttttataagatagctttatcatacttctgtattgaggttccactatctttataagatgactattacactgagttctcctgagtaatctactacactgagatctcatacttctgtattgaggttataccatcttcctaagatgattattacattgagctctatacggttattaccatggagttgtatatagtattaccttatctcttttatggtcttcgtatctataattacaccctgattcataatgctaaagtcatatattggtggtttctccctctcttttctgttcacctttacccagggtttatccatcttattgctttatctacattgttttattcattttattcagaggactaagcatcagagttgtgttccaattctcttacttttctttctcttaatgttttccctctttatgaatcccttctttctttttgtagatgtttacattttttattttgaattctttagttcatttacttttattgtttattgtttaataataaaaagtttatggctgtacattttttcttagtatggctttggctgcatctataaattttgaaatgaagtcttcttacatcttttactttcttcccaaagcatagctttgtggatttgatttttaaaaaatggcacatgttcactgtgaaaaaaaaattaaaccaacaaatacaaagaagtaaaaattgttaaaactgcaccatccacaaataatcattattaacccaaccatttactaagtatcttttcagtcttatctttgtgcattatacacaaagataatatatacaataatatatacaatatacaaagatatacaatatacaaagataatatacacaatatataaaaatatgtacaaaatttacatacatgggacccgaatgtgatgccttttcctgtactttccagtgtgttctattggagcagttctaggacctgccaattttctgcaacagtgtatcatgtgtatacttccacgtgcataattacaggtcttgctcttccttttagtggctagataacattccatcatatgggtgtttcatcatgtacttaaccttctgttgatggacatttaggctatttctgatcttttctattataaactctcttgggatgggttctttgggagtggtgaaaaggattttttaaaaaattttattattattatattttgagggtgggatctcaggagagggagggagagatgttaaggcagacagagaagtttcccttggatgcgtcgagcctctgcctgcccccaggggtgttctggagcataaattgcaccacacagttgatcccatcatagggtaaaggggtagcctttgcacccccatgtccattcgtcgttggccagagattgggggatggagtgacctcctggggctgcagtacctgttggcaagtggtgtcctctgaagaagggggcagctgagagccttcaccaaccgatgttcccagcagctgggggacaggttgctgctccagtgaagggggcccaggaaggggccaagaacttctgcatcagctgcacccccactcatggtgccagagatatcagagttctccccctcatgtcagcactgaattttgtagaactttttaaaaatctgaactaatcctatgtgtgaaaaatgttattttctcccctcccaccacatgtctggatccttgggaggaatgagttacagcttcccccactctcagaaagaacccagatcctcagtggaggagtaatttgatgccatcaggagagcagggaccttggggctggaagattccagctcaagccccagctctatcctgggcaatcttcttcaccctttcagcctcagctttctcatctgtaaaaaatggtaaccatcatagcgcctgcctcagaggagggatgtgaggataaatgaggagccatttgtggagccttccaaactgtttacaggttgagaggccctaaagctcctggcggggtggggtggggacacatagtcctctgacgtggccatggagtcctgggtagggggaactctgatctttaagccagcttggattctaagatggcctgttgccttgaacggctgtacctgattggtcaacatttggccattgcccaaaaggggctggggataatgacttctttccgcgtgattatagcagcacaattcacaattgcaaaatgtggaaccaacccaaatgcccatcgatcgagtggataaagaaactgtgatatatatatatatatatatagacacacacacacacaatggaatactactcagccataaaaaggaatgaattaatggcatttgcagcaacctgggtgtgattggagactattattctaagtgaagtaactcaggaatggaaaaccaaacatcgtatattctcactcataagtgggagctaagctatgaggatgcaaagacataagaatgactcaatggactttggggactcagggagaaagggtgggaagagggggaaaaagaagataaacagcatattttgaactaaaaattactccttgatattaatagtgggcattcctcttaaattatggattaaaaaaaccctaggaatttgttttacctcaaaaataaaataaaccgtaataaacctaaaaagggggtgctggagagcaggaaatgtgtggcttcttctgcctccctgacactgtctcaggccagacctccccacacccccttcatcaattaaattgtggtaaattaggcggtaggaaccaccccagaactccaagtccttctgtgcctcaggtccactgtgtgacctcagggctggttctgaccctctctgggcctccttccttcttctgtggggtgaggccactgagccccatccctgagcacccacaactctcctgggaaaggatctgggaagcttttcctgccgcctcctccccaccttgggcatttcagtctcggcttaaccagccacttcaacacaggcaacacttttctcgagagttcataaaaacatgtaaacacgggtgaggatacaaaatattgagcggcgaggcagtaaaacacggcagtgtttgttgtgttaactgaatattcatgagctgactgtttaaattacagttcacaactgttgcagggcctgatgaataatttaaatgagggtggccaaagagatttcaacactgcattagcaaactgctcaggatcagcttcagagaatttataattagctcagaatagcctataataaattctttggaaagatggttttaattagcacatgtgccaattcagaatggagaatgttcagcgttcaggggagggggtgggtcaccctcccctccttcttatgtttccccgtcatgcggaggtcccaccacctgcctgggatccctgagccatgctgagcccacccggaacccaccaccaggcttcctgccttgagtctgtcccgcctccactgccccatcccagcttaggcctctccgccatagcctgtgcagctgcagaagcctctgacctggtctccctgcttctgtgtctcctgctccagttcatccccatgggggcagccagtgggaacttactggatgcagatctgattccatctctgccccatttggagatccttaattgaggaggcccagagagatgaagtggctggtcgagctcaaataggtcccagacaccagttgacttcagccagtgcctaggtgcttggggatgggtgaggcatcactggcagaaggaagtgcacaggcaaagatgaggaggcaggaatgttctgtgtgtcgggggccagtggggagcaggacaagcagaggcttggagaaagcaggggcccgaccatggcgtgcctcaaatgcttcgaggtggaggatgtaggagggaggtcccacttaggggatcatggaggctgccagtctggggcctagagctcccagcccacctggctcattcctcaacatgtgctgagtgcctgacaggtgccagacctcgggctgggcactggggaaacggctcagagcaaagcaccagccacggttccctctttcataaatggagcacacaaccagagccatgtacacactcagccgaaggtacgactaacagctgtgacaagttcaatggaaaaaataacagggtgtcaggagagagaatcagcagggatcctgatttaggtggggagccagggaaggcctcctgaaggcaagggcatttgaactgagtccaaaagtgagtaggggtgaaggaggccaactggtcccaggtggaaggggctgccccattcccagagggggtgctgtggctgggcaggggggtgagggggtctagtagagcccccagcagcagcctagggtggggctggactggttctgggagaggggcatctgtctatggggagctcattgctggaggagaaaataacctacttttctgctcccaaaccctcgctgcagcgcttagagctgcaaaccttgagcaagacattggagtttctctgcttcattccatcaggatcactcacgcactcattcagccctcacacttttattaagcccctactatgtaccaggcactcttccaagccctgagcagtgaacaaaactgatgacaatccctgattcctggagcttacattccagtgatacagacagacaaagacgcaaaggagtaagatgtgccctccctggcactcagatgggggaggaaaggttccctgccagattctctgatgccccctcccagtcctggtgctgtgggcagggctctcagaccccttttgaaatagaaactgaagatcaaattcaggaatttggaggattcacagcttggacaggtcatttttagttatccacctgctgtgaccaagggcagccagttctgcctcctcagctctctcctgtccatgacatctgccccatgtgcctcttgaccctgcctttagcctcttgccctgagcacaggggaacctgctgggccatcccccactcacacaccactctggacccccagtgactgccagaccaagtcctcatccccttgtgatctgcccctcctggctccccaagcttcgtcccttccttggccacagtgaaccctggagtcctggcagccccctgacactcagggtcgccaccgcgctgatgctgaacagcaagcctcgccctccagctccgcttccatcacagcagttctgtggtttgtcattgtttttgaccagtggttccctctcaattcttcacaaagatacagaaagataagtcacaaagattagtcaaaacaagacggatattgctgtgctgacctgcttggtgataacaagcaccataccctttcaggcactctgtaaccgtgggtaagaggatgtggtgaggccagcccagcctgcaccatgcccctctgccctcaatagtgaaaagagctcaaactttggggtcagacagacctgggtttggatcctgatcctgctctgtgtgcgctgcagacagggagccatgaacctcacctcttggaggctccgtttgctcaactgtaaggtggaaacagcagcagcgacctcacagggttgttaaaagaaccacttgacccccaaaatgagaacatggcctgtgagtggcaaacccatgttccagtcacccgcttctgcagttaggatccccatggggaattgctgtgatgggaacacctgccctccacaatcgcactttctgctcagcatctaaatagaaagttgtcctgtgacacctgcttactgtctcctctctcccctcgtggtcccagcagagcttccaaaagggggtcattgactctggctgtctatatttcctcccctcccatttgccttgacctctgcctccctgtgactataaaactcctctggttaggggcactgatggccttcacgttgccaaacccattgggcacctgctgtctttatcatccttgactttgactgtattagaccaggctcctggtgtcctccacccctcaggccacccttttgcaccctcctttataggactctcccgatgctccacgctcatggctgggtaccacaagggagtccaggccatttccactgctctatcccctctcctaagcaccagaccatgcaatcggcccccacctggaaacccccacttggatgtcatccccaagttcagctgtctacagctggccactctcccctacctggctggatgtgtctcttctcctatgtaagcagcccatgaatttcatcagtaatctggtatgagtcttaatctgccagaaccagtccccaatcctaagtctctccctccatctcttgctttccatctatctgagtctcagatggtggctatatcacctctcagctggaagttgccacctactcttagcagccaagctggcctttctgaaatacaagtcactgctctgcctaaaactcttatgggtttccaatgaccctcaggataaagtccaatgtcttcccctggcattcaaggcccacccagcctggcccctgcctgtgactctaagctcctccttccccaaccctcctcacccctcccactatccttcactcctgccaaatcagggcctttcctgatgcccagtgtgcccttgaccgctgatcttacagcctcacttggcctttggcttccctctcggccctcaccaccactgtgactgtgtattgatttgggtgtagatgagctccacagggcaggggagtcccagtgctcagcacagggcctggcatatagcagatagttaataaatacagatgtgcctgctataaagtgacacatgccttcctgaaaaacctgaaaaatcctaagaacaagagtttatgggaaaaatagagctgggacaaactactcaaggtctatgcaactttgtaaccagagcactaagagaaaaccattacattcctaatgtatatatctgcacaattaaaaagcatttgttaaattcttccttaaaaaccctcagtaacaactggggaggcattttgatggaaggggttttgaggaagggtggggagacattttgatggaagtgggtgtgaggttcactgctgagttatggagacaagggcaaaatgcacaaagatggagaagcaagcagttggcgcctttacaccagagcaggtggccaagtggtatgaaggtgggccaagtggtacacaagggcaggtgggggaaggtgggcgaatgggcattggaagcagcgctgcttcctccactgtttgctgagtcctgctctgttagcgccctctgtgttcagccgctgttccttggtagcataaaatagtactgcgctggaataagcctgtatgactgagcaggactcctctgcaatgccactttccccgttcactggaaggggtgagatacttgtgtcacaggagcacgctgcatttgtcaagtgggtgagcgcattagtagcatgggttgtgctatattggtgcgattagctcattccatctgtttgtcccgctggacttggtggccccttctgcgtggcaaggtctgtgcctgcattctttgtgtctcaggtcctgtggctcattgaccgccaccgtttaggtcctgaggctgtgacagttcacaggccactgtttctgccctcaaagaaccaaccgagaatacaccatgtggcctgtgggagttacccaaaagcacttgctggagaaatgcctaagctgcccattaagagacttaccataggccaggaaaatgaagtgggctctgaaccttggcaagaaggggtggatttgggagaccaggaggaggtggcatgtgcttttgagggcccagcagaagtggagggtgaagggagggggaggttggtggataactcattcaacattcactgaaccccctgctaggtgtcgcggtctagataccagcaggcgctggtctagataccagcaacacatcagtgaacaaaacaaagatctttgcccatgtgcaatttacatcctagcagggggagcgagataataaacaataatctactaaataagtcatgcagtatgttagcaggtgttaagtactttggaagaaagaacagaagcataatgggatggggaatgctggcccggtgtgaggggcaggggagcgggttgcagtattgggtaggatggtcggggaaggccttctgataaaactgtggtttgaaggaagtcttgcagtaggtgagggagggagcagggtgagtatcccctgctgggtgggggaagaacattccatgcagaggcagtagctcacctcccatggttttccagctcagcactactgacattttggactggattgttcttcattgcggggctgccctgtgcattgcaggatgttggccagcttctctggcctctacccaccagatgccaggagcgtccccgcggttgtaacaacaaaaatgtctgcacataatgccagatatctcctggggacaaaaatgcactgagctagaagagagccctgtggtgggaggctgctcgagtgctgaaggaagagcaagtgggggtggatgtgatggagaggggtgatggaggggactggagttggggaggccagagaggtgccaggtggtggtggtggtggttgagttgttataggggcttgtggctcagtaaggactttggcttttacttgagatatagtagggagctggagctggctctgagcagaggagagagggtctgtattgcagaggtggggagcacggggactccccacagccccatcccaacctgaacagaaacctcacacccccagctgagcaatcccagacccaggggcttggtgacccgtatttgcaaacctttcttctaagacaaaaccagcccccaaaggggacaaattgcttttcatttctctgcttctctgccggcggcttcatattcataacacgatgatcagtatcaccaggaatggggctgttgccttaaaggataaattagtctgactcttaactcaataattaaaactgtgatggcacttggcctgcagggataatatgctattattatagtcgtttgtttcaattaaatgcttactgattttacaatagcagctgggcacctgtgcgctacagctattattctgaacaagacatctacatttcaggagaaatttgtcagcgtgcaaaggatctcccaccaagcatgaaagtgtattagcaatacgtactgacgaggcttcggggccagaggcaggcacgggggaggcttcctattggttctcttttcctctcttttgtgctagattttttttttccaaaaaggagatagttttcaattatttgacacttgaagccccaggacatctcagagagcagtgtgcccctgggaagactcgcatgggggagctttagttgtgacttcccacatcattgattctgggctgcagtaaactgaatcatgccccaccagatgcccatgtcctgatccctggggcctgtaactgtgttaccttatatatcaaaaggggctttgcagatgtgatgaaggtaaagatcttgtgatgggcatatggctctggtttatttgtgtgagctcaatgatgtaatttcagaagtacttacaagagggagatgggagggcccaacagacagaaccactgctgatgaaaccacagaagcagagagcaaaaaggtcatgtgatgtggggccacaagccaaggcatgaggatacggttcatccaaaaaaaaaaaaaaaattatggaaatgcttctcccctggagcctccaaagagaacgagccctgccaacaccttcactttagttcagtgagactcattttggacttctgacttccaggaggtgcatgtgctgttcttgctcctgcaacggaaggaatttttattaagtttgtggtaatttattacagtagcaacaggaaactaatacacagagtctctgctgccttctcagaggactgagacgtgtcgactttcactggggaggcagatatgctgcagatcatagggcttcttgtcagttatcagtgcccagacctgttgcctgtggccatccacttagcatctgcaagcatgcttaccctccaacaagtcccagcctctggatacccctttatccttatctgccaccctacccatcactccagccctgccaggctccaggcagcttgcagagctcatcgcactggcccatgcctcagtgcctttgcatgtgccgttcttgctcctggtacaccctctgcaccctccttatcttctgcagacttcaagagtcagttcagtttttttttttcctgtggaaaggcttcctggctgtccaggtattggaggggctccttctctggcaccccacaggaccccaggcacacctgggttgctgcactgtttaaaattgtggggtcatttctgcctcccccaccagaatgtgcactcctgcgatggggtgtttctggctcagggtctcagacataagaatcctcagggaatgtttatggaatgaatgaatgaatggagtaccaggagcagcatggagctctgggaggtcttgagaagtgaaatggccacagaaagagttgtgatgagggcagctcaagacagaggcctgcagaggatgtgagaaagaggctcgaggcagtgactcaaggaagctcagagtcagaggacagaacagtggccaacttctgggtctctgtcaccatccaggcctctctgccaggtctagacttccaggctggactccagacttgtgacctctgcttctccttccaggactggcatgcaggagctttgtcttgacttctcacatcattgatccaagtgtggtgggctggaagagaatacccccaaaagatgtctacatcctaattcccagaccctgtgaacatgttagcttccatagacaccctgttggctcccaaaacttaacacatgtctgcctgtgctcatcaccttcactctgctcaatcctgctcctccttctatgtctccacctcagagaattgcaatagccaccccttatcaccatttcatcccaagagtcttgcttgactcagccactactcatcccacgcattccactcaatcacctgtcaatatcaatcttcctcagtgcctctcggacctacctggtagatttggccactgccatagactgtaccagccccctctctgggacctcttgtctcctctctcaactgcctcatccatgtgcagccagagtggttccatcgggcaattctgaacacgtcctcccctgctgaaatcccttcgatggctccccatgggtctgggagagccttcccctactctggctctcaggccttttgctgtccatccctgctggcctctgaagcctcagtgaagccaccttgggtcctgccaggtccatgtcagctccacggctttgcacaggctgtttcctcttcctggacaccctcaccttcttcaccagctaactcctgagcagctgcaagagtcaggccagactccacttcctctcggtggccgccgccttctgcagactaggtgggaaggtcgctgcacatgtcttactcctgttcccccacgaccaccacacaaggcgtcttgaaggagggactgtgttctggtcagccatgtgttctctaacccagcatctgcactcagcactggacatactcaacaagggttgctgaagggctggagggagacgtggctgatgcgtggggagaggctggttcttgcccaggcattgggaccctgctcaatgccagggagatgcagagagcttgaatgtgctgggtaatggggtaatatgggccagccaggtggctgtcatctgtcaggttccctggaaacagactccgagatggagattgtgcacagcaagttttaggggagcactctcaggaacgtcacccatgagaagtaaaggaagcagcctggggcagagagagaacttgaaccaacgtgcattgctacagaggcttcagccaatccagtgagctctggaatgctaggatgcgccttctgagatgtcccaaattgagtcaacggggctgggcctttgaacccccacatcagtgaatgtagaccaccccttggaagggcttgtaaccatgggggaagcagctccatcagccacaggcaattcctggagagggttgcagctgcgagctgtcagaagcccatatgcccggcagctggagaactgagtcctgtggtcctgagggggccgtcgggccgtgcaggggtcacagctgcactgattttagagagaggctacaacgcaaggttagagcaagagctcagcttgtggccagcacagggcttggccaagtgagagcacactgagtaggtgttcactgaggctgtgctgggcaagtgggtgcagcaatggggtagggctgtggacacaggcctgggagccacacagacattcatgtgaatccagctgtgccgcctacggccaaatgaccttgggcacgtgacttctcattctgagcctcagtttcctcatctgtaaaatgtcgatgataagcacccctttctcgcatgcctgagtaagaagtaactggtcaacaggtcagtgtctggcaaatgctacctgccacataaaggataacatttctaccatcgcttctacttaccacactccactaccagaaggattgccagtctgtggccctgggccaaaggccctctgcccatttttgtaaataaggttttattggaacacagccacagcccttcatttgcattctcatctatggctgctttcctgctcctgcagcagaattgagttgagtagtgattagagaccatctggcccacaaagcctaaaatatttactgtctgaccctttacagagtttgccaacccctggatctgacaaatatagcgaatatttgtgaagtgccctcctgtgccaggctgggtgctgtcatttttagtgtccttggaggctccctcctggcatccctctcctctcagatttcagaaccttctattgtttctcacctcttcttttcttttttgagatggattctcgctctgtcgcccaggctggagtgcaatggtgcgatcgcagctcattgcaacctctacctcccgggttcaagcgattctcctgcctcagcctccgagtagctgggattacaggagcccaccaccatgaccagctaatttttgtatttttagtagcgacagggttttaccatgttggtcaggctggtcttgaactcctgacctcaggtgatccacccaccttggcctcccaaagtgttgggattacaggcatgagccatggcgcccagtcatttctcacctcttcttagcccagttgaggtgcagttcaagctcataccttaagcaagttaatgaggggatgaagaaaggaaaactttcgtcttgaacacactaggtgtctgactctgtacaaagttagctttttgtttgatcctcacagctgccccatgagggcagggtcattgttaccccatgttgaagctgttaagatctgtatggatacagtggaaaacatctcagactcagaagacaggcagaattctggctttcccactttctggctgtgtgatcttaggcaaatcacttaactctctgggtttcagtgtctttattgtcaaatgggggtgataagagtgcttccatcaaagatttgttggtgactcttctagcatggttcctggggtgtagtgagccctcactcactgaaatactagatattattatcattattattattgctatcattttctataaaacaaagacgttgggatctattggaaagtgctactcttttaaattactcagtgtcaggtagttctttatagcagtatgagaatgaactgatacagaaaattggtaccagtaacggggcgatgctacaaagatacctgaaaatgtggaatcaactttggaactgggtaacaggcagaggttggaaccgtttggaggggtcagaagaaggcaggaagatgtgggcaagtttggaagttcctagagacttgttgaatggttttgaccaaaatgccgataatgatatggacaatgaagttcagtggtctcaaatggagatgaggaacctattgaaaactggaataaaggtcactcttgctatgctttaatttctgattgtgctcagaaattaacgagaagtgctgggtgccgtggctcacacctataatcccagcactctggggagctgaggagggtggatcgcttgagcccaggagttcaagaacagcctgggcaacatagagagaccctgtatctacaaaaaatataaaaaattagccgggttccgtggctccacctgtggtcccagctacttgggaggctgaggtgggaggatcgcctgagcctgggaggtggaggctgcagtgagctgtcattgcaccactgcactccagcctgggcaacagagtccaggaattaaggagacgtttctgaaccctctcaaactgaagcagggacttaaataagagcacaattgaacatagccgttgttgccatcagaagattgattctacatcgtatacatctgtcagcacatcagattggaccctatgcatgtatacaactatgacttgtcaataaaaagaaaagaaaaaaatttaattgtgggggaaaaaaattccacctttccaggctgaagaaaataaaaaaatttaattgtggaaaaaaagaaaaaaaaaaattccgccttcctgggctgagtgtgaggctgtgttgaatgacagctcattcaggcttcggaggacgcagggtggctgccagctctgtgaatcggcagaaggcgggaaggaggaaggtgtgatttttcttgttctctcctcactgtgtggggttacactaagcacacggggctgctctccatagagactgcaaatggggaatttgtgaaaaacgcccttgtgttcctgcagccctgcgaagctattaagctctgcgatcctaattacattcacagccgcctcgttcctgctgcctccgtgtctcctccttcctggggcgggtgcagatgtggctcgggagcgtggccatatgtttccaagagggaagcaggaggctggcttcacttggttcccagacatctcatgagtgccggctgcctgcccagccctctgcctggtgctgggaggcaggtgtctctgcacttgagcagatgccgggaggcaacgtgtggagagctctgccagaggcttggaaagagggtgaggccagaggatggagcaggagagggaaggcttctctgaggaggtgacatttcaggtaagccataaaggaggatgacacagagggcaggtgtccagtctagagagaagcccacatgtccccagggagctctgggaaggggctggagaggtcaggaggagagagattgtacagatcctcatggagcattttacatggctaggccattgctaagtgggcccctgggagctgctgagagatggagagcagggaggcgacatttcatgctccagaagggtcactgcaggggccagcatggtgcctggactcaggaggccatgctggaggctgggactagagctgcatagcttgagatagccctgaaaacagaccctgacacaaaggtttgggtgcaagtagtttgtctcaggggtgaacccaggaagcccttggagggaaaaaggcaagtgagattgaaaggaaagaaagtcatgggttgttacctctgtgggcaacaggaacggggtcctgctgtggaccctctgaaagacttgtggatgtgatccgggaaggatgtcaagtcttccaggacgcaagtcagaatcgtcccactgaggggagaggaagtcgaggtttcatctacaaactcctgttcctcactggctgagggtcattcctggggccccagttggtcagcacttccaggctgtttggggcacagaacaccctcaggcagggtgccgagggaagctgtccgcatgcacaataaccctctgtagggacccccgaggtgggccgagggccggggggcagggtctccactgcatctgctgcagctgatcaggacaaaaggccttagctgctaaaagtgttggggcagcggggtgtgggttctgattggagtaggggtctcgtgagctggtagagtgttctagaatgcatggagggatgggcagggtctcaccacttctgtgtccctctcttgtgagctcaactttcttcttctaaaggctgaaattggctttaagcaaaacacgttttgaggtgaaacttgggaattttagaatcatcacggggatgcccctatctgtaggtgtctatggaggagccacagacttacttggaaggaaagtaagatgggaggaaatgtcagaaccttaggaacaccagcgtttagtgggtgggctgaagaagagcaggaaggactggctggagaggtggttggacagtcaagcactgggccctggagaaaggaaagggagctgggaggggaggcagcaggcccaggagttgaggatggagaagtgtcttggggaaggcatcataacttagggaggagggtgatactttggagaagctcaactccacctttagtagctgtgtgattatgggcaagtctcttggcctgagacttggctttttctgctggggatgattatattccgcctcctgtatagttgtgattaaatgagtcataagtggacatggtcagcacagtgtctggcacatattaagtgcttaataaaaatctgtcctcctcttcctctttctcttcctcctgatgaggatggtggtgaggacactgattacaacggtatgggtagtaatgaggacagatgccaggtgagtcgctggtggggggagtggcccaaggacagtgaggagagacaattctttgcacagttggctgcatggagaagaaggaaagttggggcagaagtttttaagagacctggagctaagagagattttaaaagatgggagaggagtgatattgatgagatgcagccgacagacaggggagacaggagctgaactgatggaggtgggggctgtctagaagcagagcctgagatggggttcttgtgaaggttgtttactgagggaggggctgcaggaatcagggattgcaagggaaggggctgagcatggatgtagcctcggctggagactcgcttcaggctgattccacagggagccctggagcgcagcttcactgcacagccagcagggtggcctttagcacccctgtgccagtcaagcagtggtgaggtctgctgcaaggtgggctgttggcgttaagatgtcatagtctcctgggagaagcagttcccatttggccacttttctggagatgggggcaggtgcagatgatcccagcacacaggggaatgggtacagaagcatggtaaagggggcggggtccggcaccgacagtgtccactacagcgggcatcctcaactagcaggcctcaaatgagaggcatatctttcaccgtggggaagttaggacaaagttttttaaatgccctagaaaacctgggatgcttagtggctgtccccatgtttttgctggtttttatctaagaatagccagtcatgtactgtctttatgaagggaactgtctctctgactgtgagaccctgaagtgcggttggggaagtgggcgctctcatccccaaagcttgccattgtgtccatcacaaagcatggactcatgaaaggtccgactatatattgagaatgtatttgtaactatagcaagaatgaagcttctccacagagacttgacatccttcctgaatcgcatccagttctgctgttgtggctttaattttattaaataggtccaacaagtatttgcttttgcagtgtgcaggctcgaatctaggaatcaggatataaagaaaagtcactggacaattgtacaaaatccgtagttctaaagagcacacattctgagaatcttactccaaaaaataggcaaaaacattcataataaacttcaattatacggtgtatccatgtgatgagaagaatttgcaatcaggaaagattgctttcaggtaaaacatgtgtattagtctgttctcatgctgctaataaagacatacccaagactggataatttataaaggaaagagatttaatggactcacagttccacagggctggggaggcctcataatcatggcggaaggcaaaagagaagcaaaggcacgtcttacgtggcggcagacaagagggcttgtgcaggggaactcccgtttataaaaccatcagatctcatgagacgtattcactatcacaagaacagcacaggaaagacccactcccgtaattcgattacctcccattgggtccctcccacaacatgtgggaattacagaagccacaattcaagatgagatttgagtgtgaaaccatatcaatatgtgaccactggatgtaaaagtttgttgaaagcagcgagcaacactggttgtaaccaaataagtgaagatgatcagctccaggttttctcccaaaactccaagggagaagttaaagggctcaaaattatgactgaaaagataaaagatcgtgatgattcaatgtgtttaataggaaacttagcaaaaaggcaataatcaaataattgtagaaaatatcacttatctgaagaaagtggaaaatgttccaaaggacctagcaaatatcagcaaaattaaatctgttacccacattaaaaacatcatagtgcaatgtttttatttcaaagaaactttgagactcaaaaaagccattattattgttgtcattattatttgggggatcggattttattctaagaggatcaacaagccaatgaagaattttaaggaggatagtagcctggcctgacttatttatatagagagatattaattgcttgggatgtgaggagtgtgaaagacataggattcattatggaggtggaaccaataatggcgtgtcctggctagtgcctggggttgtaagggaaagggagaagtcagggtttctgttcaggtttgtggcttgggtgacagcaagaacagcagtgccattttactattttggtaaaactggaggaggaacagttttcaggagagggaagagctccatttgcagcatgtgaagttttatatgcttgcggggcatccgagggaagatgtcactcagggacttggatgtgggagtctggagcccaggttggggatgaggggatgaggctgaccctgtttcagacatttcagggtgcctaatgtggccaattaagttatgtaggtaccagccatttcccctcattccagacttcccagaactcatcacatttaagtttaacactctgcttggaagagcccatattgttgttgctgctgctttggatctgcttttgaagaaataaatattgcaggtacaagttaaggtccctttgtacctctctgttctcagaaagaaataaccactattctgcagtgagtgtttttatgcttttactacattttcatatatccttgaacacctgacagtgatgttttatattttaaacgtgttcataaaggcattatactgtatgtgtccttctgaaactatcttcactggttattgtctttgagttcatctgcattggcagctgtaggtccacgttggtcaggttaaccgtctacagaattccattatgtgaatacaccacagattttcgccatctcccagttagtgaatgtttatattatttccagtttttttggaattaaatgccataatgatcatctttgttgtaatgcataactttctaaaggtaacatcataactctcatacaaatataagatgaaagcatgccaaaaatttatttaagtcgtgattaatgaggaatccagtaagatatgacaacaggttcaaaggtgaatctgaagagtagacacatatataggcaaacaggaatggtgagataaattttctaagaaatggacccagccatcccattactgggtatatacccaaaggattataaatcatgctgctataaagacacatgcacatgtatgtttactgcggcactattcacagtagcaaagacttggaaccaacccaaatgtccatcagtgatagactggattaagaaaatgtggcacatatacaccatggaatactatgcagccataaaaaaggatgagttcacgtcctttgtagggacatggatgaagctggaaaccatcattcttggcaaactatcgcaagaacaaaaaaccaaacaccacgtgttgtcactcataggtgggaattgaacaatgagaacacttggacaaaggaaggggaacatcacacactggggcctgttgtggggggcggttgtggggagggatagcatgaggagatatacctaatgtaaatgatgagttaatgggtgcagcacaccaacaaggcacatgtatacatatgtaacaaacctgcatgttgtgcacatgtaccctagaacttaaagcataaaaaaaaaaaaaagaaatgcaaaactgcttaatggctatagagcaaccaaacataatgtttggaatcatcctttttacagggtgggatcaattatatccctaccggacaaaatttctttgcatttttatggacaagaatgggtttcactctacctcacacctattaggatggcttctattgaaaagagggagagagagaaacgagtggcgtggatgtgtagaaaccgcaaccggaacccttgtgtgttgctggtgggaattgaagtgatatagccactgtggaaaacagtatggtggtttcttaaaaattaaaaaacagaattactatatgatacggcaattggaattctgggtgtctactcgagagaattgaaagcagaggctccacgagatacttgtgcacccacattcctagcagcattattcataatgcccaaccaactgcctaccagcagatgaatggataagcaaaatgtagtctatacatacaagggtgtattgctcagccttaaaaagggaagaaagttctgattcagctgccacgtggatgaaccttgagtaccttaagctaagtgaaataagtcagtcacgaaagaatactgtgtgattccacttgtttgaggtacctggagtagtcatagttctagagacagaaagtagaagagtggtttccagggctgggggaagagaggaatggggagttcttatttactagggatggagtgtcagttttgcaaaatggaaagaattctgcagacggctgctggtgatggctgcataatggcgtgaacatatttaatgccactgaactgtacacttaaaaatggttgatggtaaattttatgtgtattttatcacaatttaaatttttaatgattaaaaaaatcagttgcattaatgtcacctttctagagcttacaaagttgtaaaataaatagcctagacaaagacgtgtactcctatagaagcaggtaaccccagaggtctgctggacaatgccccgcagttcattgaatgacactcatttgtccatcttgaagtcttttgcagttttccacactgtgtgtatgtcttcttgtgcatgtgtgaaagttctttatagtaaacatcttggagtagaattctaggttataggatatctgcatcttcaatatactgagtgttgccaggttgttttctaaagtgttttacatactagtctacactcctaacagcagtgtatgcagaaacataaatggtccagtaaacttatgaaaaggtggtcaccctcactagtgatcagaatggtggaaatcagaatgactttgagagaatttcacacttagcaggtttgcaaaacttcaaaaatccgccattatcaagagttggtaaaaatattaaatcaccaagtcaggaatatctgatggaagaattctaaagcaggccactgggaagaaaaagaaaacaagccctaatacagagttctaaagctgatttgatcttgaggagctaatgccagattcttgcttaaggcttatagaaggtgagagtgcgtaagctatggggtgggaagaggagaatgtttggagaatacattttaaaaccttctataaaacagttcactttaaatctgtctctcagatatttgtatgattaataatcaaatacatatatgtcacaatatattaagaactgggttagaaaccagtatctacctacacactgtttacacttaaaattatgcaggacaaaaataaaacagtgaaaacttagagtgataatgatagcagataaagtaggatgtaagacagaaacattaaggcaaagatgcttattttttatgagcaaggagaagccacagtaaagacataacattctgggacatttacaggataaataacttcacgttagtgtgtatgcagaaaatctgtttaaattttagagagaaactgctggaaacacaataggaatggcaggctttgtggaaaacagtatggtggtttcttaaaaattaaaaaacagaattactatatgatacggcaattggaattctggatgtctactcaagagaattgaaagcagagtctccacgagatacttgtgcacccacgttcctagcagcattattcataatgcccaaccaactgcctaccagcagatgaatggataagcaaaatgtagtctatacatacaagggtgtattgctcagccttaaaaagggaagaaagttctgattcagctaccacatggatgaaccttgagtaccttaagctaagtgaaataagccaattcttttgagattttacacctaaagtaaagtagtcaaaactgtttattgaatagacatatggagaaatttgtacaatatacagtattatttccaatatacatgaacggttttgcaaaaattgatcatactttggtgacacaatagtctgtataccaaacccctgtgacatgcaatttgtctctataacaaaccttcacatatacccctgaacctaaaagtttttaaaaaggaaaaacaaactgatcatatcctaagctataacaaaaatctcagtactttccaaaaagataaaattctgggagtcatggtctctgatcttgataacaaaggatacattaaataaaaacactcttccaaataactttagggtcagagagaaaataaaatcatcaatgtagactattttaaaaatacttatatgatgtagctaaaattctccctgggagaaaaatcatagttacagtgcagagtttctcaacctcagcactattgacattttgggatgcataattctttgtttagtggggacatccctggccactacccagcagatgccagtagcttcccaccctccagttgtcagaaccaaaaatgtcttcagagaaatgccccctgcatggtaaaattgctcatctcaactcctgccctagatgtttctgttactaaaaaagaaaatgtgaaaatagcttaatttgaaaacctatgtaaaaaacaacatatgctacctcaagtcaacattaatagagaagaaagcagaatttaatgaattatcatgaaagttgtcaaatttttttaacatctgcactaagaaaaattcctctgccttgggatcctgttgatctgtgaccttacccccaaccctgtgctctctgaaacatgtgctgtgtccactcagggttaaatggattaagggcggtgcaagatgtgctttgttaaacagatgcttgaaggcagcatgctcgttaagagtcatcaccaatccctaatctcaagtaatcagggacacaaacactgcggaaggccgcagggtcctctgcctaggaaaaccagagacctttgttcacttgtttatctgctgaccttccctccactattgtcccatgaccctgccaaatccccctctgtgagaaacacccaagaattatcaataaaaaaaaattaaaaaaaaaaaaaaaaaaaaaaaaaaaaaaaataaaatataagagctggttctttggctagacagttgaaatatataaacttttggccgggtgtggtggctcatgcctgtaatctcagcattttgggaggctgagacgggtggatcacttgaggtcaggagtttgagaccagcttggccaacatggcaaaaacccatctctcctaaaaatacaaaaagtagccgggtgtggtgacatgcacctgtaattccagctactcaggaggctgaggcagaaaaattgcttgaaccctggaggtggaggcagaggttgtggtgagccgagatagcatcactgcactccagtgtgggcaacagagcaagactccgtcacaaaaaaataaataaaataaattttgagaaggaaaattttaaaaagcaacgtgtattcacaatattacaattttgaatgggaactgatgaaaaccacagagtatatttttaaatatattatccagttatatgctagtacatgttagtatctggataaaatgaatttatatatatatatatatatatatatgtataatttaccaaaactgactcgagagaaaatggaaactgaaatagacctattagccatgaaggatattgtgaaaacaaaaagcactgggcctcagatggttttctgtttaagctctttcattctctaaggaaaatgtaatttatatgttatctatactgttccagggcataagggaagagttcaatttctaaagctgatcataacaaaaacatttgacaaaagtaaccctaaaaaataaaaactaagagatttgtaataaaatacatgccagacacattcaaacaaacatacaggcaaggacagcattattcatatcagactccactgaattcaaggcaaaaaaaaaaatgagacaaaaaagatacttaataaagagtttaatccataatgaagatacaattgtctgtcttctttttgtaataaaaaccaatatcagggccaggtgtggtggctcatgcctataaaatcccagcactttggcgggccgaggtgggcagatcacttgaggtcaggagtttgagacaagcctggccaatatggcgaaaccccgtctcgctctactaaaaatacaaaaattagccaggcatgatggtgccacctgttgtcccagctacctgggaggcagaggttgcagtgagccaagatcgcgccactgcactccagcctgcgcgatgcagcacaactctgtctcaaaacaaaaccgacatcaaattcccaaaacaaacactttaagcattaaaaggagatatttttatggaaacagaaaaattgcaggcaatctggacaagcctgtgtaagattaaagagccaaaaaggtaaggaatctaaagaataatcactgatggaatggaaaaatatactgctgtattcatctgcaaacatagcctattctttgtaaggactgtggaatatgtacacaatttaatcatatttgggtctcaaagaaaaccttaacaaaatctcaaacttgtaaatagtacagaccccatactttgataatttttgttactggaaattgtagccaaaagaaaaagaaaattagccacttagaatttccagaactcttctttttgttagcctttttaaatttaagctccagggtatatatgcaggatgtgcaggtttgttacctaggtaaatgtgtgccacggtggtttgctgtacctatcaactcatcacctaggtgctaaacccagtatgcattagcatttttcttgatgctgtccctccccttgccccctcaacgcgccccagtgtgtagttcccctccctgtgtctaagcgttcacattgttcggcttccacttacaagtgaaaacatgaggtgtttggttttctgttcctgcattagtttgctgaggataatggcttccagctccatccatgtccctgcagaggacatgatttcatccctttttatgactgtatagtacttcatgataggtatgtaccacattttctttcagtctatctttgatgggtatctgggctgattccgtgtctttgctattgtgaatagtgctgcagtgaacacacacgtgcatgtatctttatgatagaatgatttatattcctctgggtatatacccagtaatgggattgctgggtcaaatggtattccagaagtcttcttgaacaactcttggatcaaagaagaaagtagattttaaatgttctcatctaagcaatgctaggtgaggtgatgaatatgtcaattatttcacagtgtatacatgcatcaaaacatatcgtacatataaatatatacaatttgtcatttgtcaattaaaaaataaaatacaactcaaaattgagggggaagcagcaattatgaatctttaaaatgcggaggaagggatagctaaagacaaagaattagaaaacagagaagcagaagtgatacacttgagatttgattcttttgaggagaaaagaaacaacccacataaaactgaaaacctgtttgctttcctaatgaagaaaaaatgggagaaaaacagatacttgatgtttgttagaaattagaaagggcaaataaataaccacagatgcagaggaaataaaaatcgtaagagtatgcaaataggtatgcttcactcaacagggtgtggacatatatttaggtccaaagtcctatcctcaatgcgtgtttagtgtgaaaaatgcttatatgtaaaaccaataactttccagaagtaaccagttagaaaatatcatggggaatggagttaataacaaaattgctgacctgtaggaagaaaagtactcaactttatcaagaaatttatttattcaatgtatttaacacatgcttatacaatatagggcttactgtatgccaggtacatttgatctttaaggaaccctagaatgtaggtttgctcatatccacattttacagatgaagaaactgaggcacaaagaggttaggtaacttggccaaagtcacccagctggtagaatggcaggaccaggattcaaaatgtagttagcgtcgtccagcatctgtgtgcgttgctatcatgctgactgctcagttcatgcagagacatattgcattccaggagggaagactcggtctcatcaaatgatccaacataactggactgagctctctggcaggggctgaaatgcaaagcgtctgtccgaggtgaatgtcagtagaatggcacacagccacggagctgccggtttcccacgagtgcacttaatcatacagaggtccaagtagcatgaggctccatcttgagattcacctgtcagggatcggagcaggagccgcacccatcacttctcctctgcattccctcctctaagtccgctagcacagatgtgatggagtggcaggacagatccttcctaactcaaccctcctgtcctcctctcttagatccaggagatggtccactcggaagtggctgcctatgactcgggccggcccgggcccctgctgggtcgcccggcaatgctggccagccacatgagtgccctcagccagtcccagctcatctcgcagatgggcatccggagcagcatcgcccacagctccccatcaccgccggggagcaagtcagcgaccccctctccctccagctccactcaggaagaggagtcggaagtgcatttcaaggtatgtgcggtggaggaacagagcctgaagctgccctcctgtcggcagggaaggggtcctgtggggaaatgggcatcacctccctctagtaaagactagaaaagcctgatgtcccaaggtccccgtaggtgccattcccactgagcaggcgttcctggtggcggttgggatgtccgccacagagctcagtggttttctgttaagacccccaggccacgctggaagccaaggaaaaagcacattggcaggtggagcacctggtcaggggggatggcacctatggggctttgtggcatcgggctttggctgctccaagtgctgagcgtccttgacaagctgtgttccctcggggctcccacagccttgtgcgtaaagcagagaaaattccaacaaatgttgaggggatggggtgagaagatcctgtgaaagttggcaaagactgactcctgaaggccagtgggcgatttcagaggtgtggacggcttcagcaaggccatcggggtcacatttatggccatttggcccttttaggagaaaatattctgacaaaactgtgtggtccagaagacagcacctctgggcctagagtattcactgaccttgagggtggggtgcaaaaatgaccgccccactgggaacatgcattcccccaacattcctggagtctagagtggtttgacctcctcaagaacatggtagggatgagagcccgccacctgtccgggctctggcccttctttgcattgactccaaatccacctcccggtgagagaacatcttgtcttaccagggaggaaaacagaggcccagaaatgccaaagacagaagtgtttgcccagggcctcccagcgagctagtggcagaattaagacttatctccctccgtgcctcctgcctctgtcgatccagtgtcctttccacgtggtggcctcccgaggcctagggcagtaaccctggactttgggggaagaggggtttacttctggatcctggcccagcttcatcctaaggatgactcgacctctattatagtccatgcaggaacggtttttatttaacaaacactctctatgggccagacactgctctaaacacataacaagtatacgtccatgtaatcctcataaaagtcctatagggcagggactgttattatctctgtttggcagatggggacactgaggcacagagaggttaagtaatgtatctggtgtcacacagctagtaagtggggggaaccaggattcaaacccaggaggctgcaggtgcagtccagtgtatgtgccctcaaccccctgccctgctgtgcctgttcaggactttatcaatgacaacatgcctcttcatccctgatcttgctagggtcacaccacggtgctaacacaactggggcttggagaagggagtagctgcagagataagcctcaggaacagaaccatgtccttcagacatggatgcctgatcatgcctactggcccatggctttgtcatcaggtcaacatgtcacctccatcttcttggctcctagagccagagtcttcactacagggtccagggcttttgaccaaagtcccctgttcctacatggcttgagtgacccaacagagacccactgaggtctgtggtgggcatcccaacaccaccccatcctggaagccctaagtcaagtgttcacaggatcatggtcctgcagtctgtccagagtgaagccactggttccagggctgacgcagtaacagtcgctttagcctcgtgccctccccacttcacagggtcaagggactaagccacctgctcaaagctgcacagctgaaacatggcggtggagaccagccttttgtaatgcaggatcctttttggggattgtgctcacaagtgggagggcagatatatacacacacacacacacacacacacacacacacatatatatatacacacatatatatacagacatatatatactatatatacacatatatatacatatatactatatatatacatatatactatatatacacacacatatatatactatatatacacacacatatatatacatatacacacacacacacacgtatatacacatatacacacatgcacacacactccaaacttggaaataggcccccaaataactgcacattctttcaatgtcataccaaagccttggctaacaggctcactcaataattatctgattccctaggaaactggacctttgctttgattcattattcactattgattaggggatttcacaactctgtaaaagaagatgttaccttgggcgggggaggggaagtgataagagatgtaagggatttttgtctgattataaggcaaattaactttgcccggtagagatgcaaatttctgtccagtagaaaagattaaaagtcccaaaggtgatagtttcagcgctctattgggcactaaccagtttcacgtgtaatttagtaatctaattccagcattctttccattctttcagtgactatacagtccgtcttctcctcctgcatttctctgaatcaactttacaatcatgctgattctctttaatgagttaaacacccacccagggtgtgtgtgtctgtctgtccattgccccctccatcgcgcgagtggttatctgtgcatgagcagggctggagaagtgcagctcggcccaagtctgtgttgatcgcctttggcaggaggcccttgggcttctttggttttctgactcttctcactcgggcagatctcgggagaaaagagaccttcagccgacccaggaaaaaaggccaagaacccgaagaagaagaaaaagaaggaccccaatgagccgcagaagcctgtgtcggcctacgcactcttcttcagagacactcaggccgccatcaagggtcagaaccccagtgccactttcggtgacgtgtccaaaatcgtggcctccatgtgggacagcctgggagaggaacagaagcaggtgagcctccctctctttctgggccatcccctgaggctttgtggtcctggaaccaaggacacactttgaaggtctgaaaccaggcccagctctggaactagagactcttacagaggtctttcctgggctcaggttgcccatctgtaaactgggaagctagctgccttccaattctactaaccaactgcatttactagcaacttaaccactctgaacctctgcttcccgcaacttaaccattctgaacctctgcttcccccttgataaaatgagaacaagcatctccatccatcttgtcccaccaaccctaaaagtctggagtccaggccagagcttcctatcccactgaccatgtgcctgtggcctcctctaaaggcctccagggagaatagagagcagaactagctggtaggcaaatggagttgccagctgtgtgacctcagcctgaccacctaaactctctgagcctcggttttcatgtctattaaaacaggggtgctggctactccttctctgagctcacatctgggctgggctttccccccggtatgtcactgaatccttacaacaccctgtggagtagccattgctttcctgtttggtagagacaccaagaggtaaagtgactcacccagggtcaccagcgtgaatcaaggtagagtcaggatttgaactcacatctgtagaagcaggaggctcaactgggctgttggcatgagagacatgaatcaaataagcagatgagtaaatgtaaaattacaattgtgattgtgccgtgtaccaggagggtacatagttcatgagagtggaaagagcagggacggacattgtcccaggggtcaggtcaccaggtgagacctgaagtgtgagttctctttggaggaggggaagtgttccagacagggaggcctggtaaggaaggaggctggaaaagcacaggggactgaaaggagaccaggatggccagagaggagacaataagagtacccatggcagagacggagctggaaaggagggcaggggccagaccacgctgggctttgcagaccttggaagtagtcaggccctgttctaagaggagagaaaaccagtgaagagttttatgtagaggagagactggaacggcagcataaggcaggtaagagtggatgtggagggtgcacagtgatccaggtgggggaaggtagggtctggagcatcttccagaatggtttagggtaggggacacagagcatgtcctgggagcctccttgcatctggcttccattctgagtaaatggagatgccagtcactggatgggaaatatggggaaagtagcaggcttggggcagagagatgaattactgacttatttgaaacatcatctttaccgtattctaaaattttaggtaattttggaatatgttataatgcagagagtttatttgggagatgatccccacctctggtaggggagtggggaaatgagacagggaaaggagggcagccaggaaagggcacattgtcccaggagaatccaccatgggcaactggagcacaatcccgctgggaactcaggagcctgcttagaacgtgccaggcctcagggtcatcctgtctgaggggcaagggtgctggggtggacaccagcattccttcagagctgctccaggggacattacttctgcagcacccctggcctgctacacatgccaggctcctgccaccagagggaccctcaggcaaaggaatatagccggtggcagctggaagtagagcatgtttgtaggacaggggtaaggactgggggatattggcagggcactgtggcttttgctatagggacgtctgtcattttcacttgtgtgtttcgttggcaaccaattccctttcaaaagacttcaggttgtttttgtttggtggggggatttccttgccgttttatacagtctggggagacagtggtctcaagtcctatgtccccgggcactccctccaccgatgctttctctgacctcattcagcgcagcccagaggcaagcaaaggtggttgagagtcccagcccctgtgtcggtttcatttctgcttacctgtctgacgttttatttctaacccaagaacttggcatatatttatttccatccgataatgggcatttctctccttttacttaatgcgttcttttacttaatgcgttataaatggcttgtttctccccattttcctagcaaattgttgagtataaaaagttaggaatttaatttgtaactgccaagcttactatttattttatcatttctgatcatttttaattcctgagtcttctaggtttaaaaaaagtgtctataattatacacatatttatacatatgtatcttttacaaatgataattttgtctcctttgttatttgttttttaagagacagggtgtcactctgtcacccaggctagaggtcagtggcatgatcatagctcactgcagccttgaactcctgggctcaagcaattttcccagctcagcttcccaagtagctggactacaggcgtgccatgcatcaccatgccccacaaaattttttcttttttttggtattttgtagagacagggtcttgctgtgttgctcaggctgacaaactcttagcctcaaatgatcatcccaccttggcctcccaaagtgctgggattagaggcatgagccactatatccagccatatctccttattttgtctcctcacttctcagatttctaattctgttttcttttcccagttatgttgactaggacttctaaaaaagagatgttcagcaatggcggggatagtggtcttcttactttgcattacctctcatgtttcactattaagcataaggctggatgttagcttgtgtcagtttttgaaatcacatttagaaatgtgacttatattcctattttactattaatacactaataaccaagagaggtagtgagaaaataataggaaataaaaaaaccttgcctatcccccaaaagtttcaagcctaggtgatggataggaaagttctttcaaatcatcaaagagctaataattccaagacttagaaaaataagaaaaccttcacaagtctttatatacaatgtaaccttgacactaaaacataatgaagctaactgcatcatttaattttgaatgtgtaataaacaataccaaaatttaatggcttaaaacaataatcatttattcaacttatgattctgagggtccatgaactgtgctgggctcagcaggatggttctgctgctgctcttggctgggctcacccatttgcatcagtggtcaactacagtaaattaggcatctctgcttctgggagttggatggctgtcagctggagcagtggagccaaactgggccatgtgtctttcatcatccagcagactagctcatgcttattcacatagcaagtcagagttccaagagcagttttagagcagaaaaatggcaggaaggaggcaggactaacttgcagctcccactcggacagacagagcacggagactcacattgtgaacttttgctccaagaactaccacaggaacatactaggaaagccaaaagaatccacagacactttgaaggatgtggattgctgctgcaggctctctgggacagccaaggaattgtgagttggcgtgctttctcagctgggaggcctgtagcctggggcaagttctcagccctgttcactagctgcctggaaataaactcggtgctgttgggggtgcatggtgggagtgagaccagcctgtggctgccagctttccctcacttccctgacaacctgtgtgatgcagcagtcagccataatccctctgggaaccacaacccccacagcatctgcagcaagccccacctaaccctgcccctacctgatggtctttctctacctgccctgttagcctaagacaaaggacataatctctcttgggaactccatggccccgcccaccacctgacactagggcaagcttgtatcctccctatactactgcagctgatgtgctctagaaagtgctacctcctggctagaggccaaccaacacaaaaccagtgcacttaaaaatacaaccaaggaccctcatggagtccacttcactcccctgctacttccactggaccaggtgttgatatccatggaggagagacctgaagacagatcacatcacaggactctttgcagacactccccagtactagcccagagcccggtagctccgctgggtggctagatccagaagagaaataacaatcactgcagcagggctctcaggaaaccacatccctaggggaagggggagaaccccaagggacaggagaatctgaatagcagccttgagtcccagatcttccctctgacatagtttacccaaatgggaaggaaccagaaaaataattctggtaatatgacaaaacgaggttatttaacacccccaaaagataacactagctcaacagcaatggatccaaaccaagacaaaatctctgaattgccagaaaaagaattcagaaggttgattgttaagctaatcaaggaggcaccagagaaaggtgaagtccaacttaaaataaaaagaattatacagcatatgaatggaaaaatctccagtgaaatagcataaataaaaacaatcacaacttctggaaatgaaggacacacttagagaaatgcaaaatacactgggaagtctcagcaactgaattgaacaagtagaagaaagaacttcagagctcaaagacaaggctttcaaattaacccaattcaacagagacaaaaaattttaacaaatgaacaaagcctccaagaagtttgggattatgttaaatgaccaaatctaagaatcactggtgttcctgaggaagaagagaaatctaaaagtttggaaaatatatttgagggaataattgaggaaaacttccctggccttgctagagatctagacatccaaatacaagaagttcaaagaacacctgggaaatttgtcacaaaaagaaggaaaggaaaacctttcagattaacagcagatttcttagcagaaaccctacaagctagaagggattggggtcctatttttagcctccttaaacgattagccaagaattttgtatccagcaaaactaagcttcattacagttctttttttcaaagcaatgctgagagaatttgccactgccaagccagcactgcaagaactactaaaaggagctcaatcttgaaacaaatttttgaaatacacaaaaatggaatctccttaaagcataaatctcacaggacctctaaaataataacacaattttttaaaaaccacaaggtatttgggcaacaaatagcacaacgaatagaatagtacctcacatctcaatactagcactgaatgtaaatggcctaaatgctccacttaaaaatacagaatggcagaatgaataattgaccaactgagtatctgctgtcttcaagagactcacctgacacataaggacacacataacctttaggtaaaggggtggaaaaagatactccatgcaaatggataccaaaagtgagcaggaatagctattcttatatcagaccaaacaaactttaaagcaacggcagttgaaaaagacaaagagggacattatataataaaactagtccaacaggaaaatatcacgatcctaaatttatatgcatctaacattggagctcccaaatttaaaaaaataattactactagacctaagaaatgagaaagatagacagtaaaacaacaatagcgggaaacttcaatactccactgacagcactagacaggtcatcaagacaaagtcaacaaagaaacaatgaacttaaacttaccctgcaacaaatggacttaacagatatttatagaacattctacccaacaactgcagaatatacattctgttcatcagcacatggaacgttctccaagatagaccatacaataggccataaaacaagtctcaacaaatttaagaaaataatagaaattatatcaagtactctctcagaacatagtggaataaaactggaaatcaactccaaaaggaaccctcaaaacaatgcaaatatatggaaatagttaaataacctgctcctgaatgattgttgggtcaacaatgaaatcaagatggatattataaaattatttgaactgaacgataatagtgacataacctatcaaaacctctaggatacagcaaaagtggtgctaagaggaaaggtcatagcattaaatgcctacatcaaaaagtctgaaagagcacaaatagacaatgtaaggtcacgcctcaaggaactaaagagagagaacacaccaaactcaaacgcagcagaagaaaaaaatgaccaagatcagagcagaactaaatgaaattgaaaccaaaaaatacaaaagataaacaaaaagctggttctttgaaaagataaataaaactgatagaccattagtgagattaaccaagaaaagaagagagaagatccaaataagctcaattagaaacaaaacatgagatattacaaccgataccacagaaatacaaaagatcatttaagactactatgaacacctttatgtacataaactagaaaacctagaggagatggataaattcctggaaatatacaaccctcctagattaaaccagaccaataacaagcagtgagattgaaatggtaattaaaaagttaccaacaaaaaaaggccaggaccagatagattcagagctgaattctatcagacttttaaaggacactattccacaaaataaagagggaatccttcctaaattattctatgaagccagtcaatcaccctaatacccaaaccaggaaaggacataacaacaacaaaaaaacgaaaactgcaggccagtattccttctatgcccaaaatcagcatagaagggatatacttcaaggtaataaaagccatctatgataaaccagagccaacattatagtgaatggggaaaaattgaaagcattccccttgagaactggaacaagacaaggatgcccactcttaccacttctattcaacagagtactggaattcctagccagagcaatcagacaagagaaagaaagagcatccaaatctgtaaagaggaagtcaaagtgttgctgtttgctgatgatatgattgtatacctagatgaacatgaatgcaaaaatcctcagtacaatactagctaactgaatccaatgttgtatcagaaagataatccaccatgatcaagtgggtttcataccatggatgcagggatggtttaacatacacgagtcaataaatgtgatataccacataaacagaatttaaaaccacatgatcatctcaatagacacagaaaaagcatttgacaaaattgagcatccctttgattaaaaccctcagcaaaatcggcatagaagggacataccttaaggtaataaaagccatctatgataaatccagagccaacattacactgaatggggaaaagttgaaagcattccccctgagaactagaacaagacaaggatgcccatttattcgatgcagtactggaagtcctggccagagcaatcagacaagagaaagaaataaagggcaccaaatcagtaaagaggaagtcaaactgtcactgtttgctgatgggattatcatatacctagaaaaccctaaagactcatccaaaaagctcctagaactggtaaatgaattcagcaaagtttcaagatacaaaattaatgtacacaaatcaatagatctgctatacaccaacagtgaccaagctgagaatcacatcaagaactcaaccccctttaactgcaaaataaataaataaataaataaataaataaataaataaatgaataaataaaatacttaggaatatacctaaccaaggaggtggaagacctctacaaggaaaactacaaaacactgctgaaagaaatcgtagatgaaacaaatggaaacacatcccatgctcatggatgggtagaatcaatagtgtgaaaatgaccatactgccaaaagcaatctataaattaaatgcaattcccatcaaaacaccaccaacattcttcacagaactagaaaaaacaatcctaaaattcatgtggaatcaaaaaagagccctcatagccaaagcatgactaagcaaaaagaacaaatctggaggcatcacattacccgacttcaaactatatggccatagtcaccaaaacagcatggtactggtataaaaataggcatatagaccatggaaaagattagagaacccagatataaagccaaatccttacaaccaactgatctttaacaaagcaaacaataacatgaagtggggaaaggacaccttattcaacaaatggtgcttggataattggcaagccacatgtagaagagtgaaactggatcctcatctctcaccttatacaaaaatcaactcaaaatggatggaagacttaaatctaagacctgaaaccctaaaaattctagaagataacactggaaaaacccttccacagacattggcttaggcaaagacttcatgaccaagaacccaaaagcaaatgcaacaaaaacaaaggtaaatagatgggacttaattaaactaaaaagctgcacagcaaaagaaccagcagggtaaacagacaacccacagagtgggagaaaatcttcacaatctatactttcgacaaaggactaatatccagaatctacaaaggaactcaaatcagcaagaaaaaaacaatcccatcaaaaattgggctaaggagatgaatagagaattctcaaaagaaaatatacaaatggccaacaaacatattaaaaaatacttaacatcattatgatcagggaaatgcaaatcaaaaccaccttactcctgcaagaatgtccataatcaaaaaatagatgttggcatggatgtggcaaaaagggaacacttttacactgttggtgggaatataaactagtacatccactgtgaaaaacagtgtggaaattccccaaagaactaaaagtagatctactgtttgacccagcaatcccactgcttggtatccacccagaggagaagaaattttacaaaaaagatacttgcacatgtttgtagcagcccaatttgcaattgcaaaaatatggaaccagcccaaatgcccatcaatcaatgagtaaagaaaatgtgctacatatatatacacacatatatatgtacacacacacacatatacatatatatgtacacacacacacacacaaacaccatgaaatactactcagccataaaaaggaaggaaataatggcatttgcagcaacctggatggaattggagacaattattctaagtgaagtaactcaggaatggaaaaccaaacattgtatgttctcataagtgggaactaagctatgaggacacaaaggcataagaatgatacaatggactttggggacttggggaaaaggatggtagtgaaggataaaagactatcatcaggtacagtgtacactgctcaggtggtaggttcaccaacatctcagaaatcaccattaaagaacttattcatatacaaaaaaaatttttaaataagagttccaagagtagcaagagggctcaccaatatgtgatcactttgtcagtctctgcatgcatcacatttgtgcttgtcttattggccaacacaagtcacacaaggctaagctccaagtcatttgcacctcctcgtttctaccaaaagccatggaaacaaggaggtgcgaacaaactgggaccagtcctacaataacatatgaacctaggtctaaaatttttaataaaaaatattagcaaaccgaatccaaactaacatactatgaacaagtaggttcattctaggttgcgaaggtggttcggcattaagaaatctgcactgtgctggctcagaatgggggcttcaaagggcattgtctttctgtgatcagttgtgctgatagaacctggaggcccagagagatgaagcatgttggccaaggccacacagtgacttggctgaggaactgggatatggcctggtctccacaatttctctgcagcgctcccagaaaggggccagtggctggctgactcagcttctgaccccaccaccctcgtccattcgtgatccttgaatccatgccttcccaccccaggaccctgcacggcatctcctctgtaactttctccccagtgttgctcatgtgttgactcttccaggcctacaagaggaagacagaagcagcaaagaaggaatatctgaaggccctggcagcctaccgggctagcctcgtctccaaggtaacacccggaatctccaggcacagccctgatcagagtggggccacttgaggaatggagcaagaactggggcccgtgggaagggccggcaccccaggtcttagaaagaatggctcagacctacatggtcatgtctgcagggcacctacagcatgccaggctcattctgggcactttacatgcatttcattggcttcttccaacaagaacccagcacccagaggggttgagcaacttgcctgaaaagatccagtttgttaaagtggccgcactaggattcaaacccagttttgccagttttatgtggccttcacttctgaccgctgatggggcttgggacacgctaccccaaaatatggcacctcctcaccacaccgtcggcctcctctgtcaacaccagcaacgtaggaagctaagtgtggctgcggatgcgtggcccaagtggaggtgggtgttgttcctggtacagaagagatggcatccaaactggtctataacaggccaagtaaaaggtggttcaaagtcaagggaaaaacatctacaaaggcacagaggttggaaggagcatgattagagctggctcagtgggatggtgcttgtctcactggccaggctgaggagcatggattcccccaagggcaggggagccccccaaagataaaagcagtaggtgactggatggtcagagccaaggggactaaggaccctgtgctatctctggttagtccaagctctctcccaagacagccagccagcagccgtgtcagtgggttgcagagcctcctggcctcacagcccatgttctggctcatccctcttctgttctccagtgactgatatctgtctccttccagagctccccagatcaaggtgagaccaagagcactcaggcaaacccaccagccaaaatgctcccacccaagcagcccatgtatgccatgccaggcctggcctccttcctgacgccgtcggacctgcaggccttccgcagtggggcctcccctgccagcctcgcccggacgctgggctccaagtctctgctgccaggcctcagtgcgtccccgccgccgccaccctccttcccgctcagccccacactgcaccagcagctgtcactgccccctcacgcccagggcgccctcctcagtccacctgttagcatgtccccagccccccagccccctgtcctgcccacccccatggcactccaggtgcagctggcgatgagcccctcacctccagggccacaggtaagcagggaagagcagaacagcccttctgtgaccgtgtggggaggggaagcggctttgccctttcaaaccctggccctgccactcaccagtgatataacctcagccttggcacctgacctctctgagcctcagttaccacatctaggaagtgggtctcgcacaccttacctgagatgtgctggctgcagtgaacagttcacgagttgccagactgactcttaggatactccagtccccccttcctgcatcctcagccctagccctggcccttcccaaagccttcgagaccttacccccgctaattgttccacagagattgctacgaggttcacatggcccttagaggtcattgggttcagtaattccattttacagatcgagaaactgaggcccagaaagggaaaggccctgaaagccaagtccttcagcccctgattcagccaagacaagggttgaacattttgaaaggtgctctactgggagcaaggcagcagccctggaggcagcatctctttggtgtggacacccttggacacatgggctctcaccccgggaggcctgggacagtctgccccctcatctctccttggctcatggcctcctccttcccactctgtaggacttcccgcacatctctgagttccccagcagctcgggatcctgctcacctggcccatccaaccccaccagcagcggggactgggacagcagctaccccagtggggagtgtggcatcagcacctgcaggttagtcctcgcccgtccctgcctttgtcctgccagccagggagagtgggaacaggatggccagggatgggagaatggccaagggcaacgtggacaggggaggaccctgcagtcactgtcagccctgctgaggggatcgatatctcagatgacaccgcagagccaggccccggaaggactctgctggcctgatgctgaggcctgcttgggaaactgactagtcttcagtcttgctgcttcttccttgctcctgtttttttcacaagtgcttccacgtgacattcacagatgagtcctgcatcttaggccagttccctagaagcagagcctgaggcagcagggattgggtgcctttggggatgcactggggaaagcttgcaggagaagggggtgagggaggcaggacagggtgggggaaggagctgaggggggatgtggcctcagctgaagacttgcttctgcctcatcccatgggagccctggagcatgaacggtgctagagtggctcccacctggaggtcagggaactggctttttgaacccttcatcagtcagcccttggctgtgggctgccccggggtgagtgtagcccactgggcagggcagctcccaagactagaacagctaagaatgcaggacaggggacctcggtgggacacggtgggagaagggacccactgtctatcccaaggaattacagacaccttagagaccccttctccctgcaccccagtgtcctccctagtcctcctgtgggcctcctgtctcaggcctctgttcctatcctgcactccacctttcaaacccatgctaacacctccctctagaaagtcttcctggatccacgccaccccaactctggggaagagtgacctttcaacaaccgcagccagcaggagagggagagtgcagtgaggagggacacttgctccttaacccgccagccaggttcccattcccttggcaaaaatgagtcccgcagccacacctgggggacgtagtgccaagcagctgtcccagcgatagcgccacaacctggaaggcacagcgcacttgtcgggtggccaccttgctgctgagaaacgctgcccccagccctagcctcggcctcccagcacacggctggttcctctgctgacccaccagcgcccttggacactgaacaagtgaccagcgcgcatgccccatttctgacatgcctgaagtgagattctacatgggtgggtggactcagctcagcaagaatcccttccctgcaccccaagcaggtgcagaccctcctaccccagccctttcctgtccctaagtttccttctcaaaagtcagaatacttagggtatgtaggggagtgtcacacaatgtccaagcctcctgaggcttgcccatcacatccagcatggaggtcagaccccagcagggccgtattttaaaaacataaaaagcacctgtcctcccttaattcagtttgagatttacaaattcctgtgattaaaaacccatgtgagagcaatggtgacatcggcgtgcgcctcgatgaaagacagacacgctactgccctttcacccagagctgaggaccgggtggtcccctgctgggtttccgggaggggtttggttctgcttggtgtagaggtgggtgggggtgggacttgcagatgcaagtccctcattcagccacagaggggcagctgaatccaggggtgggggtggggcgtacagtgcaggggtcctggtgctcccctggcccggagaggtacccaacagctttgacagcccctcctctctctcacagcctgctccccagggacaaatcgctctacctcacctaatcccgcctccctaccatccctgaggctcgctggaaggcactgctcagagcctgaagggctgacagcagaaaagaggccctggccagaggcagggtggcccatcggagagagcagtgacacacccattgcccgggggctgagtctcttcctcaacctcccaccagactctgcagaggcagcccactgcccaccaccagcccaaagaacctgcaggaaccttccgcccgctgacctgcttgctccagggtaactgtggaccctgtcctcgccctgcgcacggtaccctatgtctggacacccggccccagctccagccccagcccaggtgggccgcccctggcggggtcgcttaccaacggacacccaccccagatgcatgggccagagggccggcccccggcatagatgtgcacatcggttttccagtgtgaacaaaagattacgaaacctagaaactgttggttccgtgtaagtagttgactacgtgttttagaactgtgctgaagacatctgtaagactattttgtgggggaaaaaagtagtttcctttaaggtaaaaagcattttatatgatccttagcacatttttaagttttatcttaagggagacgcgcacaaaagcggctgccaaaccgtttcgtcatcctcacagcaaggaccggacgcttgctagccaccccggagcactgctctccttttaatcatgtattcatctattttaaattgccggcgacgacttttgtctatttatgaagaaaccttgagaacgaagttacagcttatcctaccgtgtgtgtggttttggggtttcgtttgggtttgggttcttgacgtcgtttgcagctgtttcctggccctggcgagtgtctgtcttggtgcccagtgcttctctcaaatctctttataataaaacttctgaaaagctgaaaacaagtctgtgtctccttgcccttggtgagccagggttgaaccccctaaagtggcatagagcccctcgggccagacggacacgggtcaaagtcttgcctgacctttaccagcccatgtgggtttgtgtgtgggtgatgggaccactctgacctcagtcttgccctctaagggggtaacagtggtcagacccgtagggctcttgcgacgatgagaaggggtgtgggcaagaacgccgccacacaggaacttgcatcagctggtgacagtggcgagcccttcctctggaggatggggccacccaggcttgtggaggtgagcagtgggaatccagggaggaggccaaggggtttttcaaacctgagtgtaggaagcatcccagacagggaattctttaaaccagatttcccagcagatgttagatggtgatactaacaacgacagcaaacaacaacaaaaggcaaataatagttgactgttttaactacatctggaaaaataccaattgcctggtgggaggctgcaactcttgcaccctgtgatgcagccattttgaggtggggacaggtgcccccgctcccagccaggctcgggaccgagacagaggagcccccacactcaggacagctctcccagcctctcactctccaatcacggtaaaccccctccttccagatgacagcccaggagtggggtgcagtttccccactggagggcattttgtaatccactttagaaaaataaaataaccccaaaccagccacctgccgtcccgtcagcagcagcaccgcaatgtgcagcataaatatttcatgtggttacaatttccttttctatgtggggcttgtcagtaacacgacggcttagacagtttaatattcaactcttgcttccatgtttgtgaaaacagcatcactgggatccacgcagacagcccacaatgacaagagtacaaggccctccttgtacagtggtgctgaggcggaggcctgctgccacccctcacagctgcaccaggagctcaggagtcctttccaagcatccacacgccaagaccaccccctctaggctgcacgggacactcagaggccccaagcagaacctaagcgccctgcctgcaggtatcagggactgtcgcacgggtgtgttctggggcccagagagtgagaatagagcctaaaggccaatttcagggccatggagtggacagcgactgtcttagtccatcccagctgccataacagagtgccatgggccaggtggctcacagcaacacaaacttactgctcagttgtggaggctgggaggtctaagatcaaggcgctggcagcttcagtgtcaggtgagggttcacttgctggttcgtaaacgtccatcctctcgctgtgtccgacagggcaggaggggagggtgctctccagaattcaacagcactcaccccaatcctgagggctccgctcagtcaccttccaaaggccccgcctccaaatactggcccgtt

SEQ ID NO: 629 - DNA, 86636 bp, Homo sapiens
  source 1..86636: mol_type = genomic DNA
gtcctgctcgtacctccgggcgcccagcctcgggtctgctccccgcggacgccccaacctccccggccgaatggatggtggtgcgcgcgcgtcctactccggcggtgccggccttttctgttgccaaaactagacccaaacctctgcatgggattcgtctttgggtccccaccccgtgcgcccagcaaacagtgggtgagccatgaagatgtgcgagtcagccggaccctccccgtcaggcgcggacccgctgcggccagagaacccagtctgcgccagcccggctcgctcgcgaagccacgggcttcactgacgcgactttccaagacgtgggggtcaccatgggcagaggacatcggttcggagccagatcacgggccccataagcatcagaccataagcagcgccgccactgagagccgctcggaactcgcccagcatgtcgggtcccctagccagggcctggtgtacgtggtcgagggccctggaagccccgatggcctaggaggagcaggcgggcggggcggcgggtgtcgctggccggtagagagcttcggcctgacctagcgcaggtctggtgcgcgcagagaacaactccaagcgcaccgacgcccgcgagctccttccaaacaccgaacgggatccagagcccgagcccacaggcggcggccgggggagggagcagggtgctggccgccgcccgggagtgttcgcgtcctgggtgacccctggaaggacgtggggcccaaactccggctggggttgggagagcagcccccagaggctctccgcgggatcctctgccgggcgggaccgtggctccacaggagaagtgggtggcaagccctgcttggcggaaagcagccgttcccctcctcctgggcctggggcggcgcccctcacccctgttccccgcccctcacccctgttccccgccggccacatcccctgccccttggattccaagcgccccgcgcgccgaggagcccagcgctagtggcggcggccaggagagacccgggtgtcaggaaagatgggccgtctgggggacagcagggagtccgggggaaacgcaggcgtcgggcacagagtcggcaccggcgtccccagctctgccgaagatcgcggtcgggtctggcccgcgggaggggccctggcgccggacctgcttcggccctgcgtgggcggcctcgccgggctctgcaggagcgacgcgcgccaaaaggcggcgggaaggaggcggggcagagcgcgcccgggaccccgacttggacgcggccagctggagaggcggagcgccgggaggagaccttggccccgccgcgactcggtggcccgcgctgccttcccgcgcgccgggctaaaaaggcgctaacgcccgcggccgcctactccccgcggcgcctcccctccccgcgcccatataacccgcctaggggccgggcagcccgccctgcctccccgcccgcgcacccgcccggaggctcgcgcgcccgcgaaggggacgcagcgaaaccggggcccgcgccaggccagccgggacggacgccgatgcccggggctgcgacggctgcaggtaggaggcccagggccggggggcggttcggctccgcgggcgggggctggagcgcagcgctgggcaggcacctgggctcgcagctccgaagctgggaggtgaggggagagcgatcggggacgagctgggacaaggcgacacaggggctccctcggagttggatcggcccctgggacttggcgctcgcgagaggctggagcggccagagtctagcctgcgaggagacgcgggtcctgccctcagcgccggccgcctttggcgccaaagacagccccgcaggggttccgggagggccctcctcctgctgtcccctctccaccccgggctccgagggccgttgggagggtaaccccgggaagaggccggggtgcggggcgcgggtgcaggtggaaatcgccagcaagctcctccccgcccgcgcgctccctccgacctgcagggctgtgccaatcccgaggcctcagcttccctgaggagccagggccaggcccccctctggacagggagaaggatctgggcgggggccttgacccatggagttggttactaagcggtttcgatggtttcccgagggacagctccctgtggctctgagtttgtctgtcgagggctcctggcctgtctccggagcggtcccaggtagagaaagcccgtgaagaaatggcccgggccggcctggagggagacacctcacgcccccttagctcctgggccgcctcctcctgcagcccctgcctttcccggggcttggacttggggagcgatgattacctttgctcagcttgtattttggcctggacgctaggagataagcccatgtagtatgcacacgtctgctacataaacaggggacagatagacgatcttcaaccagcaagggtgcagggaaaagcaatgcaccccaaacttctgaccagaggtcatttgcttccaaagatgctgccatctgtttattcactgtctggacatttggaaatggctcaggctcattaacacaatgctttggtttttgttgttttgttttttgttgctgtcattgctgtttatttgttcagccttagctctgggggaggagtaaacaaagcgcgtggcctctggcacttactgagcgctgagccacccctctttggatttattcggggaaagattaaaaagcatttcattaagaacaggacacggtgtttgaaatgttgccatatatgaatgtatgcattacgtatgtagtttttaaaataagataaaaagttggctgggcacggtagctcacgcctgtcatccctcacagcctttgggaggccaaggtgggtggatcacctgaggtcaggagttcgagaccagcctggccatcatggtgaaacccagtctctacttgaaatacaaaaattagctgggcatggtggcaggcacctgtactcccagctactcgggaggctgaggcacaagaattgcttgaacctgggatggagaggttgcagcgagctgatatcatgccactgcactccagcctgggcaacagagcaagactctgtctcaaaaaataagatgaaataagataaaagttggtgtcagaggctgcagtgtggcagctgcctattgtcaatcagaggtagcctggggtgaacggaaggcggacctgagcggggcttgtctatgcgcggcggccaccagagaatggctcgggatgtgagccctgccttgcagtccttctcgtgaaagctacagcgaacagtagctgtctccaaatcccgaaggccagtcgcatggagaagctggtctggcacagtggttaatggggtagtatggaagtcagaatgctggggttcaaatctcctcttccccatttactccagcaagtcacttaaccacttggagcctcaggttacccatctgcagagtcgggtaatagtagttcctgcctcagaggcttggagaacagtcagtgaggtgccgtccgaagggcttgggagagtgcctggcacccactcagtgtcctcacacatgatggcttcgggtcccaggtgctgttccagagctgggagagccaggagccctggggagagacccggctccttagtatctggtaggtatctccagggcaggagggatggcagtgaggcaggcatctgcccaaggcgtgggtggaagctgatggcatctgtcagaagtatgcactggggcaaggatgcctggtttagtatttatttatagggcatgccccacccaggtccaagaatggattgataacactgagcacgtgtgaaaggcacggctaaagtggagagaagagaagaggctgagggccgagagaggagccgcacacccactccagaacccggacgaggccctgcccttgcccagcggcggtattaaccctgagattccgagcacaccaaagtgacatcgcgtacacggtgaaccctgtgtttgcaaaaagtcagaaaaagtcttcaaaacatcctttaaggccaggcgccgtggcccacgcctgtaatctcagccctttgggaggccgaggtgggtggatcacttgagatcaggagttcaagaccagcctgggcaaaatggtgaaatcttgtccccaccaaaaatacaaaaattagccgggggtggtgtctggtgcctgtagtctcagctactcaggaggctgaggcaggagaatcgcttgaacttgggaggcagaggttgcagtgagccgagatcaccccactgcactccagcccgggcaacagagcgagactctgtctcaaaaaaacacgcaaaaaatacttttggtgtgtgtttcatgtaacgagctgccattttgcggcttgcctttgttttccagtgtggggagggctaaggcaaccttttaagatatctgtatgttatttcctcgtgattttgctttaaaagcaaaaaagaaaaaagctgagatgagttactaaatgacaataacgcctacttttcttttgaattcccgtgttatttgtatctgaatgtggtgaaagttttctaaatgtaatgttttatcaccagtaagtaggctgagtgatcacttactcctaccagtatttaatacttccatgttctgcccagattcctttaacaaatacacaaaacacacttgtagctggcaacatccactcgtgtataatgaaaacacacaatggctttcttagaagtttgccttcttaagtgggttacacaggatgcctcgaaaatccttctctgtgggtcgtgcagaaggtattttattctaaaaattccctctactcagccgggcgcagtggctcacgcctgtaatcccagcattttgggaggctgaggcgggtggatcacgaggtcaggagatcaagaccatcctggctaacacggtgaaaccccgtctctactaaaaatacaaaaaattagtcgggcgtggtgcgggcacctgtagtcccagctacccaggaggctgaggcaggagaatggcgtgaacccggaaggcggagcttgcagtgagctgagatcacgcactacactccagcctgggcgacagagcgagactacgtctcaaaaaaaaaaaaaaaaaatccctctgctcattggcatttgagtgtaagacagcttataccaaagtgggctcagacagacatatgcacatgtttacagactttctgcctgccccctggcagtccactctgtgctcagtatttctttgcaggctaaacactcgctcatccaaagtgctttcttttcctggacaagttgcacatcacagacccaaagaagaaaaagataatccagcccaactcttgttttttaatgtttcctgtaataactcacatttagcccatggtggctgtgagctggtacttggctaaaaagtttacatttttttccctgtaatccccacaatagcccgttgaagtagatactataattatgcccatttacagatgaggaaactgaggcttcaactggctattctacttgcacagggtcacacagctgcaaagtacgggagtggggactccagctatgaccacgaagctgggactggggctgccaaaccatcctttgcctgggtctgccgttggctcagacacggcccccagacacctaggaccgtggaacattcaggccggaagggcccttccagaacatctaagccaggggtagagagtccagggtgctgtgagcctggatggggaaaaatggcaccttgtattaacctcaaagcaaatttcagcatttcctctagttttgaatgtaggcagcaaactacagtcatagcagtacctgtgacctcaccagtgggaaccactgatattttcatggtgtccggtaatagctgcagcatcttaaaaagtggtttgtgcttgtcgctccgttgcaattatggcggtgattagatctgctctcaggcttacgacttaatgtatgaacaaagaagcgcacatatgatcacctcccagttttgctttttaaatattagggtcactttgtaagttttctcaggctgctgttacaaatgaccacaaattaagtggctggaaacaatagagagtgttgtctcacggttgtggaggcaggaatctgaagccaggtgtgggcagggtcgggttccctcggaggctctgagagggggctcgcctcctgtctccctcctaggatctgggggctgccggccatcctgtggttcccaggcatgcagatgcaccacccagtctctgccaccatcttgccatggccttctcctctgtgtccctgtgtgtctctccttttttgtcccttagatggacacctgtccttggatttcgggcccacctggaaaatccagaatgatcttatcttgagacccttacctaagtggcatctgcaaagaccctgattccaaataacatcccattctgaggctcgttcccagaggctgcatccaacccactagagtggctatgtttcagtaactcgtgatcctgtgtattttgcttcatgtatttaaaacattctcccggacaaggcgtctgagattccccaggctgccagaggggccatggcgcaaacggggaagaaacctggtctaagccacgcccctcttttcaggacgaggatcttggaacccggacactgaaggtcggggttgggcacagccggggatgggcagcccccctctcccccagcacctcccgcctggcgcctcctccacagcccctgcatcctggaaaacagactgttccacacactccagcagctcctctacctggggactgcttgggccgcatagcccccagttagggacagaaaccagaggtattgaacaagaagccccaccgggagaggcgagacccgggccccagccctggacctggccgtgggtgctacagaaggtcgggggacatcggtctgcgcggaagggtctggagaggcacctctcagggagttggacagagaggagacgccgtcccagtggtggcctccagtgaggcctggagagaccaggtggcaggaagggccctgctggggccagagcaagggcacggaaggcaggtctcatggagcagggaccgtggaggggacatgggggacacattagggatggacagtggccggaagattccgtgggccttggagattaaatcgggttccccaaagagcaagctgtggagaggggaagggaaagttgcctccctcttccctacggggttcttgtcaataaacgattgacaaaagacagactcacaagagacaacagttttaaggctgtgcccccgcccggaagtgccataaaaacaggagactcagcagtaaccagatgggagcggtgcagatgtccgtcctctgtgacagaaaggaaagggggcctgggcttctggggagcggtagagacaaatgaggagagggtgagggaggaaacgtctgggcataaaggctgcctcgtggtgcagctatcagtctcatggtgagaaaatgcgtcttggcgcgcggctctcttcctggcacacagaccattactaatgaaaatgtcctttatagatgtcaattttctttagaaaagagagttttttactttattttagggagctgaagagctttttttctgttggctggttctcagttgcttttagctcaaagtaatcaacatgtcaacatggcatattttggggtgacgtattctggtctcctacagtcatattttggggtgacgtattctggtctcctacagtcatattttggggtgacgtattctagtctcctacagtcatatttaggggtggcgtattctggtctcctacagtcatattttggggtggcgtattctggtctcctacagtcatattttggggtggcgtattctggtctcctacagtcatattttggggtgacgtattctggtctcctatagtcatatttaggggtggcgtattctggtctcctacagtcatactttggggtgatgtgtcctgagccccattgtttcctagtctgaaacttccccaagaagctccacggtacagaaactgggtgggtgtgttgtcccataatgctttgaagaggcatttctatggaaacaaaagaaaaaaaaaaaaagctaatcattggagctgactaaaaaccagtttctgagcctgggggccgtggcggggcaggtttgtagatgttgggctccgagcatcttctgcggtttggtctctggcgatgtctgggcggcccacgcagcaacaggcgtgagggtccctcgcacctgggcttcgtggtaatctcgctgatgagtatttcaagtcgtccagcctcagtttgcaggatttctgggcaaagggcagttttgttcttcgtgattccaataagaacggtgggagaaaattgaaagtgttagtttgggagttgcagccagatactggaggaaactagaaacatcaggaacccgtccagtttgtagacatcaatagataacaaaaccccaaagacgttaaacaggacaagaatctaatatggggcgcacaatatggctttctactgaaatatatgttctttctacatcacccctctttctactaaaaataatctcagtaagattattattattattattatttttgagacagagttccactccgtcgctcaaggctagagtgtagtggcatcatctcgactcactgcaaactctgcctcccgggttcaagtgattctcctgcctcagcctcctggagttacaggcatgcaccaccactaatttttgtattattattacttttttttagtagagacagggttttgccatgttggccaggctggtcttgaactcctgacctcacaggatccacccacttcggcctcccaaagtgctaggattacagacgtgagccactgtgcccagcctagtcagattaacttgtttgtaaagtaagtctagcctcattaaaattggcctgattatttgcacaagtgcagcaagaatagtaagtggccagctaggctttctttaggtcagctttgctggaacttttaataaatctcaggttaggctttcaaaagcctcttgaggctaagaagtcaagccaaggacttgatatcagacttcacctgcaatacctatagatttgggtggattcctctttctcaaggttcccaacgtattcttgagaattactgccaaaaaatcacagtctttcctcaacccgtgaggctgcagaagccctttaatccaggtacaagggcaattttgttttcctccaacgggtttcattggctccataaagtcaaccttagttccttaaagctactcacatctgattttatgcacatcactctcaaatatgatattccggtcaaacacttggtgagctaaccaacatttccagttgtttcctattacaaggcagcagattcatcttgaacttaagcaaataactctatggccgtaaaaataaaaatgctaatagtttctaaattctggagagatcaggtagggagaaaagtcatcatttcaattttgcttataaaagtgtaatgtaccagaatgctgtaagttataaatagtttcttcatttacattctggaaattcttgccatccagtggtgtgatcttaatgtatcagaaacctgtactggtcaaagtcttccccatgaaatcttctcgaagacacaacattttagaattatagttgcttgcaaaagctttcgggaaagcatcagagccaaacagttaactgtgtatgacagaaaggcttaaaatggccttggctaaagatgtgatgacatcattacaatgtaactgatgaggaagtttggttattcctgtggtgtatactttcacataataactagaattacaactaatatagaatgtatcagatttctaagaatttcatataatttctggaactcttatatgaatatatatccatgcaaatataactcacccagagaaggttaatcatcacttcatattttacagtgcttccatgcaaatttagttgatcaaataagcccaatttatttaatatctttttattttatctaaaacaattttccctttaacattggcaaaataatctatgtttttataaggagagaaaataaatccttttgagatattccaggggccaatctaggaaatcccaaacgttaattcagggtcaaaaagacttaatttagagtgtgtgattttggaaagttgtcaaaatgtcaaaaggttgaaagcacttgattaaatagaatcccagatcattatgaaataatacttaattctcatttaatcaaagtaacaatgaaatattcaaagagaaatgcagaaagttagatagtttaaaatactcttagatctggccaggcatggtgggtcatgcctgtaattccagcactttgagaggctgacatgagcggatcactagagcccaggagttcgagaccagcctgggcaacatggcaaaaccccgtctctaccaaaaatacaaaaattagccaggcatggtggcacatgcctgtaatctcagctactcgggaagctgagataggaggatcccttgaacccagggagattcatgccacagtgagctgagatcgcaccactgtactccagcctgagcaacaaactgtatatacacacacatgtattttgtgtatatatatatatatataatatgtattacatatatacatacactatatataatatgtattatatatatacatacactatatataatatatgtattatatatatacacgctatatatataatatatgtattatatatatacacacaatatatattttttattttattttttattttttattttttttaattagctgggtgtggtggtgcccacctgtctcccagctactcgggaggctgaggtggcaggatcccttgaagcccaggagttgaggctgcgatgaactatgatggtgccactgcactctagcctgggtgacagagtgagaccctgtctcaaaaaaaaaaagaactagttcacacccatgtttcctcctgctgccccaaattgccactctcctggagcagcccctgaaggtggagaccaggcacctgctggagcaggaactcttccttcaccggcttctgttggggccccaggatcctgcagctgtggcatccacagggagtaaggccagccacggaggtcctttcatgtcaccaagctgcaggggaggaaaagtgacatcagacagatcaacaggagaaaacccattttaatgatatgtccacgaatgggagtcccacacggagatgaaactgggggaaggggccagatggcggaggcgtctgcgtcatcctcagctgcaggaagatacaggactgtggggctgctgcaggctgaaccagctatagcaggggagttgactggtgaatgaaggtggtttcgtcacgcggacatgcgtctctcaggcgatcagagttacctggagccgctctcctcccggcatagagacctttacgaatggaaatgtctttcatttctctcccagacaggcagctgggcagagccactcctgtgtctgcagttactcgaaataatggatatacccaaggcatgtttggggtggcacattctgccccctcaagccatgttttggggtggggtggcgtgtcctgagccccaacccaggtgtcagggctatggaggggacattgcaagggggcctagaggggcctctatgggccttggagatggaatcagctccccaccaggccccaggacagacctggctggggagcgcagggaggggtccccagtgtgaggacagcatggggctgcctcttccagcagctccgagcgctctcagagaaaaacgaaattctcttttataagagaaacttgtctctggtcccatgtgttgccctttgggcactggcatgagtaatctgagggcggcgctttcctcactgcagtggcatcatacagatgagggctttgctgatcattatctggaaacagtgatcactgtcccattcacagatggggaggctgaagcctgggagatcaattcatgccaccaagatcagctgcaggccgggccacccatgcctgaggggagaaggggcctctcttcttcacgaggctggtggctgcggcacctacaaagacaggttaacaagaggaccctctgcctatcacgagcctggtggctgccgtaccagtaatgaaagacaagttaacaagagggccgtgcaggcttatttacgagaagttccatgtgacacaggagccttgagaatggaacacccatcgaaccggggaactctgcatattttcctcctgggtttgtggggtgtggacagcacggagcgtgatgaaaggatacaggcggctgggcgtggtggctcacgcctgtaatcccagcactttgggaggctgagtcgggcggatcactaggtcaggagatcgagactatactggctcacacggtgaaaccccatctctactaaaaaatacaaaaaattagccaggcgtggtggcgggcgcctgtagtcccagctactcgggaggctgaggcaggagaatggcgtgaaccaggaaggtggagcttgcagtgagccaagatcgtgcaacaatgcgagactccatctcaaaaaaaaaaaaaaagaaagaaagaaaggatacagacatcctgaaccgggggctggggccaggtctgaaggctctgatcttcctttcttctgggtctagggcacatgagggtctgtgacctaattcagaggaaggccagagaactcttttatggcctgcctcagggtgacagggagcaggagagagcatacctgctttccctggcttctcagatgccaccgtgccaggttttggggtagtggtatgtcttgagcccaatcagtaccctgggggtcgtggccggcccccctccctccatgccacaggctctctggagaggccactgctgtatccccactgtgagctcgatctgagctgcctatgggaccacacctgagaacccccaagggtggcactggcagacttgaggtgcccaagtgaggctggtgcagcccctctgccctgccagtctgggcacgggcccctgggcatcgcgactcctaccttcctaccagcccagatgcagggcctgagccggcagggcttccacccagcccagggtgtgtccccctaccagaggcgctgcattggataggaaggacccacctgtttccctgcccagtaccagctggcaggccccccgtggctcagggtgcctgtgaggaggggtgggggctctaattgctcacctgctgctctgaggtgtcaggcagggttgggggtggcacctggggaaggctgggctgagggggcaggctgcccctcctgcaggagaggtgcagtatttcactgggtcctttggaaagggcagggaagctcctgctcgcccgtactgcaccatttcctgtgatcttagcaatgacttcctggctccattttctccaccagtccgaatacatgagccagacccgcagctttctcttccacagcctcctggcctccgggtccacctgggtggtgcccacccgccagactggggcctggtggttgtaggggacggggagcagccttgcttcagtgtgggtcattcctgactgtgagatggttggggggcaggggttgtagagtctgtgggaggcctcggctgggcctcagagaggggtatctcttctgcagaaaacccagccacccttaccagatgcggtcaggctacaaagggaagatgtgctccctctttagaggcaggtgattcctgtgaatccgatgaccgagataaggtgcacgattcagtgggcaaggcaactcaccatcctctctttatggtcctcgcaatttgcaccatgcacaatgcagggtgaagtcagcccccaaattacagaggaaagactctgcggtctttgtcagttaaacaggagatgcaaactccaagctagttaatgagctgtgatcggccacgctcacgattcagtgcaggtctctccttcctgctatcacagtctttgccggctgcatcatgactaccaaccagtcccctcataattacaagagtctcctgtcatgttttcttctggagcgaggcatgctccaacttgcttctgggttcttaatttttgatcagggacggctccttgactaattatttggcagtaatgagggaggacagatcgagttgtgaaagtcccccccaagcttttagaaggaagctgcaaattaaaaaatgaggtattggtaaacaggatgctaattggattaatatgaaaatgatgaattctgataaaaatagcaaaatacaccgttgtaagattgaggccagtataactccaagaattcattgtctaatgttcagctggtcagtctggtctttgaaagtattagaataacagaaagagtctactcttgacgatgaagtatacggttagtaatttatgcaaaacagaactttaaaaccggaaggacttgatatgagtggggtgcatggaaatcattcgtattttgaagtttcataactctgacccctaggtcctttggtttgtctctcttttcttttttttttttttttagacaatttctctctctgtcacccaggctggagtgcagtggcatgatcttggctcactgaaacctccacctcccaggttcaagcgattctcctgcctcagcctcctgagtggctgggattacaggcatgaaccaccgtgcccggcctttttttttttttttttttttaagagacagaatcaccaggcaaggtggctcacacctgtaatcccagcactttgggaggccaaggcaggtggatcaccaggtcaggagtttgagaccaacctggccaacatacagtgaaaccccatctctactaaaaatacaaaaattagctgggtatagtaattccagctacttgggaggctgaggcaggagaatcgcttttgaagccaggaggcggagtttgtggtgagctgagatcgcaccattgtactccagcctgggcaacaagagcaaaactctgtctcaaaaaaaaaaaaaaaaaaaaaaaaaaagagagagagagagagagaatctcactctgcagcctaggctggtgtgcagtggtgcagtcacagctgaccacagcctccaactgctgggctcaggccatcctcttgcctgtgtcctgagtagctgtgaccatagacacacaccaccacatccagttaatttagttttgttgtttcttgcttttagagacagggtcttgctatgtatcccacactaatgaatgtaaaatcttaaaatggtgcctggtgcagagtaagctgtgtgttggtggggtgtaattatgggtcatattgacagtttcacttctgcggcatgccctcaggaactcactgatgcacacagagggacctgctggcaaatactgaagagctgtggggagaaaggaaggggtctgacagtgaaggtgggtgcgtgggcggggggcttttaatggtccctctgctggctccctccccaccacctcctgcccacctccctggccttggctgcaggctagggtgccctttgacctcaaagaggcctgtcctgtgtgtctcactgagcaggaacaaaccgtcccagaagcccttcagctcggaagtgagtaagcattggcggtggggatggtgctctgagcagacgcgactcagtgccatgcgggcgtctctcccagggcggctttcagactgacccccaaacagagggctcagaaaagatgtttttcaatgagggacatttatggttggcaaaaaaaagtggctccccaaaggtcttcacgtcccaatccccagaacccgtgtctatgttatttcccatggcaaaggggaccgtgattcagctattttgagatggggaggccatctggcaggatccaggtgggtccagtgtcatcagggggccccacaagaggggtgagagagggagctgatgatggaggcagaggttggagggatgcatttcagagatggaggaaagtgtcacatgccaaggaatatgcctgcggaagcaggagaggacggggaggtagggattgtcccagggcctccagaaccaagagaagacaggggagtagggattctcccagggccccccaaagacaggaagagggggaaatgtattctcccggggtctccagaagcagccagccctgcccgcagtttggctttagctccctggtacccatctcggactctgacctacagaactgtaagagagtaaatttatctcattctgtgctgctcattgtgtggtcattggttacggcagccacagaaaacagacagtgcgcacatccgcatggtcccctctccagctcttgcctgataggcataaacgagggcagctgggcgcggtggctcacgcttgcaatcccagcactttgggaggccgaggcgggtggatcatgaggtcagaagattgaaactatcctggcccacatggtgaaaccccgtttctactaaaaatacaaaaaattagccaggcgtggtggcacgtgcctgtagtcccagctattcaggaggctgaggcatgagaatcgcttgaacctgggaggcaaaggttgcagtgagccaagatggagccactgcactccagcctgggcgacagagagagattctgtctcaaaaaaaaaaaaaaagaaagaaaaaaagtaaaaaagaaaaaaaggaaataaacaagggcttgccctgtagttcacatctggaccacccagcttaaaatagggcaggggagttcaggaatagctttgcaacccttgtgttacggtgcacaggtgtgcaaaaattctccttgaactcccccttcagtgtccccccagggctcatggccactgtcactctgtgctagttgctcttcagaccagggaacagacttggccatggctatggccagggtccagctgctattgctcctcctgtcacccacccaccttttgtctccaacaaggatgttgagaggagccaggcaccagcctccctgggttcaggtctttcctctcccctcactttcctatgaactaggggtgggggaggaggagtgcctgccaggaggtcactgcagccaaggaacccaaattggtgtgcttgagaatgacccatggatacactttccaaagagtcacccggctgcgatgaggggccatctcccctcctggagccaacagccatgagtagctgtcacacacatccgtgcagcacctagacacacatccgtgctgtccactccgtgctgctgcaattgtgggggaggaaggtggcacagtggcagcgacacacacttccctctccaaaattggggcggggctcctcaaaatcctctgaccagcattaaagattcagaatttgatattatggctgcatataatgttgaattatctgaacttgctgcacgtgtgtgtgtgtgtgtgtgtgtgtgtgtgtgtattgttggtaggaccaaaacggttaattatcagcaatttcatggtttgacctaatattttaaaagagaggttcttacctgctggaagcatgtactggtgtattacggatgagacggtctcataggtggaatttgctgtgaaatgccccaggaaacaaaaagccagaggtcagagtgatgagagctggggacgggtggatgggttcctgggccgttccctgtagtgctgagtgtgcttggaagtgtccacaatgaggagtagaaacgagtacaaagctgggtggagacagccctgtcctggctgccctgagctcggccctgtcagtcgccttgaggagggttggggggagcagggatgcagggtggcgcgtgcatgccaggtggcaggcggcaggtgctggctccaggcccgtctccagccccagggctccaggccatgctccgcccccagctgccctgcagctccaggccggccacgctgccgcctagtttcgcaactccaatgtcatcacctaggtgacagggacgctgctgccaccgcccgcctgcgggagccaggagccagccgagggccacttccacctggccccaccgaccctccggggcccaggcttagccaaggtaggcttgggcttggctcgccctcctctcggcctgagtcggggggagtctccttgccaccgtgggtgcagtggctccgggggcccaccctggggtgcagagagcccctctacggcctcccaggaggcggcttggaaatgcagtactgttcaggccagggtggggaggccttgcccacagttctcctgatgggacaagccacagctctggggagccatctgccccaagtggcacatcagggctcctcgtgtgaccctaggatcgggggcagaagtggctctggtaccgccacctccaccccttggacccaccaggagctctttccacttcctgccaaggaggcgcagagtgactgccccagcctggcacgtccgggggcttcccggctgggggccgccatcctcagcctcacacagctgatccagaacctcccagttctccccagccccctcactcttttgtggccccggagcctctcccggcaacagcaagccatgccccggcctccccggcactcacgcagctactcccaagcctgaccatgacgtggacggcaggaaggggctgggcatgtcctgttccttctgcctgggtcctgcttccagggctggactcccaggctggggaatcctcagggacccatcaaactgggggacaggggaggggcttgtggggatttgctgtgaggagggcagagtgtgtacgtggcagtgcctgcggacacatgtgtgcgcatatgtgaataggtgtgtccatgtgcatgtatgtgcaagtgtgttgctagaggtgagagggtgggtagggaaactgagtgaccagctcctccctgaagccttgggggaatgtccgaggggccagggcctctggatcctgttcccttggctctttgcaaagtctccagcctggcctcctggatgggcatgtggctcggggggcgagaccatgggctcttcctggcttgctgtgtcgctctgggtgcgttttacaccactctgaggatctctctgctcatccctaaggcagggatgatgatggggccaggggaccacatgggcacaggtaaggcagggatgatgatggggccgggggaccacatgggcacaggcttctggaatgtgggtgtcgtctccctggggtcccgcagtctgaactcaagactcaagagccccatgtccaggtggggatgtacaggagccccttagaagtggggaagaaggccaggcgtggtggctcacatctgtaatcccagcactctgggaggctgaggcgggtggatcaacagaggtcaggagttcgagagcaacctggccaacatggtgaaccctgtctctactaaaaatacaaaaattagctgggcgtggtggcgcacacagctgtaatcccagctactggggaggctgagtcagaagaatcatttgaacctggaaggcggaggttgcagtgagctgagatcgtaccactgcactccagcctgggtgacagagcgagactctatctcaaaaaaaataaaataaaataaaaaagataggaaaagaaaaagaaaaagtgaggagaaatgaggaggaagtcgagcaatttaaccccaaatggtgcttctccagcagtcactctgttcctgtcctgacctgacctgctgggccccgcccgctcaaaccaaatcatggattctgtcatcgcttcttcacggagcacctactgtgtgccaggcgggtgctggggctgcagcgcagagagcagtcagggcttggtggtctggcccgcaaagagtcagcatgtgaatgtctctccatgcgatgggtgctgggagggaggagccctggcaggtctggggaagaccagcgtctcttaaatgggggtgcgcgggccctgaggagtgaggcttcctgacagccgtccctcgtgggtgccatgctggtcagagtggggtctggctgcacagcctccctcagggctgggctggaagcacaggtcggctggcacctgtccaggtttcagggttccagggctccagctggaactgcctcagggatggcaggggtgggcctgtccctggagaggcgtggggtgtgggagctgggagcgtgacgggaagcagccccctcagacctggagtagcatggagcctaggatccattgtgaccttggtggtcctgtaccctgtccagctccagttgctgttcctgcctctccctgacctactggctgcccaggctgccccttggccgagctccaccatggccagtgcccctccattcgcttgtgagtcccacaagatcacagccctgcccagggcctaggcagctcttgggctgacccagccatcgtcgggagcccccttcgtgacgggggcaaaggctggatcgttgtctgccctgcaggagccggggcctccagaggacgggctgcctggcgggaaggtggagctcaccggagcccagcctaagccagctgtggtgcttctgagatgtgcggccctgggcaggctgctcgccctctcggggcctctgggaacacctggggacttcccgctgggttcctctgaggattgaatgagcttgaaaatatggaggatttggcacagggaatgctgggcagcaatatcagaaaggcaaccctgagagccagcggacagccactctgaggaacagcagtggctgcctctggaaggagtgaggggtgggtggacccccgtgatcgctgcacgggggaggtcacggggctgagcggccaccactgtgcaggggaggtcacagggctgagcggctgactccagaacaggaagggaacacgccaggagggaggattgctcactgagtcagggcgggactcagagggacgcatgacaagttcagggagttgacagctgtctggaagggcacgtctgctcagaccgcagggtagggagtggtcagcagggagacatgtccactggtgcagcgggcgtgtcccagaccccttagagaaaagcccagagccaggggtgaggggtatgtgtagggtggggacatctcagagtggagcatccccaccaagggtgtccagaggagggtggccaggtggggacagcagcttgagaagggtcattctctcttggttggaggagtggaagtgcttctctggggaaagaaagaagattctggaggacagcacaggcacttccaacatgggcgctggccgcacaaaggctagtgacacccggtgtgatcccttggggtagaaagggggtgtgagaggaggatcggagggggcagaggacagggatgtgtctgtgcagaacgaggctgtggcagctccagcgaaggcggctgcggccccatcagtcacctgccctgctgagggcagcgctgtactcatcacctgtgaacacaggtatcgactcagacacccactctggccataagctccgctctgtcccagccctggacccctcaccccctatccttggcagtcggtcctctgggtcttcttcctgtgcccactgtgctggtctgaacctcccttagtgacagatctgctcctaccacccccgccagggtcgcccttcctctaacaggtgggctcctggcaggaaacatcaccaagctcagcgccccagttccctgacagggccccacttccctcctgccgccaacctcgtccccccaagggccatgtccctgcccaccccttccacccctttcttagaggaagctcagcccatcaggccgctcatgcttctgaccccacctccaaaccctcctgacccgcttacccccaggagcaccgcccactccaaggcgcaagcaagctggggctggggtgcagacttctcttccaccacccaccctcctcatacccagcctctgagggcctcacagacatacatgatttgcctccagtgggccagggttatctgtttaccgcgttgcatgcccccgggcatggagctggcaccggctgccgctgcaactgggcactacccgtttcgaggacgcctcattccctgagagactgaggataggctggtgctctgcaaaagggtgcggagaccactgtaaaagtggggtgagacacgcgtgctgaccatgaaatggagaggcactcgaaggagccagggacccggcagccagcagaccccacctttccgcccccgtgtgtgcagttctgtcgctcagcctggtgcctttgggacccgggcctcattggttcttcctccactgccaccacctgatactaaataaccgtcggtcaatggcaactcgatacggtttatggggcatccacggtgtgcccagatagaggagtgctttcgcttttgatatgcgtagagttacttcattccacctagcgcttctaggaggcactacaattatctccattttacagacaaggaaacagaggctcagaatgggcaagacatctatctgaggtcacacagctagagcgcggcagaggtgggctgcgtgggcagagcaggagagggaactggagtgtgtgcccggcagtgctgggcttcagggcacgaagcggtggggcaggaatcatgtgtcttggtatgacccaaacacatatatgacagcaagaaggcctgggcaggcagcagaggacaaggcgggcctcttggatgtctggatgtggattgggcctcaatgtaccggtgaagatagatggacaggcaggggatttccagagaggggcttcccaggcagggtgcggggtgtggctgtgcggtgggaacacggactggggaggggattgcagccgggcccgtgcctcccttgctcagctccaggtcaggccagggtagagccaggctgctgggttcgacctccaccctgaccagctgtgtgcccatggagggctggtcttccctctctgtgcatgtctcctggttggtaacaggtgtgtggcctcactgggccgtcgtggggtggctggaatccccgggaattagccatgctttggtgtttctacatttcacttggctgagtgtgaactgacccaggaagctggttgggggcacccccacccacggggggtcgggcattttggtttggtcatggcctcaaagcttctggggtgaggctcagggattcccccagactgtcctgggcatctgcctcccctcccctcccgcttcccgtgggccacggcccaggagagagagggcagcttgctcaggcacctccagctgtccgcatatttcacacggtgcacgctaccccaccgtgggaggctgtgtttgtctttcatccccatgctgggcttccccaaactaggggagtggggcagcaggcgtgccatctgtggcggtgaggggggctctcagccgcatcctcctcaccaggccctgcggacaggccttcgtccctgcccctgacctgctgacgaagccgtcctggcaaccctgtctgaaggacctggccccatcgtacccacagagggaggccacatggtccttagcctctgtcgggaggggcaggcaatgctggcagagggccttgcccctgagagggaggccctcctggccctcactccgggggacccctgtccttggccccagcctgccaagcgagagcggcccctcttcttgcggtggctggaggggagagtgaggccccttggcacagagggccccaggaggctgggctctgatgacgccctgcaggaattccgctgggctgctgcctgggagagccgctgtctcacacagggccagcctgcctggcttcattctggtgcgctgaccgcccgacccctctgcccaggcgggggctcttctgggttctgggtcctgggacctgcctgagtccctgggaaaagggcacaaggggattgagacggtctcctcccacaatggcccaggtgtctcctcccacaatggcccaggtgtctcctcccacaatggcccaggtgtctcctcccacaatggcccaggtgtctcctcccacaatggcccaggtgtctcctcccacaatggcccaggtgtctcctcccacaatggcccaggtgtctcctcccacaatggcccaggtgtctcctcccacaatggcccaggtgtctcctcccacaatggcccaggtgtctcctcccacaatggcccaggtgtctcctcccacaatggcccaggtgtctcctcccacaatggcccaggtgtctcctcccacaatggcccaggtgtctcctcccacaatggccccaggtttctttgccacttcagattggaatcgttgatctgctgaaataacaggtaaaatcattggtggtttgggaaccaccggaatcagaagtgcattgagatgtttgctttaggggtggcccggggcgggtggagttcctgggggcttttccctcctccctgaatggaggaggacaccctgcacccctcctgtgatcccccttaagagccagtgtccgggatggctgggccagacggggcagaggggcctgtgtctcctgcccaggctgagtgcggacggctcggtctcagagctccaccgaggggtgggtaggtaacagcagccctgcggccagggcccctgcaggtgggagtgggtgtccccatggggagtgcctcttccagagtgggctcagtcggggtggagtgtcctggcttatcaaaggtggttgtggagccctgtctgccccaggcctgggcagaggtggaaggggttggggaactgacgaggccttacctgtgggcccatggccaaggaaatgtctggtctcccacctcctgtcaggtggtgaggggagaggatggggcgtcagccggagacggggttcctagaggaggctgggtcctggcctggcctggagagatagggatgagatgggagggcaggaagggggtggtagacaaaggctgaacacagagagcacatagccaggcatgtggggactggggacaggggacaaggagggcacccatggggacaagagatagggagaggacagagggacaggagacggggagggacagaggatgggggacaaggaggggacaggaggacggggacagggaggggacacagaaacaggagctaggacggggacagaggatgggagaaggagaggtcaaagggacagggaacagggaggggacccatggggatagggcagggatctatggggacaagggacagggaggggacagagaaacaggagatggggaggggacagagggatgcagacagggaggggatagaagatggggggctaggggacaaagggaaaggggacagggaaggaacctatgggggacagggagacagggggacagggagaggacagaggaacaggggacagggaggggatgcttggggacagggagggaatgcttgggacagggcagggggacagggggctgtggctttcgtgggaagctatggaagacgaggccagaggggttgggcagggtgagatgagagaggctgagagcccctcaccggctgcggactcctccccacagggcagaggggagcattcgggtgcggccaggccatcagaggacctgggcttggctggagtcccagctcctcagccctcagtagctttgggccagccactgggcctcctggcctccacttgctcatctctgaactggggcagggttggcgtgtgagcctgaggccctgcaaagtgcctggccagcctcagctcggagccatggcacagcaccccctctccgccacggccccgacagctgggcgtgcgttctgctgtgggcagctgccctgagcaacgtagggtgctaagcagcatccctgtcttgcacactagattccacagcaccctctgaccccgtggaaaatgtccccacatgggaatatcctctgggggtggaactgcccctggtgagaacccctaggctgagacctcagaaggccctgagtcaaaccgagaagtcatcagagagccttgttttcagctccagggagcttgggcaggctggttttctgggccacacagtcccctccccagcccacctgtgctccgtgggtcccggggaagctgtgggggcctaattgctggtgtgagttcctttcctgttctgagtcacacgtgtgtgggggctctccctgtggtgcagctggtacagcggcccctggagttgaggatccaagcaggctgaggtctgggtttgccggagggccctcggtggctggtctttgtcctgctcccactgctgtgggcactgtaggacttggaacgctggtcacctttccagcctggcaaagggaggggacttgtctgaggcctcatggaagttggggcagggtcgaggtgccctgcttcctgggtgtgccagcagcctacagcctggctacagcgtaaccaggaacacccagcacaactgtcctttgcaactctgtgccctgacttgatggtgccagggctgggggggtgccggccagcagctccccaatgaccacccccaaatgctgtggccacacaaagccttccactgcaagacctgtggtaatacacactggacgcccctgttacaactgagaactcatttatttcatttccttccttcccttttttttttttttttttttagagttgtggtctagctctgttgcccagactggagtgcagtggtgcaatcatggctcactgcagcctcgagcccctgggctcaagtgattctcccacctcagcaccctgcgtggtttggactgcaggcacatgccatcacgccctcatgcccagctaatatttttttaagtttttggagagctgaggtctccctgtgttgcccaggctggtctcaagcccttgggctcaagtaatcctccctccttggcctcctaaagtgttgggattacagttatgaaccactgcacccagcccatccctcctagactaaatcttcttagaaaaacctacacttccaataatgtatttgcattttatgatgttgataaaacttcctaaagatgtcttatgaaattggtctcctttccccattgatacacatgatttttaaaactattggcaacgtttcaaaagcaatttctgttttgtcccagaaccgtgatccccttgtgaacgaattttcaaattaaaaggcaaatggttgggaaaattggatttaattgaaaggccattttattagaattgacttatttttctcgccactgggatccttgcctgaaaggcggctgtgggcagagggcacatactccccctgccccagcgcagcgtccctgcacccccaacagagcttcctgttcctcatgcccagtactcccagatgcctgcggagccagtcatcagctcaggtgtgtgaggccggttgggggagcccctgcctggcgcctgtgcctgtgagcagtgttcctgtggggccctgggaccaatgctaccagcgttggcgttttcccaggaagttgggaatcaggcatctcgtggcttccggttcaagttcctccgtgtgctttaagtctgggcaggtttccgggtcctggttttggctaatgaggaacccgattcccatgggggaggccggtggctgcagcagggccccgagcagtggcaaggctggccctcatgacagtgtcctcctcagggggcctgtcccaggctcttcatgactcccctggaggcttgttaaaggggcagattcctgggccctgccccagccccactgtggggaggggtgtcctggaagatgcatctgcccagggcttccggctggtccacacgcctgcacctggaggcccactgcccacatctcaggcaaacaggcctggggatgtttggggacccaactcctggcgtggaggaagcccctttcccaccccacatgctcctggtggtggcctgtcctgtgagcctggagggccggacgggtgggatcggggacccacgaccacgctcgctggcctctgtcctgtgcccaggcagggatgagaggccaagctggtgtcctgcagtgcacagtgggtgccggtcaggggatgtggaagctgggtctccggcaggcagaggcgcgctgacaagaagggtcgctgttcctcattcagggttcagtgggaagagagggtgtcgcttcagggggagttcacaggatgccgacttgaaaatacagccaacgcccatgtcccaggcataagatcacaaatcatgttttgccgaccagttcctgtgagccctgagccctgcgcggagggatgccccgtgcacacctgttcacggaacccctggacctccagtaggggtgcggcgggatgccgtcggctcccacgctgtctgtctccctgtccctctctctttccctctgtttctctgtctgtctctgtctgtctctgtctccctgtctctctccatctctctctgtctctctccctgtctctctgtctctgtctctctccatctctctgtctctctttgtccttgtctctccctgtctctgtctctctcactctctgtctctctttgtccttgtctctctgttttgtctctctttgtccctgtctctctgtctctgtctctctctctctttgtccttgtatctctctgtctctctttgtccctgtctctctctgcctttgtctctctccgtctctctttgtccctgtctctctctgcctttgtctctctccgtctctctttgtccttgtctctctgttttgtctctctttgtccctgtctctctgtctctgtctctgtctctctttgtccttgtatctctctgtctctctttgtccctgtctctctctgcctttgtctctctccgtctctctgtctctcttcctgtctctctctatctctttccctgtctctttctgtctctctttgtctctctctttgtccctgtctctctgtctctcttcctgtctttctctttctttgtccttgtctctctctctctgtctctctcttcctgtctctatccctgtctctatgtctctgtctctctttgtccttgtttctctctgtctctctgtctctgtctctctctgtctttgtcccaccttagccttgggaggggacagctcacaggctgacagatgaggtcatgtgtcctgagcatgaggttttcaggtctcacccacgctgtagcatgtcagagcttcgttccttttcatggccgcgtaatgttccattgcttgctggcaccacatctcctgtgcccggccctctgctgatgggcgtctgggctatgtgcaccgttcagctaccaggaatggtgctgctgtgaagggagctgggattttgtcatccacctgctgtggatggcaagtccatttccatctctggactcaggtggcccatctacaaaatgaaggggatgcgacccagaggcctctggcggcaaaaccttcccaggcttgtcctcttggatctaagggaatttctttcctccgagtccagcccctccagtgctcctgcccttcaggaaacatgcctgggacccctcacttgtgcccacccagccttggcccacatacctgcaccaagaggctaccctactcatactgctcagcccaaagggacccaccgtggggtatgggcaagggcgggttctgctctcccccggggccctgtgccagcctcagctggacctgcggttctgcttcctgtcacactctcccattttaaattaacggaatggtgcggtccccatgcacaccctcagctccactggggttttagcccagcccaggatcggaggcctgcaagggcacacccacctggccacgtgatggtgaagtggggtggggcagggcaaccaaattaacttctaattctaagagcccctggagcattcatcaccagcacttacagccgtgtgacctcacacaagtcacttaacccctctgagccttggggctcctgaaaagtggatggagcggtcacgcccacctgggagaggtggcttgggccagcaccctctaagctgcttgtcccaggccatcatggctcacggaccgcccctcagcctggcctgtgccacttctccagggcccggcacgtggcagccacaggcttctatcagctcccgcctgcctggggaaggacaaaaacgacaggttccaggccatggcctgcacccccgctggccgtgggcaggtccaggcctgcctgcctgagcattgcagggcggtggccaagcctgtcccatagcacctcaccgaggacctgggaggctggcccaggggagaggtcacctcagccggggctgggggctgtgggcagggtgggctcgggtttccctgtcccctcccccagctgtgctctgcctggacactgccacctcctcatgggtgtccagggccactgggagctgggcccaggggttctcaggggagcaatggtggagacaaagaccagcggacgggcgctggggtcagagctctccaatccctgggtgtctccttctcaaggcgtgaccacccaggcagtggccggctgcaggacagggcagcttcaagttcccagccttgccaggcttccctgtggccctggggtgcaggaaggagccccagctcagaaggcgagggggcgtctgtgtcctgcagcagtgggcacagctaggctctagccgggggcttggctgcagcctccagcgcagccctcacacacgctgttcccaagatggggtgaccgggaccggagccacctccaggtcccgggcatcagggagaccccaaacctggctgcatcccccaggccaaacccagacacaggggatcgtaacagaccacaggcctcacacacttgttccggcccaagcatcccccaggccaaacctagacacagtggatcataacagaccacaggcctcacacgcttgtcccggcccaagcatctcaaagagtctgctctcctgaaggccctcaaggcagccccaggagcgggtgttgctgtcaccccctcttccaaggcgacggctctgagaagctcctgcctgcccagggcacccccacggatgggtctgatccaggcccgccacctccaaggcagagctgcccacctggccttcggtttccagccgcggggaacagggtggacgaaatgacagtggagagggcacagggagggcaaggcgggggcacctgctccagggatgccccaggcaggcccacttgcctgccgcccccaccgaggctgtcacaggaggacagagcacgagttcccagggtgctcaggtgtcattccttccttcctgcagagcgagctgccctcggaggccggcgtggggaagatggcccagtccaccgccacctcccctgatgggggcaccacgtttgagcacctctggagctctctgtgagtgcgcttggctggccagagctgggggcccccctgggaggcactctgggctagcctcagccaccttcgctgggctaactgggccagagcaggaggggtggccccgggaggactctgggctagccccagccaccctcactgagactttgggctaaacttggcaaccctcactgggattctgggctagcctcgaccacccttgctgcactaactggaccagagcaggagaggtggctccacactagtcttgggctagccttagccaccctcatcagcttggggacagggcgggtcggaggggcagggaagagggactgctgccctaggccttccctggggatgcaggaccaaaattcagactcttttctctggccagctctggagagggcccatggccagcagaggcccagaataacagagcccatgactggctctgcctctctggcactcacagcagccctggaatggcaggtggaggacagagatgggatgagagggaatgggaagggcaggagacgtaggcctcaccaggagtctcaggctagccttgagctctgggcctgggaggtattggggtgacacccaaactggggactgacgcttctattttcctctccctgccccagggaaccagacagcacctacttcgaccttccccagtcaagccgggggaataatgaggtggtgggcggaacggattccagcatggacgtcttccacctggagggcatgactacatctgtcatggtgagtgggggggctgccctctgcaagaggactggagtggggacaacaaatgtggcctgtcctgtcttgggagcctggcagaaccaggagatagcctcttggttgtacagcttcccctgtgggtttctgaggacacttcaaattgcaaaggagaaaatgtatcagctcatgtaactgtcaatccagagataggaatggattcaggcatggctggatccaggtgtaggaagggcttcaggcatggctagatccaggtgtaggaagggcttcaggcacagctagatccagatgtaggaagggctttggacatgggtgggtccaggtgtaggaagggcttctactggtggatccaggtatagaaagggctttgggcatggctgtgtccaggtgcttcacagctgcctcgctcagtctcttggtctgctttcccctgcagtgactttgtttttaggccgcatctcctctcatggtgaagagtaccaggctccaccagcatgccctatccctgtggagaggagatccctcttttcccatagtccagcagtcctgcctcccgttgatctgaatgtggtcatgggcccatctctgagccacatctgtgcctctgattggcctggcctccaccatcagtggaacagggtgacaatggaatggagtggggtgggcctccccacacagggacccccaaaggaagatggaggtgctgtttccaggagaagaggactggatagggggcaggcagggccagtgaggcctccggcaccccatcttggcaggctcccccattcctgggagtctcaagccctgccccattggctgctcctctgggggaaaaggccaggctgtgggagctggtgggggccacgctcctgcctacctctctggctgcccatagccaggcctcgactgtgccgggaggtggatggcaggtgggcaccacacgtgaggagagagcaaagatcccgacctgggaggcccagcgaggccagccgtccccgctggactcgtcagctgctcggccccgcccacaggctggctgccccgccccgcctccgccgcccagggattcgtaggtggggaatttgtttgcgctgcggaaaaccagcccgaactgtggggatacgcggaacagcgcgtctggggcagggtcgggcctccctcacttatgctcagcccgaaagggagggaggcgatgctgggcctctgggggcctgagagcacccggcctggccctcctcctccctcaagtccccattccaggagctggagccccttccttgcccctgcgcacgactgactgtctgaggcatgggggtgggcggcccagccaccctgagcactggagggagtgggggctgtggggctccagtcagaacgaacagagtgaagcggggtgggggagtgtagaggtggaggggccgtgttgcctgttccgtctccattgcggatgctgggctggcccagagccatgtggggccagagaaggcacctccttgggcagccacagtcccggggggtcaattcctccgaggagcccctcagcctgtatctgagggttcgaccgcctgcccctgccctcccacccctgctcaggagaccgtcccagtggaaacactcgacagtgtctgcgcgtgttctagtcccgtgttatgggtgaggaaaccgaggcagatgctgggaaagggtgggctggggatggggccgggtagtgcaagaaagtgagactgcaacctctcccctctctcgctttggaacagttctgccggctgctctctggggacaagggtcctgaccccaccccctccaggtccccttctggacatccgtgtcctccaatctggggaggggcaggaactggccgctggaccccagggagggagggaggaagacccataagattgtcccctgagatccagaagccacctcccaaccccaagttgctcagccactccccctgcagagggcagaaggcccctaagatggcacagacccaccctgtgtcgggaggaggacctggactcagggaggcagaaggagcagttctacattcctgagtgggtggagcgtgcttgtcctccccagccccggagggttccctgagctccatatcggggtctggtccgagcccccgcctgctggaacgtgccactccccagccacagggtgacagtgggagcctcgaacctccgcaaacagcaaggtggctggatctgtctggcagcgacacgcctcctcccaaagccatgtatgaaattcctaggtgcacagctcgactcacggagatgggggattccctggaatgaaggcaggcccaggcctgcgtggggagagccaagcctcattctgaccccagggcccagccccctcacaacagtggctgctgggccaagagcatgctgtcccctacccctgactcccatgggagcgccaggtacaaagacagagactccgaagggcgccaacgggtgggctcgggcagcctggcacagggcccagggcttagctgccttgagaatggcccctggcccgctaactccaggggtcccagagtggggctggagctgaactggggggcattgttttaaagttcagcccaggagctcagggaagctgctgtgctggggctggggacctggacccggttcagtgcggatgcgggcatggggggctctgagtgccccctggaaaactgccacctgcagctcaggggcccagttctagccccaccacgaggctggtgaccttggacaagaaacaccacacaggcccggcctcgggtcagacaggcggttctagtgccggatgtttccggggctaccgatagtcctgagttcgtggctcaggtggggggcctgcttgtggaagtggctgcacacgcacctgcccccacctgcccctggcggctccctctggccacctgtccctgggtgttggtggcatctggctgctcccatactcaggggcgggtctgggactcatccagcaaaggggcctcagctcgggcaggcacagtgcttgagcgcaggacactggtcctctgcagtggggcgtgccttccgcatctgggggacgtgggtctccccgaaccacgagcaggcagattggttcccgttggacacagggtgtctgagggatgccttagccacctgcttagcagccgtgggagacaggcggagcaggtggtttcaagctcccacaattctctgagcctccatgtccttgctggtgaagctggggtgacagggggtaggagcccagagcagagagccctttgggaggtggcatagactctgggatgccaggtgctgggtgctggctctgcccaaccccgtgggcctcggacaaccctcctgccacactggcccctgcagaggaggctgagtttaggcagttcaggagagtggggtgtgggcaagagcagttgaaccctcagtgggctctagaggagtcccaggccacagacttattggggagactgtgagctctgtgtggccatagcaggaaacagaccccgtggtcactgtggccatctgactgaggtggcccagaaagtccagcaggccgaggtgggtgtggctgggggctccgaggccaggtttgctgagctcaggacctaccccttcccttctgagctgggcaacttttaaagaattacatagccctctgggcctcagtttcctgtctataaatggcgctactgagaggctccaagtcacccacgatgtgaggatgtccagtggtgccgggcccatcgggagtatgtgacaaacgctaggtgtgagggtgagggcagggaggaggccctgtgtttaagaaagctgctcctcggacaccagaacagcagagccaggagggcctaggataggatctgggaccagggcctgctgcctttgcctggcacagttcctgcctgagctgtcccgtgccttaggctctggctgtccctgaagaccctacatggctcacagggacctcactctaaaatagggccccgttctgcaagaggagagcagggggaagcctgtggcccgggcctccccatgggctggggagggtgggccgaggagccacagctaaaactggcccagcccctgccctctcaggaccctggctggttccctgaatgaggaaggcttgacgggcttctggatgccacctgggtggggtctgccctggccacccccacaccgtctgggaagagctgcagaggataaagctccctcgtaggctcgcaggctgcgaggaggcagtgtgggtgtgatggtggggcgggggtcctatcctcacccggacccacccgaggagtctctgcagtgctgggcctgggcttggaagcgaatccctgcccctctgagcgctagcgtcccctcggacaaaaccagcgcagggcaatgagacctgcggcccttgctggctctcaggatgctccacaaggagggaggacacaggaggggagaaaaggagagagaggcaagtgtctcctccctcccctcccctccactctgctccgctcccgtcctctcccctcccctctctgtccctagagcctcctccagggctggcccctcccctgtgccccttcctgcctctcctggcgcctttctctgacaacaggtgttgtgggcaggtgggccacagagcggggtctacagctggtggggcagaaggcaggctgatctaccctgggagccccgggaacccagtggcaggacagacacccggggtcagaaccttcggacacttgggggcttgagaccctagaggtcaccccagataggccttggtgacttcagggagaggtattctccccaggcccaggagaaggaagggcgcaggtcccgtgcatgtgtggcccccaggaaagggcaggcggacagagggagaaggacacccctcccttccagggaggatctgtagctggaggaagggtggggtcatgcgtgggagcagggagggggctcagctcaccacggtcagctctgagactccagcccacccgttaccccctcccagagagcccccactcagcctttcctttggtgggctttcgtgacaaagcactttggggctgcacagaagtgaaccccacccagcacccaggtctcagagccttgcagcttctgcggcctcttccatgcggtgggatgaagccagctgcccagcagggaccctgtgccatgagtttggccttgaactgacacatcactggcaccaggaaacgaagtccccctgtctgttctggcacataacccctcccactaactggttcctgaagagtgccgtggcctgcggcagcgtcgttcccccctgtcctgcggcccagggtcctgcggaaagtcaggcggaatccccggtgagtcagaagcagaatgaaagcagaatggaggacccagcagggagggaacctggaggaggcgctaagggccacgccaagggggtgtggccccagatcccctgtccctgtcctctgcaaggctgggccttgggaacgtttgcagaaagctgggtgccgctctggggcagaggccagtggttttgggtgcttttgagttggaaacgtgtagctcagccgcactgggatccccgcagcctggcccagatgctaagggtggagagatgcggggtctcaggcacggtgccctgggcatgggtggggctcgtgctgaaggcagcctggctgtcttccttcctcacgtccttccacttggcgctctccttttggctatttataaaaccatcaggccggccctgtgcatgggactcgcctgagtctccttttcaatgcatcattccctttggcaggagaggacaccgcctacagaggctgaggatgtgccctgtgggggtcgggagcggaacccaggccccgcctcggccctgctctgagggtctgtccatccctggggagcccgcccccaacccaagaggggtcccaggctcagaagcagaaggcaccctcatccccagggcatccccgatcccagcaggagtctcctagtgctcgccctgggctctcctgcaaggaggctgctgctttccccagaacatccagtctgggccccagccgaccccctgcagggggcttcccagagacgcccttcctgaacctgatctaccagacaaaactgtctttttctcagtcgtctcctcctgagtgctgctgcccttcctgttgggggctgagatcctctgccacaggaagagacgggcgtccaggactcacctgctgcctcccggccctagggccctgagctgggctctccaggccccagccccttggggcacaacacctggaatcgtcctttcgtcctcagcccggcctgctggtggggcagggcgggtccccagggctcctcaggcagctgcagtccaaacctcccctgccctcacccagctctgcccgctctcccgggggtgggggtggggagcgatgaggcccctgccggctctcggtggggacgacagggaggaaggaagctggggagatggagacaagagaaagcaggcaggtggtttgggatttggcaggaaaaggttggaaggaaaggggaaagggtctccgcatggatttctcagctccccatggatttctcagccctcgtgagagccacggcgccctggggactggaagtgtgggtccgcaggccccagtccccaggtttgtctgagcatagatgccctgcctgcttccagggggactcgggcccctctgccagggtcaactttgtacccaagacggctgaaatacaatggaaattcagacggcccaacagggagtggcagtcacctcaaaggccccactagacgggtgcggggcaccactgcagagcccctccctggctgtgccaaggccgtccacgcctgcagggggccccactgccgggctgttctttggcaacagtggcttgtccctgtttcctgggggcttggccagtgccagggtgggctccaaacgcacggctctgggctcttggactcacccctgctttgggcaggcagtggaaggcaggccccacaagagctgctcactcccgtcacctgtctccctcgggggtctagggtcgaacctcctgtgagcccctcctctccatgcagcccttggactggtcctggcggaccaccgagttccccgcgcagggggcaggtgcgccccacctgggtgccaagggaggcgacaccatctctcccccttggggtggcccagccttgcctaccatgatctccagggccggggctcagccctcatgcctgggaacagaggctgctttacggggtgagggcctggggccccccgagccttccccaggcaggcagcatctcggaaggagccctggtgggtttaattatggagccggcgctgaccggcgtccccgccctccccacgcagcctccttggtgcggtccaacacatcaccgggcaagctgaggcctgccccggacttggatgaatactcatgaggaataaaggggtgggccgcgggttttgttgttggattcagccagttgacagaactaagggagatgggaaaagcgaaaatgccaacaaacggcccgcatgttccccagcatcctcggctcctgcctcactagctgcggagcctctcccgctcggtccacgctgccgggcggccacgaccgtgacccttcccctcgggccgcccagatccatgcctcgtcccacgggacaccagttccctggcgtgtgcagaccccccggcgcctaccatgctgtacgtcggtgaccccgcacggcacctcgccacggtaggtgtgacgcgccattcataggatctcttcggggactttgcgggggattttgctgcagtgtagggttcagaggggcatccttctgcctgccttcctggcctggagtctgctgccagttggggtgagcagaggtaggaagggaggcgttgaggggctagaggcaggtcccaggcatggaggcaagcagattcgggctccaacagcctgtgcccacctgctgggcagggacccgcagccagggagaggaggccgggtccatgccgatggggctgctggtgtttctgcctcgtgctcgggggtctctgatgctccttggctttggggctggcggcttggtccaggctcagagtttccgagctgccctgccctgccccagctgccaggagctcagtgcaccctagaagtcatctttgctcctgggcttgggtgtgaagctgcccccgccctcatcagggaatttgctcatttgacagcagtggcagacggtgcttcttgtcagccccacgggctcttctcggtgtgggtctgagctccagggccaggacctgtggcaaactgggcttgaggcctcttgcgccacccgccccctgcagtgggctgctggcttggaagaggggagggaagggtctgcagcttgtggttggcccctgcagcctgagccctggggacctggcctcacttccagacttgccaggtccctgggggccaggcaggcaccagctgctaattgagaaggtggaaggctcggcacagctgctccacgtggggccgttcctcctcccagggaagcagacagctgggaccatgggtacctgtgccacacgggaaactcagccatgggcagggggcagcgggcagataggcagagtccaagtgccccgaagctctgctggcactgggatgtagaggcccaaagatctggggacggaggcctttggagccgtgggctccccaggcagtgtgaccagggtgtgtgtgacagcgatgtgtgtgagcgtgcacatcaatgtgcatgtggcgggtgggtattggtgtgcgtgcatgtgtgtgtctaagcgtggatgtgcatgcaatacgcaggcgaggatatgtgcagatgtgtgtgtgtatgttatgggtgtgtgtacaggctggtgtgtgtgtatgtacacgtgtttgcctgtgtgttgtggtgtgtgtacgtgtgagcagattggtactgcaggtgtgattgtgtgatttgggtgggtaggtgctcacgtgtgtccgtatgtgtgttgcgatggatacatggatgtctgtgcctgtagctgtgtgttcccaggcaaggctttgagaagagaggcagtgtgtgtgtgtggcccagagggtgggtgagggtgtgggtgacccagccccacagcctgcccagatgctgggtccatgcactcgagtctggcggcaccatggcctctccacacgcctgcgtgatctttttatctgaaacccagtgctgggactgtagcccagagcgtggaacggctacatcaggcatggggtgtccctctctcccttgtctggctgtcacccacttgtgcattgatacatgtatccaccaacacgttgctattagaaacgcacagcaggcctggggctcctggggggctgccttgtacccccagactctcccaggaggtgtgtgagctgggaggggctatctcccggctgctggaccgcctggaacccgaggtggatccagaagcctcgggtggagaggccagtgtcgctgcctggccagccgagaagcctggggacctgggggactctagtacaatcttttcccttgaatggagcagatgtcaccatgtgactcaccctctcgggggactccaccaaggttgagtatgtggttgcgcagacgccattcccgggaggggtggggaggtggagccctgctgccctggcctgcagaccctcactgcctgcaggagctgctggtgtccactcggctgctgctgcccggtgccctgggcgtcagcaatggccagctgtgccatcactgtttctttttacaccaaggattactgtggttcgttcgttcatttgtccattcattcatcccatcagcaagtgttaactgggcacgttttgtgtgttaggctgagtgccaggagcaggtggaggcagtgcccagagccagccatgtctccagcacctcttccctctcggggggaggtgggctaggctgggccatcctaatgggcggagtggtgactcagtttccctgtttctgtgccagagagagtattcatgacctcatcttactgcaggaacgtattttgagagagaaagtggtatttggcccaaagggttttaaacccaaagtgagcgaatagagttgtattggagttggtggctttgtgaggccctggttattcctatcaaagcacagtagctgctccggagcccgctgggccagcctggccctgggaagaggcccctgggttgcaggacactgtctgagcccccagctgggcccgccaattgcccccagcctggcacagggttccaggtgtgggcttggggtctgtctctctggcatctgccagctgagtctttggtcagtgacgccgctctctgagcctcagtctcctctatgatgaggacggtgttcaccgtagctgctcggctgcggggcccaatgggagccactggttacttgctgcagatggggacgcaggggggcctggcctggagagctgccgcctcagcccctcctcccacaatcccacccatgcagccttagcccctcctcctgcaatcccagccctgcagcctcagctcctcctcccacaatcccacccatgcagcctcagcccctcctcccgcaatcccagccctgcagcctcagcccctcctcccgcaatcccagccatgcagcctcagctcctcctcccacaatcccacccatgcagcctccgcccctcctcccgcaatcccagccctgcagcctcagccccctcctcccgcaatcccagccatgcagcctcagcccctcctcccgcaatcccagccctgcagcctcagcccctcctcccgcaatcccagccatgcagcctcagcccctcctcccgcaatcccagccatgcagcctcagcccctcctcccgcaatcccagccctgcattctcagcccctcctcccgcaatcccagccatgcagcctcagcccctcctcccgcaatcccagccctgcagcctcagccccctcctcccgcaatcccacccatgcagcctcagcccctcctcccgcaatcccagccctgcagcctcagccccctcctcccacaatcccacccatgcagcctcagcccctcctcccgcaatcccagccatgcagcctcagccccctcctcccgcaatcccacccatgcagcctccgcccctcctcccgcaatcccagccatgcagcctcagcccctcctcccgcaatcccagccctgcagcctcagcccctcctcccgcaatcccagccatgcagcctcagcccctcctcccgcaatcccagccatgcagcctcagcccctcctcccgcaatcccagccctgcagcctcagcccctcctcccgcaatcccagccatgcagcctcagcccctcctcccgcaatcccagccatgcagcctcagcccctcctcccgcaatcccagccctgcagcctcagcccctcctcccgcaatcccacccatgcagcctcagcccctcctcccgcaatcccacccatgcagcctcagcccctcctcctgcaatcccagccatgcagcctcagcccctcctcccgcaatcccagccatgcagcctcagcccctcctcctgcaatcccagccatgcagcctcagacccttcctcccacaatcccacccatgcagcctcagcccctcctcctgcaatcccagccatgcagcctcagcccctcctcctgcaatcccacccatgcatcttcagcccctcctcccgcaatcccagccctgcagcctcagcccctcctcctgcaatcccagccatgcagcctcagcccctcctcccgcaatcccagccatgctcttcacttgcttcccacactgtccttccacatgggggactggataatcctgtggtggctctggccaaacaaggccacgttctgagtctgcggctcccacggactggggttgatcaatgcccaaccccgaggtggacacagagacattacccacttctgcctgtagcaaggaaggagccgatggctggatgagtggggcccctctagaagaggctgagcgctggagacgtcggagctgggtgctgtctaccaacacccaggagtctccctgacttcccaaatgtccagttcatggccccttgccccccacttcctcctggggccgctgttcttcagctttagggtctcaggaggttagccagggtgatgggagacacccctagctctcctgcgccctctctatggaggggctggagcctgtctcgccgcagggcctgggctgtgcacccttgggcctggcctgttcccaccctgcccctccgcatggtgggcatccatgcgttgcgggaacgtggccacccctgtgctgaggagcagcacggacggatctggagctttggacacccccactcccgtgcgccccatggagccagtgtccactctgttcctgcagaaagtgaaacctctgggcaggatgggcctccaggacagggccctggggcggggggaagccaatcagtgcagcaagctgcagttactaggcacctactctgtacgtggggctacggaaccaagggacgcagctggcagacgttctgggagggcccccggctgcagtgctggggatagaccacaggggggcagggccaaggccaggagccgcctgcaggctgggacgatccagggaatggggcagccccgccggtcaggtggtaccacaccgtgggattctgggcaagatttgctgatgggctggatatgagggaaggggtgggggagaccccaagttttctgccctgagattggtagaactgcagcagagcaggggtgaaaacgccgcggtcggccgtggctgtgttggagatgcccggcagccattgcatagctgagaaggagccgcatgcagggaggaggacgacgagcgagcagttcccaaagccccatgagggaggggtttccagtggtcctggggcctgaaaagtgtgaccacctggtggctcagtcctgtgtgcatcagaggaggtggtgggtggtggtcaggcttagggtggagtttgaaggtgaccttagaggaagagcaggggaggattccagaaagatgctgaggttccatttgcacccttgcaggaggctctgctgctccccaaggcaggaaaggccggcagggtctggatgtgaggtgggtaaggagttggggccacactggcaggagcggccatgtggacactcagttgctggtgtgggcaggcaggctgtggagacgacctctagggagtcctgcacatgggcacttacagtcagggctctgggggatctgcacggaggcagggagagacagcggctggagctgagcactgggcactacgacatccgagacaccaagcagagggggagatgcagaggggcagcctgggaggccaggaggcacgagaggctggctgggagaacagaaaagggactggggcttggcaacccagaggctgctgagttcccacggtttggagagggcagggcccaactgggaatggctcatgggattgctgagcatggccaagggagccctcagcatcctctccaggccttgtgtcatgaaagaccccgagcagcggtggggctcaagccatgtggggccaggggagggaccagttgtcctaactggagatccagggatcagaggagccaccccactcacccgcctgctgtgcctagtgcacgcccgcctccggcccccctgccaccctcggccagctgctatttctgtctcctttgttctgtcccccattggacctccccccagtcaccagcctaataggacctcaacttgctaaacccaaactaaacttatcttcccctgagaggggatggtgccgtgtctcagccagcaggaaatccactctcgcctttgctcaggccagagccctggaggcactctccatgcctgaggtcctgtgaatcctgcctgcaaatgtgcctggggcccctgcggggcccacctcgcacccgcggcccacgtcgcacccgcggcccacctcgcacccactgctcagatacatctcacaattgctgcctttgctgacgcccgccctgtgttctcaacaccggagccagagggagcgctttgcagccccgggcgtctctgctcagctccgaccacctctcccgctatccccctgggctccgtctctccctgcacaggccctcggcccttcctctggctgcaggctctctgccctgctggtccccagcctggaaacacccccaggcccacccaatacctggggcagatctttcccttcctgcaggcccgccttcaccttttcccgagcccgtccttgcctggacgccagccctggcccctgtgcctggctctgtgtttctgagaccacttttgatcccaagcccctgcacgcttgctggctggtttgtttactgtcgtcagcatggagggccggggtcgtgtctcgtgccggctgccatcttcctgcacctgggagggtgctaggatgtcaagcctaggaaatgggtgtgaagaggagacctgcctttgcaggagctgaccaaggccagtgcactgggcgggaccatccgtcactcctgagcccactaactggggaggggacaggcagagcggggctgggtgattcctgagcaagcatgctgctgtctctctggctctggggcctctgccctctgcctcgatggccccccacagccgtcctggaccgccttctccacctttgggctcctgctccaatgtccgcttatcaccgagggccatcggaggtggcacgccccgtgactgcctccccctccctgtaccctgcactgcacgtgtcataattcaagttctcggctcagccacccattctcggctcagccactaatgtgtgctggaaggtgtccaggaagccctgctaagcatctgtcagtgtctccagcacagcaggaggctgttacaggtggcgcctgattcacatctgcaggacaggtggatggatgggcagacagatgggcaggggcatgtgtgcaaggacacaggatgtcagggctgacacctgggttgggctctggggtgctggcagcagggttcggagaggggagagaagcgtgtgtgagctgtgccttccccctcgtcttcccgggcactcggcattctgggtgggagggcctggaccagcccgtttccaggtggttaaataaagtctgtgcatcctgttggccacctgcctctcataggcagcagcacagggcctgatggggatacagcctggataccccactggggcctcccgcagacactcagggtccaggctgcccctcgccacaacctggaagggaggggctggtgggccagccctctggaggaggcctctcaggggaggtgggctttgagcgggatccgggaggcagggggcagaagctgagggacgtggagaagggtctgggggaggaggcggcggcaccgtgagtggactccggggcggttagcaggtggaaggcagtgagggttgaggagagggtggggcgaggcccttgcaccaggccacagtgggcggctcaaatgtgggtccgtggaggcccggggggcaccaggctaccctggagtcatctgaagtcacctgggcgtgtggagggacatgcatctgcaaggcccccatgtggcgctaagcacagagtgggtgctgcagacgggctcagccgctgcgggcaggtgcaggcaggatagcagcggtggccctgggcctcgcagtcctgcagacacacgtctggggactgctcctgggggcgcgtttctccggtgtgaggtgtggaaagttccacatggccctggcacgggattgggcaaggcctcgcctcagccccgggtgagagcagagggtgctgtgggtgagagcacagggtgctgtgggtgagagcagagggtgctgtggatgagagcagagggtgctgtgtgcacattgtcgggagagggaggcttccccccagccgcatgtcgaatcttgttggcatttccattcgtttaatcacgggctccgggagatgctgtgggaagtaccggcaggacggaggtcttgccctggtgggatgggctctcttcctccgaagcccaggctgcttgtcagtcactcacccctgggtgaggttggggcccaagttcagacatgcccacgagagatcagggagtttgaggagcggcatactctcaaaaaaccacaacagtctggtctcaatattctccagggaacgaggacacggacctccttgttctacaagagctggggtcacagctcagagcccctgtccaggctggagggagaaggccaggaggccagagggaggccagctgagccctcaggagactccaggcaggccccgatgccagactccagccctcaaacatgctgccttctggaaacgtctgtcacgggcacaccatgcaccatgccatggctgccagtggtggatgaagaagagcatgtctctgccccgtctggagctcccggttcctgtcctagttgaacagaatgaatgagagtgcgggataaatgccgggcggggagcagggatgctcgggcgggggcaggagctggagaggtgacaggagcgagggaggcggaggtggagctggggaggggccagcggggcgtcaggatttcagctgacatccctactacgctttttcacgtgcctccctctctgactcggatcctaagtgattaggatcagaggaatctctgtttccaagagaagggggactgcatggccagaccgtgggctcgggccccagtctcctgatctccgccaagcccagggccccaggaagcggccccatccttgggagctgtcctggcctcagctcccaaggatggggtccctcgggaagctgttattgctgtctacggggcaggagctccgtctttcgagcctctgcacttgtggagacaaaggtttccgaatgagcatttgtgccccgccctccccaccacccctgccaggcccaatgcagggaccaggctgcatgtgccttccccgcctcacatctcctccgctggaggagtcagccaaaaccgtggcctttggagatgtggccagagtcattgtgaattttgctggcaggtttctctgttgtcatttccactaaaaaatacgttccgttctggacagtaccacatctgtcccctgtcatccgatggcacggtcgtgacctcccatgccttgctttgcattgtgtcttaaatatcctaggctctgataaaaggcactgtggataccgggaagcgagaggagtggactaggggggaacagggacacaaacttgaaaaagatttatttcccatctacttgtaaaaaaaatcactcaaatgccccacgcctgtaatcccagcactttgggaggctgaggtgggcagatcacctgaggtcaggagttcgagaccagcctggccaacatggtgaaacccccgtctctactaaaaatacaaaaattagcgtctgtaatcccagctactggggaggctgaggcaagataatcgcttgaacccaggaggtggaagttgcagtgagccgagatcccaccactgcactccagcctgggcgacacagtgagacttcgtctcaaaaaaaaaaaaagtcacttgagacggtttacacattttaaacagtcaacaggtgcaatgggaatcttttaacaaaaccacaaaatccaacttaatctgaaatagaacagaacccatgcggcgggagggtgatgatggggcccagctcccctccagctcctggccggtgaggacaaagagtctttcaaggggctgtccccgccctccacattctgaggaaggcagcctggaccctgggcactgtctgggcttggggctgtggccgacatggcgggcagtggcacaccgtggccacttcccccagttggatggcccgcgtggatttcagggtctgtttcatccaaccaagagtttctgagcgtcctgtcggtactggctatctggacacctcggggaacaggagagaccccgacccctgtgagcacctgcccccgagagcacctgctcttccccatccgtccctgtgcccagggcttagcgactgtcctctgcgtagtgaatctggattcccgtccctgttcctcggcggagcctgcccagccgtcgttcctcctggctgggtttttgtgccaaggcgtggaggtcatgcctcgtgcatgggagcttcctggacattggttccaggagggctcccgggcgagagtcacttccgatgaagtctcaggttaccatacttctggaccctcttgatccccacaaccatcctacgaagtccacgttgatttcttttttggtttttttcgagacagagtcttgctctgtcacccaggctggagtgctgtggcgtgatctcagctcactgcaacctctgcctcccgggttcaagcaattctccttgctcatcctcccaagtagctgggattacaggtgcccaccaccacgcccagctaatttttttttgtagttttagtagagacggggtttcaccatattggctaggccagtcttgaactccggacctcaggtgatccgcctgcctcgtcctcccaaattgctgggatgacaggcatgagccaccacgcctggccagtacatgttgatttcatccccactctgcagatgagaaaacgaagacctagggaggtggagcgatgggccaggttacacaggtggagctgagacttggccccaggactcctgacctcagagccctgcttggccccccaggtccctgggaggtctctcctgcccctctcctggatgggcagagaggcctggtttccaggatggtggcgtaggggcatcagtagacccagaagaacctgctgttctgggatgggcagccctggccaccacttcctgcccaccttgtgggaacccccagacctcagccatcaccgtccccagcttggccgacggtagatgctggtgcttggattggggtgtccagccagtgggatggggcttcagggctgggctgagctctggcctcccccacactgctcctctctgctctcagacaggcaggccagggggcaggcgggaccctccacagccctcctggagggggcccagctactgggtggcctctcagtctctgacccctcattttggagcaaggtcactggcctgctgccaccccaggggcatgggtggatcaaaccagtgaggtctgggaactgtgttgatacctgtgactggcccaggcgagagagcagccccatttaccactgcctgctgcccacaccccagcccccagcccccagcccccagcccagagctaatctccagcacaggtgcacccagggaggtccccaacccatccgcagggaggagagatgaggcctcctgggtgggtgcgtgggggctgcagtatttcccctggcagagcactcctgccccgcaacaaggccctggggccccagcagggcctggtgcgtccgcggcctggaggctggcgggaaggccacccgctggctctctggctcccgcgcactccttgggtcaggcccaggagccctgcacacacatgtaggcacttgtggccgccgcgggccgggcgtgtcctaattagcccactatcttgggagctcttgttgaaagcaaaacaaaccaaaaaagtcctggttgtgcccgggttcctccccgtggcttccgggggccctctggttgtgggagaccccgggctcctgtgcaggcctgtgttaggttcagggttccctgtttcagcagcttgaccccgagcaggagccaggccccagggaaagctccttgccgccaggcaggaagcgaaagggaagaccagagtcccccgagccaggtggaggggcttgtggaggatgcctggggaggcctaagggggaggtcagagacccagaaagccccctacacttcccagatgctgcgttcccagctgcattcataactgcagctgcaaagcctctgccacccactgggggtgtgacaggggcggtgaccacaggcagggccagcgtgcagggagagaggtcccctggaagcaggaggagaggacagcgtcccctgggcagaggacaggcccagtaaccctggggaggagggggcttcagaggcccccaccccgtgtcactgagcctgaggatgagaggggaccagagggagaggccgacatcggggccctgcctgaggaaggccctgctaagggagcctgcctggggccctgggccacagaggacggcaccgagagggcttcaggcctgctgtccggacacttgtccactaattaggattcccgcgtggggccgcctgccgcaagggcctggctcactcccgctgggctgtgctaggcgcagagatcctatcagctcttctcctcttgcctcaatgactaattccttggcaccttcctcagatcatacaagaatgtggacaagttaaaatatgaaacacgttgtcgtgggtctgcatcctgcttctcccaaacaagggaggcatgggctttttgccccactggctgtcctgttctcagggatggagcagggatgggagtcgggcagggggaccctggagcctgcccttgcctgtcatcctgacctgagaagcctcagctgggcagcccttgagccccgggatgttcttgcccgggggactcaaatgagtcaggaatggggaagtcgtgcatccctgaggccatccccgggcccaaaacagggaagacctttccaggaaggccaccgctggtcacctggaagagagagggcaccacggagaggggagggtgggcaggctggcacccggtacccggtgatgggaggggccggctcatgtcccacactcactcctgggcagctggactgggggagccgtcctgcattcgcttgttcgtttgttctgccagctcgcttgttcagcgagcctttcaagcagccacgctgtaataggagcacggactgagggtgtcggctccgagccgtgtgtgtaattctgctttttctagtagccgcattcaaaaaggtggaaaggagctggcggaagtcatttaattatttcctgtattcacccgtaactgtgatcgtttcagcctgtaatcagtaggaaatggtgagcgaggtgttttccgttctttccgtggtcctgagcccttggaatcggggtgcgctcacacactgggctcaggtccatccacatttcacacacccccaccctgtgtggccagtggccaccgtatccagggtcctcgtgggttcacagtcgagtaggggagacagaagccatgggggacatgcgagcctgcccttccggagaatggctagaaagatgctcaaaccgggtgacgaaagagaacacctgaggcctgggcgctgctcctgcccgtgtggccagggctgacccctcggaacagtgacctctgagcccggacagggctggtgaagggtcgtgtgcagaccacaagtgcaggcttccaggaagggcctgggcccgtggtcgtaagcaggtctcagacacctcagaggcctcttgggcctcggtgaggagtctgggagccggggactctggggcggggcctgggctgtgcgaccagagcctggcactgccccttgtcacccccaccatcacccaacctcccatgtgtgtagctgaggcaggggtccatcctctgtgccagaagcctactggcagctcgccggtgcccagggtgacacccaaccagacaccaggaggagcaggagtagcctttctacatctttctctgaggggggcagtggctgcttccccagaccccctcacaatagcccaggagccaggagaggcgagggtcacccttccctgggatgttatattttgtttcgttttttgagacaaagtcttgccctgtctcccaggctggagggcagtggcgtgatcttggctctctgccgtctcagattcctgggctcaagagatcctcccgcctctgccccccagaatgctgggattacgggcgtccccccgtgatgtttttaagctggcaccatggcttatccacgtggcagcgtgtgggagcttccttctgtcttatggccgaggaagaggccactgtacagacacactgtttctttatccatttgccattcagtgaaccctgggctcctgggaaggacctgtggtgcaggaagttagggaggttgtggggagcgcgacagaccaggaaggaggctgcagtggtgccggagaggtgggcagggcccgtgctgcagggggtccccgttccactggtgggtgggctccccaggttgacagctcacagccagcttaatggtgccagatgatggcagcttcagccgaggcctcgtgccaagacccttgcagtggagccagggcacgggtcgcccctgacggctcaggcctgctggggctgttggctgtcctgggctggagcacacagggagagggcctgcctggcctttggtggccctgggaacagtggtgatggctctggtgagcagcagtcccctgcctcctgcccctccggcatcccgggctgagctgcctccacgttggactgcactcagtggaggactcagtagaggactcagagaggacgcaaactctggacttgcctggcgtccttctccattggatgctggaggggccgggggatgcggccctcgtcagggacctcagtggatgtgtgtcctaggacctgcagagccgagggcctctgggtcactaaacccaaccacctctgatggagaaggctgaggtgcaggaaggggctgagcctgggagtcccggcgaggcccctgcaccctcctgtgcgggcagtgcacgttttgttttttggattggagggggcaggctggtgggagggaagagtgtgctcacagcacaccacagcttctctaaagagggacacagggcagaatgaccgccccccgcccccggcccgcctccgcctggctctgccccttcctgccctgcaatcccagttcacggtctgggggtctcagcctgcaccttgctgactgctggtgacctttgtgccgtctgctggggccgctagatcactggggtcaatcgtttccccagccccatagctcagtttcctcatctgtaaaatggggacaatcatggtgcccaccgcaggcctggggagaggggtaatagggacaatcacggtgcccgccgcaggcccggggaggggggtaatagggacaatcacggtgcccgccgcaggcccggggaggggggtaatagggacaatcacggtgcccgccgcaggcccggggagaggggtaatagggacaatcacggtgcccgccgcaggcccggggagaggggggtaaaggcatttgtttgcgttgagcctcgggggtcacagggaaagcgctgtttatacatgtgcagtcttcctccagcacccgcctctggatttggaaggagggtcttcctcagcagcccaccaagtgaggtctgccctgccctggatctgagacatcgaggccagaccagcaccccctccctcagctggggcctcccttaagctcctggcagaggctgatccatgctggggtcccggggcgccacagacggtggcgcaggggacacacccacaggggttcctgttccttggtgtgtggtcctggcgggggagctgcgggtaggggcctaacgagagaaccccgggccagggggcagcaggggtgaggctttgccggcccctgagcgtggagcggcctttccagtcggggtgaggccgttcaccgagagatgaggccgcccaactgggaaaattgggctcagccattgaacagcagttccaccttatcccaccacctagagggccagacctagtgagagcccggatctggtctccagcacctcaggggcacccacgcacccaagcccaggtgtgcgcaccctgcactcagggcccacttgtgcccagcccacctcccccactgcctggctccctggggctggatctccccactttgagctgtgaggtccagaccccgatgccgcccggagggtacagtgaagcccgtgtgggcatcagggcctgggagcctcccccacccgacgcctcccctccaggtgtgcagagagtctattccgcctcatcaacggctgggtggatccccagaaaccctggcaccgggaggctgatggaggggagggcgaggtgaatatgtcagtttatcccaatgcaagtagtggcctgttgggatgggggagagacccggggaaatatttgggatgactggagccgctggccctttaaggctcctgtaacaggacacctcctagacgggacaggacgactgactgtgtgtgtttccccctccctcctcccctttcccgcgccaggcccagttcaatctgctgagcagcaccatggaccagatgagcagccgcgcggcctcggccagcccctacaccccagagcacgccgccagcgtgcccacccactcgccctacgcacaacccagctccaccttcgacaccatgtcgccggcgcctgtcatcccctccaacaccgactaccccggaccccaccactttgaggtcactttccagcagtccagcacggccaagtcagccacctggacggtgagttcccctagtccctgagggctgcgggctgcgggctgcgggctggagaggaggtggctgcgttccccgcacctcaagaggtctgagctcgccccactgtctgctcggggttcccacctggcccgggccaggaggagcatcgggcaggaggcgggtctcagggccgggcagtctgggtgtgcccacccctctagacgtgagtggccagagccagtcagcctccaaagggccacagaggggacggacttggccctgctggtgagatctctgccaagactggccagcggcttccccatgctcaggtgggatctttggtttgaaatcctgtcctggacagaggcacgggctctgctgccaagagttgtctgtccgagacaggcccacagccctagggtctgcagaacctgcctcctccaggcagcgagacgcatctgcgggtgggtggatttgggctttgctggcactgtctctggagtgtcatttccaggaattggcatgcaccaaggagatggggtggaaccaccgtgccaagggctcaggtcctcactgcggtgcccctggagacagactggcccacggtggggatcttgctaattctgataacatcacctgtgcacaaggccagtctcctcgagccaggcaccatgctcagggctttgagttgagctaactcttgcacccaccaacaacgcacagggctgactccatcactgctccccttttacagccaaggaggctgaggctcggggagggaagtggttcgcccagagttctgctcatagtaagtgggggcagccacctctgcatctgtattcctaaccactgagctgccctgcccagacagcttcaggggagggggtctgtcaggaggggcaaggtgaaggctgcatgaccccagccaggagtggagggcacgcaggggctgggcgggaaaagcagccccaagagccctccgggtctcccctcctgcaccgaggagggggcaagtgagccctgcctgggcacccaggccatggctgcaggaggggctctatgggacacatgttggtccggcccactgggcagcgtcccctcccccacgaggccccgcctccccgggcacagctcagtgctggccccctgaagtccatgcagggcggccgcattcccaccccctgtcgggagtgctgagcaaggggcccctcaggtttttccgctttaagaatcgggtcccactgccctgctggccatagctgcggttttcccacgctcctggagggccgaggggcagggcggagcctaaggtagactgtcaggctctgcaggtagccggacagtcctgccgggctggtctggggtctgggttccaggccccgcccgcccccacctgcggttgtttctgattctcactccagccacgggctcccccagctgctggctccgggctaagagaaggctcagcccggactcgctgggcttgatgggagggggctctgtgggctgttgggctgaggggcagaggacctggcacctcctccggggcctcccacctccatctggcaggcaatgccgaccccagtgctaacaccccgttttctccatttggaaattactcctccacgcaccttactgcacgatggagataaggatgggaagaccgtgccagggctgtggccagcacggtgcttagctcgcagcaggaggcccatgcgttgtcttaattgtggtggtggtgtgctggcctgggcctcccaaatgagtggttccgtggcagctgcacctgcctgtggggcaagggggaccaggcctatccttccaccccacttggaggtctgaagccaggtcagaaagccccaaggcatcctcacctgcacacctccagcagcaggagcctcaccactgcttctctcccacactcaggcttgttgcctaagtccactctctcccctctaaggacactgacctcctgccctggggtttatgatgctggtggtttctggagagtgtctccctggagtcctggcaggcagcttgtgggagctctgcctcccttcctcccatggtctgaggatgctgatggggtcttcaccatgcttggaatgcactgcatgtggtctgagctgatcctcatggaaggacaggagcaaccccctctctggctggcttcccccatctagggtatctgccacccccaccccctgccaggtgtgtggcatcaggttcaagggacttcatggttttgtctcaactgccttgtcctgcaggacggggtggccttgccctgtgggatgggctggtctgctcagaccaggcatcccgggctggtcagctgcaccagcgggaggggaaagctgtgcctggtgcccagcagaggagcagtgacacctcctcgctccctccctgctgggctctgtggatgctggggcggggggagggtgggggggcgcgaactggggaggaaaatgctgtcgcctgcacccagggctcctcctccgaagccctgtggatccagggggtgggacaaacattgataatgagatttttggcacctcagctctctggggccagaaccccctccaccagggcttctttccttgcccagggaggggcaggcaagtggtcggctcacagtgcagaacggggccgccgggcagcccgcttgctcccagctctggggtcccaccatgcgggtgctgcccagccctgctgcctgtgcttgcgtccggcctctgcaccgtgactcctggggctcccggcacgccagccggctggtaactgatagataattcatatttttctcaagtacaagtccacattggctgccgccctcctttctccccgatcaggaaaaacaccctcaccagcccccaagtgaccacagatcagacctcagatctccttgggcactgagaggtctggaggctgcggttcacaggtctgtgcatatgtgtgcatacacacgcatgtgcacacacacagacacagcaccctcccacatgcatgcacacacgtggatacacaagtaccttatgcacacgcagacacatgtaaacacacaggcatgcgtgtacatgcacaggcctccccccatcactgcccagggttctagtagctcccaccccatggaaacccaggaggaggaggaggcgagtcgtgggtaaccgagcagccagaggaaggatttgtgtttagccacgagagtgtaaccagtgaccagtgacagggcaaggccggcatttggtgagagggaccctgcatggtgagaggggtggagctggcgtctgctggggtcccaatcccagagctgcccgtgagcaccttctgcttcgcccctctgccctggcatcctcacctgcaaagagaggtatggcctgccagccatggtggggacaaaggagctggctcttgggacttcttaggtcagggcagggtacctggggagcgctccacacacgtgagctctgagtgcagtgctgatggtgacaccagtgcccttctcccagttcaacaccctctgtgggacagtgtgggctcagagtgtgggcagagctctctgcagggcatgcatgacctggcctctgagccctgctggccactcctgtcctgggagccctgcaggttggcagtggtgtggacagctggttccaggaggccctcggggcagagaatgaacaggagttcctctagctgtcagaacagcccgacgcgatgggcatcggatgctgtgacaccccggctcagccgttctgcccccagctcagcctcatcagggaaggtggctgtccttggtgtttgggaagtttggggacggggctctgaggtcaggcaagaaggcagtgtggggttggaagccctggcccagcacagcatctgtgggcacctcagggcatgctgagtgacaccacccacagcccacgaggcaggctgccatggcaggatggtgaggacacacacaggtgcgatggccagctgccccagcattcctccagacagaaagatggcccggacacagccccctgagtgccctccagctgctctcagactcagcgtgtgtgtgtgcgcgagcgtgtgtatgtgtgtgtgtgtgtgtgtgtgcgcgagcatgtgcacacatgtttgtcttaggggagagctggctccacgggtaggaaagccccccgtccaggagggacatatggaaggacggccagggaagcacaaaggctctgcacgggattcctggggagaatgaggctgagtcaacactaatgggtctggagcaaccttcccagcgcctcggaggcttgcaagcaggagaataatagcggaggtgtcccaacacgatcatggtatcaattgcattatcctaaaagtttatggaatgcatgagtggaattaataccttttactggcaccagaagcaattatatgtgcgtaaagctgagggaagagttctaacaatgtttattgtggagatgaaacgtggattattaggggaaacaagagtacttagggcgaaattgcagcaattgctgatatcatgtggcgcagggatctgcagcagggacggagcttccagcaggcctgctctggctgtggtcagcgcctcggggctcgtggcccgagccggggttggctcttctctcttcactttctggagcagccagaggaactcactcttgggccctggaggtcacagaacttagccttggaggccccaagtgaggctggggaggccccagctctgagaccctgggtcctgctgccccaccccacactgcctggttcttggaggagacaggagggagaaccccttgggggacaggattcccttccataggcatgagactgttgggggagaggcatgatccaatttacgttttaggaagaatcatctattttctaggacttctttccagtttggggacagccctgtggacccagcatgtctgattagtagcgttggcagcagcattgcccctatgtgcagggcctcccacactccccattttacagatgaggaaactgaggctcccagagggcacaccagggtcacctgtcagcagagggcagagccggacctggccccagcagccagacccctaaccttgcccttgcagcccgtgtggtgccccaccccggcccctacaggtccctggacaggtccccacgagcagcccctgccccctgccccaccctctgctcccagctctgtggggcaggtccctgtgaccctcagggcccccaggggaaccagtgataaggaggtgctgacacctcagagggacctgcctgtccctaggggagaaagccttggaccgaatggggtgtggggggagcccaggctgtaccttggcccccatgagccttccactgctgtctgccagtgaatcaaactgggactgggggtggagagctgtccctgtctgctttcactgcttggttttgttgacaaaggaaaatccctcaagaacgctttatcactggagtgctccgaggctggcgagcctcatgggcgagaagccaggcagctgggcttggggaccggcctctcctggtgcctccctgccccctctgccttcacccctcccaggcctggcctcactgccactaactcccgttgacagggggaaagagaggcccacaggggagggccgtcccaggcttctcctggacccagtgctgacgccaagatgcggtcgtaggtgacctggaccttgggccgtgtgggactcggggcaaggtggggggctcagctgggcagtgagttagttttgcttcccggtctggtgggtttctgccaccccaggccagtggtcacttctgggattttctgagattccaaaagttgaagccacggaccctggagacccggaccctggaggcccagcccctgcctctgggtagagaaggccctgagcgacctccagaccttctgtcccttttccgaggagcctcaggaagagggggacagacaattccagggtgtcccggctggaaagaaaagcatcttctctgcactccaggcggacagcgtgaggctcagagattacgtggcggccgaggctggtgtccacagccaggggttacgatggggctgcagaggccgtgagcggaacagggcattttagggcagaaagacccttttggagaaggtaacagcactccaggcttcagtgaggcagaagtcagagcccatggggaaaccgcacagggggattacctaaagcccagagccaccccaagggttgcaaacccacccctcccccagccatgccactggagcgaggcacccagctccttgcacctggcgttggggagacaccactctctgcaggggtcagagattcggaggccaaaattctccttcccccaggcatttcaatgaagatttacaaagtttagcaaaaacctagattctagccaactattaccttaaaagctgaagagggaccaccccaccatgtccacagcttactcccctccctccgctgtctccggccacctccagctgctgccaattccagcccccaaggctgtcccaggaagctgtggccagagactccgggactgtcctgtgagcagagggcacccactgaccctggggcacccttccaatccccacagctgacaaagccgggcctcaaaaggctgggttaatcctggcttctcctcaaagccaccagtcagggtgggggtgaggatggtgggggcaaggatggtgggggcttcctccccaggagttaaggggccctctctgcagtgagcagagcaggcctgttgccagcctgctgggcccctcgtgggacagctccagggcctggcccacagtcccgctagctaggtccttgccagaggccggaggagaggccaggctactggcaacgggccctccagctggcgctgtcaaaaagcaagttgcgggcagaggaccctgcgcttggtcccggcccagggcagaggctgagtgtggtgctttgaacactctgtgtcttcagagcggaggggcagctgctggtgggcattccggggccctctgcaagccccagcttttgtctctgcggacccagggcactgccctgccaccccctctgtccccaaggccccagatggggtacctgggtcctggaataagagcagatggagttcctcgccctgcctgggcagctcattccttcccgggcttgggcagagtgacagtgatagtagcagccacagggcacccgcacgcggtctcagtgaatcaggacagcggcgaccgggtggggactgggccctgagctcctcacacagcatctcggcagcaaagtggaggctggagctgtccaggctgggccacccaatcccagccagacacaaggcagtctgtgtgagtctcagtctctattgtccatggagacccatccccagcaggaccagggcaggtgaggcccctggctgttgttccccttacccctaaggggcttaagtccagccacggggtaagaagcccatgtcccacctgacacctctgtagtaccgtctttctggaacccggggtgacgcctctgcagtgcccagtcttcctggaacccaggggtgacgcctctgcagtgccgtcttcctggaacccaggggtgcttaaggcgggtctctgcctagaccccgaccccaggccccaggacccaagtcaagcccagcagtgacaaagggctgggagatggagcttgggggtcagacagctatggtctgggtgctggtccaccccagcttagcaggcaggtttgggtcactaaacggagtgacagtgcctgacctcccagggccaaggtcaggtgagggccccgcgcagggcaggcaccagtgggcagtggatgtggccatgagggtggacccaggtgccccattccctggcaggtggacagcactcactgtctccccaggtctccacaccaacagaggcagacaccttgggcaaacgctgcctcgcagcctcccccaacactaggcccctcttatctcctctgcctgtggccctcgtctcctactggacccctgggccttcactatgcactggagacaaagccaccaagtctatcctgggctcagcacatacctgcttccctcccctaccccgatcatagcccaggatggagatccctagaggcagccgtgcatgggacgaggatcgagcaggctccagctcctgtggtctgggtgcactcagtgtctcccagggagccgcgcttccaggccgttgagagtcccccgtgtggctcctgctcacctgtttaggacatggctcaaggtcgtggtggggcagactgcccagctcctcagggttcccacttgcccctggcctgccctccccagtgagcagtttcttgtccacagcctctggggctctagcaggcctccgtcagggctgaggatcgcttggcatctgcagaggatgtttctgcctctggttcatcctccatagagctcctggcctgggagccccggctggccagcatgggggtgccagcagacacatctgtctcctgcagcccccccagccaggagctctttcacagcagcctcttttcttgggcagcgctgggcctggcactggctgtggcctcacaggcattctgaagctcgcttgggcctctcatctgcctggcccatgggctgtggatgtcctggtgagtgagccgtcactgcctcgaccatgggagccccagcttaacaccaaggtgttctgaaacaggggcgattgccacatgtgtcctttccccctccccaggctagtggcttccctggggcagggagggaccagccctgtgacatcctgccaggcctccctgacatctgtcagagcccagcctgtgctcccagcagctctctgagggcgacagtgactgtgcaccagtgaaggccacagcctcccacgaagggggctgtcaccaagggggccctgtggctgccacctgaggatacccttcctctctcagaaggagaaagggacccaggaggaccctaatccacaggctgttgaccctggctcaggcatgtgttttagggggtccatctgtgaacccacgaatttaatggaaagggttctgtggctcagccccaggagcttttctagggagaggaagggtccagggccttggcagagggtgggctcaaagaggcccgtaaccccagagaggagagagatgcacccctaaacacacagacgcacacacaagcaagggaactggataaaagtgagcaataaaaaaaatcgtttaaaaaataaaagcccccactgcaggccccatcttccagaatctgttgcaacagattcacccacgctggttaacggtatttgcggtttgcaagatgctacacgtcccaggaaaatgacagacaagttattatcacctctccgctgtcctcctgcccaaacctgcccgtgccgggcacccagctgccggggagcgaggagcgggcacaaggaaattagcagccccccgctgcaccctcccctcacccacccccgcaccagccctgccaggcccagggctcccagccaggccgggcccatgttgtactggggcgggggaggaggggaaggagaggagggtcggagaggagccggcagcgtggggagggatgggcacagtggcgtttgggcaaaccctttcctgcaagcaggacggtgcacgcaccctgggcaggcaagtccaggcggctccgtgtcaacagccgaagataaatacgattttatcagctcggaatctgttgaaacacatccatctagcggttctagggaaggagaaggcaggaggggggcggcggaggggaagtgtctccacgtgacctttcctatagaataggctccaccggagtcctcctcctcctgcccgttttccacagggccaagcccaggcctgaagcctagaggcctgctggggagacaggaggaaggagctgggggagcgctggagccgtcctgggctcagccaccctctagaaggacctggatctctcagggctcccttccctcctgtggccacctgtgtcacccacccccagatgctgccagggcaggggacatcacagacatcctccccgaggccacccagctccggcccggctgggcacctggggtccagttagtgccagggtgaggtctgccaggcatgtatgccccaaaggccatgtgagcactgcactggggacacctgtggggaggagagccaggcccaggaccttggtggccttactggccagaggggaggagaagtgctcacatcgcctgaggacaggggcctccttgctctccaccctgaggcctgggcctccctccgccactggcccaggtcgaagacctgtccgttctaggccgctccacactccagtccgagcccccacttcccggggtgggtggtccggccgccgcctgcaccgagtaccagggacagctcccggcgcgcccaagctcctccccggggcggggcggggcggggcatccacagtgctccccgcgcctgggcccccaggacctcttgcagacgggagtccctcagacagtgcagagacgggagcacgcactgggccctgcacccacttcgtagcgccctggcctgggacgccccaccacgcagcttccagagcaaggatcgccacttcaccctgcccggagacccagagggagtggggcgggctcagcagggcgctgctgagaggccgctgcctaggtctgcgaaatgggagcactgctgaccctgaggcccaggcgggcgggagctcaggctccgcagaggactatggccgggggtgctggggcaggggcctaggggaggggctgcaggggccaggcaggagctgtgaaacccctcacgctgttgagactccatggggctgtcagggagcgacggctgccggggcctctgcccgcaggcttggttgcacccagagccttactccatctgtgtccaactggctgaggagcccaggcggcctcccctccccctgagtgtctggggctccttggtggatctaatgacccccatctcaggccatgggctgtggcactagggtggaagaagcctcgggggactcagccccggaaagggaactgtagggaagcggggcctgtgtggctccagccccccgcaaccaacacctcctcacctggtgctgagaataacgagggcgcagtagccactaacacctgcaggccactgtgttcccaggggacacgcagtgagtcagagatgcaggtggagaggcttgtgcagtggctagaggcatcccagctgacgagcacaaagccaaaactgccacccacagggccggacctcagaggcccttctccttttgccgcccctgagactctgacctgagccaccccggccggggtctgtttcaaggggggtctgccgcgccctccctgctctgtggtttccctagggagcggctaggatggatggcatttgttgagtaccacctgtgtacctccatctgctacacgttactgaggagagacgagggggacagagccaggtgcctgaattccagggggcctgtgtgctctgcacacaagaggtgctccataaatgctcagcaatgggcagctcgccctgcaggctgccctggcctcggagaagcctggcgacacggctgccggccctgtgttcctctcccctgctcggggcactggcagacaagagcctgccaccacctggcccctcctccttctgtccccaaccagcacagatggagaccaggcgtggtgtgtagcttcaggcagggcctttgtccaagagaccagtgcctggacacaggccactgcaagtttgggccaagagccctccctgtctgagtctcctgagggtccgagtcccagagggtctgtgctgcgagctgttcccatgtgccctgggggcagggctacctgcttatccttccaagtgatgctgtggggagcaaagggggcatttgtaatggtggggacactgtacatcagtggtcacctccagggaagccagactgaccccacaacaaggagactgctgtacttcccgctgtgcccaagcctgcagctccgacagtccagggcaggcgcccgcacaggggtgggctgctagctctgcaaggctgtttctgcttttctttttttctctttgtgtgtgtgtgtgtgtgtgtgtgtgtgtgtgtgtgtgtgtgtgtgacggattctcactttgtcacccaggctggagtgcaatggtgcgatctcggctcactgcaacctccacctcccgagttcaagcgattctcctgcctcctgcctcagcttcctgagtagctgggactacaggcgcccgccaccttgcctggctaatatttgtatttttggtagagacagggtttcaccatattggccaggctggtcgaactcctgacctcagctgcctgccttggcctcccaaagtgctgggattacaggcgtgagccaccgccctcagcccgtttcctgcttttctaaacagcgcccagcctcccctgcagggctgtgcatgatggttccttcctgtgttttaaacaggactggggatgggcggcttcctgcctaaggccctgtgcccaaggtgggggtcgcaggcaggggcagtggagccactctggctccaggggctccaggtggacggaggacctaggaggggccagctctttggtatccaattcccatcctgaggaggccactgaaggacccccttccacttgtccctccagccccctcacacccatggcagggacagaccagcgttcctggctgggtctcattcggggagcccaagtagctcaccagagaggggaccgctcccactgcacaggaacaagggcactcagggtgccggggacccaggccccacccaccatggctcgcagcctccgtcagctccatctcccctgtctctttcctttttccttcctggcttttcgtgtgcctgcacctgccaaggacctatgtggctcctgagagcccctcatgtcccttgatggccagagaggcagtactggtggccagtgggggtcagggggtcagggccccctaacttccttggcaaagggaagactccacctgcagcttccctggttctgccagtagctccctgtctctgacctcagtttccccaactgttccacggtggagtgcgatgggacattctccagggcacttgcggctgcagtgacttgtgattctgagtcatcgggggctggtgaggggcacagagggcatggggtggcagcagaagtcattctctgagcctgagactggggatcattcctgatggccctttggggagagagcatgaggactcccagcaggtgaccaggagccagacgcttgggaaatcagccagcttggaagtgagtggacgcccctgcagcggcctcagcggggtcacttttagaactcatgagagccggcctgggtcctcagatgggcagccgggccctgtgaggcaaagaagctggaggcctctgcaggggctggctcaggaagggtgtcatccagtcctcctgcagcagggcccacgccagctccagacagacctattagctcctcgagtcccaagctggggatactggggctgtgagcccagaggggcccccagagtggccaagaccaagccacacagctcggctgctcagacttggtggccccagcaggagagggtgtcagagtcaccagggctgctgaggccatgagaggccttcacaccaacccagagagctctctatggaagcttgaatgcatagtgggcaaccagcccatcacacattaaccacttgctctgtgcaaatgccagagaagcctagctctggtcttaaaaacagattcaatgctgcaaacccacctcttcaaaatgccgcagtcagggacatggcttccacaggcctggctcccagcccccgttcccgccctcactctccagcagccccttcttgctctcctggcctttcttgtccccatccataaacctaaagcctctctgcctgactgccaccggcactcacacccctgctgtcatggagcccaaatgacccgatggctgtggagtgggtgccagggcagctgtgcctggattcacgcctcaaaggacagacacctggagggattcagcagaggggctgcttggggcagtcttcatctgggggttgtggaaggggcacccatggggaggacgtggctcccaatggggggtggcctggacaggggtgcagttgggaccactggtctcacccgctccctctcccccactccagtactccccgctcttgaagaaactctactgccagatcgccaagacatgccccatccagatcaaggtgtccaccccgccacccccaggcaccgccatccgggccatgcctgtttacaagaaagcggagcacgtgaccgacgtcgtgaaacgctgccccaaccacgagctcgggagggacttcaacgaaggtgagggcccccagctcctctgcccacggtggcactttgcccagcatcccggacagcacagccgggggctgcctaactgggagagagtggggctgacagcatgggcttagccattcccctgcggagggctttcagtgcctccaccagcccccattttcccagttctgagtgggacctgggggggcccatgctcctgggcaggggcaagtggtctgggcagagtctgaggggcagcggccttctggggccccagagatcctatgagtcatagcccctctctccagtgtgcctggcagggcctacgggctaccccaaggattagcaggagaatcagggggcagagccactgggcaggcacccccagagcacaagggctgccagctggcctgagcctcacctggaagcccacaggactgggcctggtggtctcagttctgctgcgatgcacctggcacagctgggcgcctctctgcacctggcacaggggtgggcacctctctgcacctggcacagggctgggcacctctcttcacctggcatggggctgggcacctttcttcacctggcatgggactgggcacctctctgcatgtgacacagaggtgggcacctggcatggggccgggcacctctctgcacctggcatggggctgggcacctctttgcacctggcacagggtgggcacctctgcacctagcacaggagtgggcacctctctgcacctggcatggggctggacacctctctgtgcctggcacagggctgggcacctctgcatctggcatggggctgggcatctctgcacctgacaccggggtgggcacctctctgcacctggcatgcagctgggcacctctctgcacctggcactgggctgggcacctctgcacctaacaggggtgggcacctttgcaggtggcacagagctgggcacctctctgtgcctggcacggggccagcacctctctgcacctgacatggggctgggcacttctttgaacctggcacggggctgggtacctctctgcacctgacatggggctgggcaccctttgaacccggcacagggctgggcacctctctgcacctagcacaggggtgggcacctctatgcacctctctgaagtgtcgacccctcccggcaggacagtctgctccagccagccacctcatccgcgtggaaggcaataatctctcgcagtatgtggatgaccctgtcaccggcaggcagagcgtcgtggtgccctatgagccaccacaggtaggccaggagccaggctgtgcccagggccctgcagtcagctgtacgggtcgggggaggggtcccctgaggcagcccctgtccctcctcagttggctgatctgcctgcctgtcctgtcggcatctgtccagggctccctgctctgtgataagtctgtgtcggcggctccttcctcacccacacccgccccactgtgcacactgctgctctgtccccacatccgcctcgggcactctcggggcctcagtgtgcccagctccatagtggggagtgggtcttcagccttgccctctgttggtgcccaacactggttccggcctggggctcccagacacagggatttgggagatggggaggtccccgcccatttagaccctggattggctggggcagaaccaaaccagcaacagcgcctgaaggggtggcaaattctacaaagggggttgagggatggtggaaagactcctaggccaggccaggggcccaggagaggtggcctgcaggaggctgaggctggtcagcagggtggagagccgggaggccccgctgggcaccacgtgggtggggggtgcaggggactggggggcatataggctggaggggaggggacacggagaggctgggggctttgacttttggcccaaaggcagcataagtttctgggacacaattctggagctgatgtggggcccaactggtgtgaaaggctggggtagggggaaacagagggtttgaagttactgcgggatggtggggcaggggcagaacaggaggtgaggagtgggtaccaggcccccaggggaaggcaggcaatggcaggcctctgccttccctgtacctggttctgagaccaggctccatgctgtacccagccccagcctcccccaccaggtccccatccctgtaccagacccccaggacaccccagactcctgtacccagtctccaggtcctccacaagcctctaccctgtacccaggcccccttcgacgtccccatcccaccatcctctaagagcagccccttatgtcagcagaaccagggcccgggagggctccctgaaacccatgtcccaccctcacctgcctaggcctgccaggaaggcagagctctatcgccccctggtggctgccgtgtgacagcagttctgagaaaggccaagattttcccaaacccctaatagcttttgtatttgtccccagggtgacatgaaaactgcccacattgtggtctggggacactcattgatcaacggttttggttcatggctgggcgcagtggctcacgcctgtaatccaagcactttgggaggccaaggcgggtggatcacttgaggttaggagttcaagaccagcctggcccacagggcgaaaccctgtctgtactaaaaacacaaaagttagccgagcctcgtggcgcatgcctgtaattccagctacttgggaggctgaggcaagagaatcgcttgaacccgggaggcagaagttgcagtgagccaagatcgcgccattgcactccagcctgggggacagagagagactccgtctcaaaaaaaaaaaaaagagttttggttcatgtctcagctgtactgcaaaatccctgggaaacaggagtgtgctgggggtgggttcgctggggacagctctggttcctctttctgcccaggtgagcccgcagcatgcaacacacacgtagggccacaaaatctgtgcaggcacactcacacccagcatctgggcttgacctccagcctgtgtcaggggagaaggttggggcaaacagaccacaggactctgtgcttctctgagagcagagaccaggtctgagccctcccagaacccagaaccagcccagtgcttggggttcagtgatcttcatgaatgggtggctggatggggtgagtgggtggatgggtggatggatgggggtgggtggggtggatgaatggatggatgggtaggtaggtgggtggatggatggatggataaatggggtgggtgggtgagtggatgaatggatggagtggtgaatgggtgaatggatgggtgggtggacggatggatgaatagggtgggcggatggatggggtgggtgggtgaatggatggatgggtgggtgggtgaatggatggttgggtagagggatgttgaatggatgggtgggtagagggatgggtagatggggtgggtggatggatggatggatagactgatattgttgaatggatgagtgggtggatggatgtttagatggatggatagataataaatgggggagtggatggatggatggggtgggggggtggatggatggatggataggatgatggatggatggatggggtgggtgtggggggtggatatgtgggtgggtgagtggatggatggagtgggtgggtgggtggatggatggatggattgactgatattgaatggatgggtgggtgaatggatggttggatggatggacagataatggggggagtggatggatggatggggtggatgggtggatggatggatgggatgggtggatggatggggtgggtgtgggggtggatgtgtgggtggatggatggagtgggtgggtgggtgggtggatggatggatttattgatattgaatgggtgggtgggtggatggatggatggatttattgatattgaatggatgggtgggtggatggatggttggatggatggatagataataaatggggggagtggatggatggatgaatggggtgggtgggtggatggatggatggataggatggatggatgaggtgggtgtggggggtggatgtgtgggtgggtgggtggatggatggatggatggagtgggtggatgggtggatggatgaatggatgggttgatattgaatggatgggtgggtggatagatgggtagataataaatgggggagtggatggatggatggatggatggggtgggtgttgggggtggacgtgtgggtgggtggatgggtggatggatggattgatattgaatggatgggtgggtggatggatggggttggtggatgaatggatggatggatattgaatggatgggtaggtggatggatgggtagataataagtgggggagtggatggatggatggatggggtggatggatgcatggatagacgggtgggtggatggatggggtggatggatggatggattgattgatattgaatggatgggtgggtggatggatggttggatggggtgggtggatggatggggttcgtggatggatggggttggtggatggatgcatggatggatattgaatggatgggtaggtggatggatgggtagataataaatgggggagtggatggatggatggatagatgggtgggtggatggatggggttggtggatggatggatggatggatggatgaatagataaatgggttcgatggatggatggatggacggatggatggatggatggggtgggttggtggatggatgaatgagtggacagatatacaaatggcaacaactatagagcagggcatccccctgcctacgtggagccaggaccagacatggagctgggggctgccaccttagtggattggggctgcgtgctgatgctagcccctctccctgctcccccatgtgcaggtggggacggaattcaccaccatcctgtacaacttcatgtgtaacagcagctgtgtagggggcatgaaccggcggcccatcctcatcatcatcaccctggagatgcgggagtgagtcccgggcacacggggtggaggtgggacagggctgggcaggcacggccgggggagaaggggagctgtcatggagacctgcaggccaaggctagcttggggaagagactttggggtgtgctgctggaggaaggaaccgccccctggcctgcagggcctgcctgggcacaagctgggcctccggagggaggtgggagtccccggcgaggtctcagggcagcctcacagctttgagcctctgactccctctagcgggaacactcgctgccggcactgggtgctctgtggtgaccgagggctctcaaggccggtcctgcagggtccgaggtgggtggggaaggtgggcaggttgagggtgggcagggttgagctcacaattctggctgtgcccacccgacagtgggcaggtgctgggccgccggtcctttgagggccgcatctgcgcctgtcctggccgcgaccgaaaagctgatgaggaccactaccgggagcagcaggccctgaacgagagctccgccaagaacggggccgccagcaagcgtggtgagcggccggccaggggaactggacgcgtgtgggaggagaaggggacacattggcaggacacaatgtgagcccgcgtcccagggacagggccagtccctgaacggccccccacgcccagactcctccctgacggagcctgagagcagcccccatataagtcgcttgtcctgggccaagggcacctcagaggcctgggtggcaccgcaggtttgcccgtccctgtgggttgctcaccaccggacccacctggagaatcgattggccccaagggtggggcaggtctccctcctcccggaaggaggcctcaccctctggtcctgcctgctcaccccgcctgccctgcctggccttccagccttcaagcagagcccccctgccgtccccgcccttggtgccggtgtgaagaagcggcggcatggagacgaggacacgtactaccttcaggtgagtgtgtgctcctgcacggcagccgggagacctgcctcacctctgtcgtctgctgagcccaggctgggccatggggagggactctggagaccatggtggagggggcgggaggagcccagccctgtgtgagagggtccagagggcagaacctgcttgcaagagccagaccagcaggacccaactgcagggcattcctgagagtcccctcagtcccaaaaacccagcgtcatgccatttacaatgaagccatgtgtacatagcacaggtagggtggtgcggagtgccaccagggtagaagttcagcaagaatccaggaccctaacgttggccaggacccgtggccacggccagcccccatgagtgtgcctctcacatgtggcctccaacaggtgaattaaatcggcacaggcttggctgggagtcatcttccatgatgtgaactttctgttttttgagctccagaatgagccccagttggggtcagtggctcatgcctgtaatcccggcattttgggaggctgaggcgggtggatcacttgagcccaggagtttgagaccaaagtgggcaacatggtgagaacccatctctacaaaaattagctgggcgtggtggtggcgtgcagctgcagtcccagctactcagaagactgaggcaggaggatcacctgagggcaggaggatcgcctgagcccaggagtccaaggctgcagcgagctatgatgatgccactgcactctagcctaggcgacagagcaagacgctgtcgaaagaaagagagagagagagacagagagacagagagagacagacttggtttctaaaaacccagtatctgttggtaggggaggaagagggaggcttgggggccacaaggagcaggcatggttcttggggacaggatacctgcccactgagtcaggggctctggttagacctgcttcttgggaagaggaaagaagatcaggggatcctgagcctctggggtgctggggaacccccagaaaggacagatgctttgccaagcccaggtcctcctgaggctgcggccacccccctcccgtgggggtctggggcacgtgggcagagatctgctcctctgtgctcaggtgcgaggccgggagaactttgagatcctgatgaagctgaaagagagcctggagctgatggagttggtgccgcagccactggtggactcctatcggcagcagcagcagctcctacagaggccgtgagtcagccctagcccaccatcagtgtggggaaggaggacatggcttaaccccccaggagaaggccaggaggaccagaaacccctccagaaggcatcatctgccagggacaggcagcagggtccagagcagagcccaccccacatctcctcctccaggaagccttctagcacttggggctgccctgggaccctgggtcatggcccttgctatgcctctgccactgaggggccttgtaaatgtctgctgagtggaaaggccaggaggggtggccagagtgaccatgacccaccaagaccagagtccgattccagtggcacaggtcatccccctgcctcccggccccgccatggccagtgtccttctcaggcgcaggcccagtggccgtgcatggccatggttggggacagggaggctgggggaggatgaagccactctctgacatcagaggctccacccattcgcagcatgggggcatcacgggcatgggtggtcggtgggcacgaggctgccttgcttcccacccatgcgagccgttgcttctgagcaggagtcacctacagcccccgtcctacgggccggtcctctcgcccatgaacaaggtgcacgggggcatgaacaagctgccctccgtcaaccagctggtgggccagcctcccccgcacagttcggcagctacacccaacctggggcccgtgggtgagtcccttgggcagtgcgggcccacgggcagggcggggaggcccactgggggcgcctagctcaggacacaccacccagctcgggacccagggcaggtgtctctgtggctggctccttccagcggttccaccctctgggcaggaggcgcagccacggatagccctctctgcccactcctggctgtgggaggtggaggggggcgtggttaagagcgtggaacccacatgcatgcactgcctcttggcaggcgagggagcttggggaaggctcttaacattacacagcctgtttccccatcagcaaatggccacagaagtaccaggctcactccttgtgaggaataaatggtgcaagacctcatcaggggccccagcacaagccgggggctccattggatagagtttgggcccccttcccctggaaggtcctcatgtgggcaggaccaagcatgttcccagtgccgtgagcaagcacccccaggtgtttcctgaggccctgggatgtggccagcactccagtgccagctgcgattgcccttacaacccagtgccccgtacgcacggtcacccccgtccctactaggcggggcgaggagacagggccccaggtgttcagcccttgctcaagcctctagctggcaggggtgatgcccagcgtcacatcgccaggccttgggatggctccctggtgtccagaggtgtctggagcctgggtggaggctgcacctggatgcccagcctggctgccctgatggccccacctgcctctcacccaggccccgggatgctcaacaaccatggccacgcagtgccagccaacggcgagatgagcagcagccacagcgcccagtccatggtctcggggtcccactgcactccgccacccccctaccacgccgaccccagcctcgtcaggtgcgtgggctgccgagggcctgagcatgtgctgtcaccctgtctgttcacctctgtccttctggccatgtcagctgccctgccccaccctgtgtgctcaccactcgcaaccctggatcagacaggcgggcgggggcagtcaggccaggagcatctgcagatgctggggaaatggtccacttagaggaaaagcacaaaaagccggggtcctccactgacctgtccccagctgagcacgtcccctccctgagggatgccgtggccacctgtgggctggagccacccttcggagacagcggcagtctccgccccagccaggccactctcagagatgggggctcgcgcagccctgtgctcggaagctaatgctgcttcctttctcaaattctctctgcagttttttaacaggattggggtgtccaaactgcatcgagtatttcacctcccaagggttacagagcatttaccacctgcagaacctgaccattgaggtaacgcccgggtggaccccgctctgcagaggcagtagctggaggggcccctgtccggagggcaaagagccttctcttccttgctctcgtggctgggaaacttggaaaccctttcccacgggcaagcagatgcgatgatttgactcttgagagcttaggcagatgcagccaggcacgtggctggtggcgcgggacacaggcccaggcctccggatgctgaactggtcatttgagcctttttggactcccagcagccagtgtgcctttgattttaggggatgggctgtttccaaggcacaaagaacagaagaatgtaaggccccgagggagtcagtccagttcagtgccatttacagagaggtcagcgccatttacacagacaggaaaggggacctagggaaggcaagcacctggcccgaggccacacagctcttggcacccatggcagctgactgcaggcaccatgattaaacagccacggcttgtctttgggttagagactagtggagtacaaagcctgctggtagcctaggacggtgtgaaccacagggcaccgtcagtcaaggaagagcaagccctctggtgggaacctgccccccagccagtgccgcggcccaggtccaaggcccgtcccagaccatccccagcctggggctgcagacagagatgagggtcagtgcgagctagggccagctgctcagcctaactgtccctcgtgcagagagtggccgcgtctgtgtccactaaccgccctccccgcaacctgtccccagtgacccacgctgagccagctccaggtcacgttaacccttgcctcccctgagtgatgtgtgtgcttggtgtggtgcccagagggtgttgggagctcagggatgagctgggggtccactccagggggcagggacatggagaccaaggagggccctgccctgaggctgggaggcagttcctcccccagggccaggtagatgctcagggggctccatgtctaacactcccaggtcagggcccaggccccgcacaggccaggagtgactctggtgggctctccccctcccccgtctcctgcctactctggttgggggtgtaggggccagggtgtggtgtggccagacctccaggcccagggcgaccccccctgctctccctgctccactgccccctgcccctaatgcgccggcctctcgcaggacctgggggccctgaagatccccgagcagtaccgcatgaccatctggcggggcctgcaggacctgaagcagggccacgactacagcaccgcgcagcagctgctccgctctagcaacgcggccaccatctccatcggcggctcaggggaactgcagcgccagcgggtcatggaggccgtgcacttccgcgtgcgccacaccatcaccatccccaaccgcggcggcccaggcggcggccctgacgagtgggcggacttcggcttcgacctgcccgactgcaaggcccgcaagcagcccatcaaggaggagttcacggaggccgagatccactgagggcctcgcctggctgcagcctgcgccaccgcccagagacccaagctgcctcccctctccttcctgtgtgtccaaaactgcctcaggaggcaggaccttcgggctgtgcccggggaaaggcaaggtccggcccatccccaggcacctcacaggccccaggaaaggcccagccaccgaagccgcctgtggacagcctgagtcacctgcagaaccttctggagctgccctagtgctgggcttgtggggcgggggctggcccactctcagccctgccactgccccggcgtgctccatggcaggcgtgggtggggaccgcagcgtcggctccgacttccaggcttcatcctagagactgtcatctcccaaccaggcgaggtccttccaaaggaaaggatcctctttgctgatggactgccaaaaagtattttgcgacatcttttggttctggatagtagtgagcagccaagtgactgtgtctgaaacaccagtgtattttcagggaatgtccctaactgcgtcttgcccgcgccgggggctggggactctctctgctggacttgggactggcctctgcccccagcacgctgtattctgcaggaccgcctccttcctgcccctaacaacaaccacagtgttgctgaaattggagaaaactggggagggcgcaaccccccccaggcgcggggaagcatgtggtaccgcctcagccagtgcccctcagcctggccacagtcgcctctcctcggggacccctcagcagaaagggacagcctgtccttagaggactggaaattgtcaatatttgataaaatgatacccttttctacatggtgggtcagcttttttttttttttttttaactttctttctcagcattctctttggagttcaacctagcgcccatgagccaggctgaggaagctgagtgagaagccaggtgggcgggacttgttcccaggaaggccgggtggggaggaagcctagagggaaccccaggaagggcaaatccaggcaaatctgcaggaatgctctgccatgggagcagctcctcccttgccacggccaccttctctagcactgcaaggtccacagggcattgctttcctttctaggcggtggcagtcagggaacagactgaggtaggtgtaggggggtctaggccttcgtggagcaccccagggagttagtaggccccggggagacagagtctgcacaggccctttctggggccacctccatccacgaggagcagcctgagccttggtggccgaaccttgaccgtcccggagcacagcttcagggcagggaaccggagcccctggggggcctcacgggtgtgacgaggcccttcattgcaggcaggtgggccaatgggagccctcacccacgcaagccgagacaccacccagagtgcaggctgcctggccccttctggcacggccagctccacaccccctgcctagggtatgtgtggtcctaagggctaggagcttcccctactaacatctcccagaaaaagcagttaagcccctcagggcacagcaaggttagacacagcccccatccccagatcaggactccatcttgctaagtggcatcaccgtcaccagcctccccttatttaaaagcagcgactggtgttgccgcaggtacctggtctacgaagacgcaggcatccctctcccaccgtccacctccccgggggccgctgacagcacagtcgcctgggtgcacgcttgtgggggcagcaggaacggggctgtcggctctcaggggatctggctgcagccagggcgagggcctggcccttccttccagctccttccggctccttccagctgaagggcaggaagctctggccgcttagcttctagggttccatctccctagaaaggtgcccacgcccagggcatcagtcagtagcggcagcagcagcagactcggggctttcccagggtggcgcagccaccccagctgcatgtcacctcagctctccatcttattgccattttgtagatgaggaagctgagaccagaaaggctaagacccatgccccaggcaccacacccatctcttgggggctgggcacctgctacccgaggccacctcctgaagcccccactcttcccccatgttccacttcaggagccgcgggggcccatcctgacacccggggttcctcagcccagcgcagatgtgcttcagttccagagggcttgttgatttgtttcttaggtacgttacctgtccaccctgagtccagtgaggctgtcccaagagcccctgtagtgtgctcctgggaagggctgggggggctgggggggctgggagaggcccaggggcagctgtcactggaaccccagccagatgtccaaggaagccggccagaacacggagcagccagatggccccagctgcacctgtctagggagcccatgcagcctccttgcactggagaagcagctgtgaaagtagacagagttgagacttcgccgtggtcaggagaaaatgcaaattcccaggaacaagaatcctttaagtgatatgtttttataaaactaaacaaatcaacaaataaatcttgaaggcggatggttttcccagcagtgcaggggttggagggaggctgctggcactcctggggccaagggggacaggcagtggtcctgagtctgctcagagaggcaaggcagaaggagctcgccaggcaggtcagctcacatctgtccaagtcgctctggtcagaaacagcgactctcccccattcccccagcgttcccaccaggcctgggctgctgggaagcccttgctgtacccaggagcccgacccgcagtatcctggcacagagccacttgtcactcagaacagtcagtgtctccaacgcacaaacatccactcctctgttaccagttaaagcactttaatgctttaaggtgaaaacgaaatcccatccgtgtttttcgtgtaagatcgtgcttctccgagcagtattaatggacgccctccaatgacataacaactgtttttggtaatgtaatcttgggaaaatgtgttatttttttagctgtgtttcagtggggatttttgtttttgtaacataataaagtgtatgttccaatgaccggttctcatgactcaacctaaatctccaaagggctcagacaaacagggcggctcctcacaggcaggaagcccgtggcctctgtggccggccctggcaccccacttgagtttctctgtgtcgtgagtctgatgggtccctggggtgtccctctgccctgtgcctcggaggacctgcgggccaagccgagtagcctcatgggactgaccgggcctctcaggcctcctgaagtacaggcccatgagccctcatccaagccctgtggggcccaggccttctggactttagctaggccaagcagggtctcagggcgtcacaaacaccgacacagaacgcactcccgtttctcagcaaaacctaagaaaacaaaaggcagcagagagcctcatgttggctcaagccaggctgagaccaacgggcttcatttcagttctcttggttctcaggtttcttggtttcagagttgtgaacagggactagggacttgtcacagcaaaaacaaggctctagaaatctgttcaaccttgaaggaggcctcagtctttttagaaattggcctaaaacaaagatagaaaggaccaaggcaagagggggagatgccgccaggaagctccgccgagttcccccacaggtgaggtgccatgccaagccctggccccatcttcctggctagcgctcacgccgtcacaccagagcccgcccacccctttccctaggctcctacctgtccccacgtccaccaaggagggctgggcggtggtgggcccaccccctcatagccgcaggactctggatcatgaaggtgttgaggcctcaaactagacaggaagtggagggattctggatgttccctcggcaagagggtgccacatagaacgtagaaacggggactctaaaacgccctttcaggaatgaacacagaaatgtgagtgctttcagcacaagggtgagtttgaatatctttgtttaaaaggttagttattttttttaagtatagcgtgagaaatacaggccattattttcaaatatataaaaacatctccagtaagttccacacagaattttggaaagctaagctggactcagagcaggtctgctgctccccaaggcactacccttcgaaggaaggtttccacccgcccccggctgcaaaatggaaaggagaaagcccgtttccaaaaggtctccacgcccctttgggtggaaaacagccactgttcattcccgcgttcacatccaaagaggaagcctagattcaggtgacaagaacagaatatgggcttttcataccacacacatatatttcctatttctcaggaatggtgctgtgtcattactatgcacaaaatcggattcttcaagaaaattgttttttaggccgagcatggtggctcacgcctgtaatcccagcactttgggaggccatggcaggtggatcacgaggtcagtagttcgagaccagcctggccaacatggtgaaatcccatctctactaaaaat

SEQ ID NO: 630 - DNA, 239362 bp, Homo sapiens
  source 1..239362: mol_type = genomic DNA
catcagtagacggagataaggaagagcagccacgtgagtgaaatgatttagtatttataaatgcctagaacattgtctcatgcatcataaatgctcaacaaatgttagcttccagttgcattcttgtcaccctatgtgcaggtgaggccactgtgtggagtccatattcctcttagtaggaaccaaaagaactcagtaaccatgggcaataaatcacctctggtagaggcttctggggctttagaatagagtcctcttcctctctaaacttctcagtgacctgtccctccttccccgcaattccagtgactaagtctctcccggtgaaacttgctgcaggaataccttgtgtggttcccagtcagctgacactggacggtatgttgtgctgtgatagaacagatatgacatgttgtatttgaagtcttcccttctttctttcctctttgtttactccatcattcttccacaagtccccactatatatagtgtctatatggcatacataaacgactgtgctgaggctgacttcacagagaggcaacccgtggccctggcacgaggaagccaaggggcagagtgggcactacagatcatctcagcacaaccttaagtgctccgaggaacagcgagctgtaggatcagaggggaggcatggcttggggagttggggaagtctctgtgcaacagataccactggagctgggttgtgcaggatgtgtaggagttcaacagagcaatgggtgaggcataaagaggaaagactggcagtgctgtggaaacagcaagtgcagaggtggcgggtggtgaagcgggggatggagttagaaaacactgaggctggcagtaactctggagtgtggaatgctgggggaagacttggcaaggcgcggctttcttgtaggaggcatgggcagggaccagatcttagagggccttgtgtaacctttgtcaacctcgaggagacactgaagaattttcaaagcaggggagatatgtggtcatttttgttggttgacagcgctctctggctgccgaaggaagagtggactggaggggcctggctaggtggcaggggctcaggtaaaaggtctggaccagggtggagcaatggggatgagggagtgtgtaggaagagctgatcgggaagaatcagtaggtcttggtgagtgagaaaggcaaaaaaaaagggagactgcaagcctgagccccagatttgagctgtgtttaaagtccccgagcagctccttctccacatcgttgggcagctcaatctggctggggagagggtatctggacctcatttggcatgaggcctctcaagccattgggttcctgctgaaaccatcctcccaaagtctgcccgattctgtgcatgaaaaccgggctcattccaactcctctgcttcactgcaggccttggccctcacagcaaaggcaattttcctgaacgttccctggcaggaagagaggagctgtcacacagaaacactaagccattgaattcataatatcttttattaatatattatgctacaaaaatatttttggcaaaataacattaatagcatctttctttgtcttctatttatactcttaaaggactcttcatgataattcacagaggtgaggggcagaggtgataagagaacaacatcatgaatacctttcaaatacatgaatctgaagcctgtgttgcacagtgaatcaactcggggacaagctctgtgaggctcaagaatggggcaggggctctggcttcctctgttctgggctagagcctcctttggctgaatcagcccctgcccaccccagccactggggacccaagatgtctgagagccctttgtccctggcagctcaccggaaacatcttagacttggatcccgttcaaagcccactttccccacagcaggactgggatgaagggggccttggaggcatgctactctgtcacctttcccacctccacatgctttcaatcccatggcagcctgtgggtcctgggaagaaagccaagcacctcatctccatggaggcccaagattgtccatgtcacccctgccctccagccctagaactgcccaggcaggaatcaaggtcttcatttgacagatgaggaagtgaaggctcagagagggacaggaacttgcccaaggtcatccagcaaagtgaaggagtatccagagtatctccggaaaggaagagcccagctcccacttggagaaagggtgaggatagccgatgctccctggaaagagccaagtagggggtcaatcagttctcgtgaaccctttcctcccctggggtcagggagtggggcagagcgggaaggagctctgggctgggctgcaggcctgggttccagttcactcctcctccacctttcagaagttcccccacccaaaggcagcagtcaagcccagctgggtcattgaagggggcgctgtgaggggtggtggtggttgtgggtggagtggggaggctggacttattcctgaaccttactggtttagacagccagcggggtgattttttttggctgctcagatgaatttctggaaaaataacaatgttcatagaacttgatcattgcagagccaggagggaccctcaatgtcatctacaccaggcccttggcaagatgtcaactctcctaccacttcttcagccagtgggcacactgcccctgctcaaacacctctcccgatgggaaacctgccacccttgggggctccgggccatccccagacagctttggcttggtggaaattatgccactggtggaactaaggtctgcctctctccttcttttctgccttcattcctttcttcctccccttccttcagcttccttcccttcctttctctctctacacatctgttgagcaccacctttgtgtcagatgagggtacaaaaacaaatttacatgacccctgccattaagctgctcacagtccgagaggagcagatacacactagatagtcacaacactgggcagtgggtattgtgatagatgctaagaaagcacaaaggaatgggagggggcttcctggaggaagtgctatctgtgttgatcctcaatggatgagcagttacaggggagagaagggagtttccaggggtagggagcagcatgtgtgaaacatcctgtctattctagagatgactgcacatcacgctggccaggcacagggtaagagacatgagagacgtggctggtcagcagggttgggtcacgaagggtctagcggacacttcagggtgaggctgaggactctggttcttatctcacagtcactgaaaaactatcaccagccccaattctgctgtctgccacacaggatgccatcaaagctgcaattccctggagaacttctcttgtccttcacagcattttcaatagactttccttttggtagaaggactttccctcctctttgggatccactgtgacaatggccctgggctggagattaggcaagtgggacaaggggcctgagcacctaggcttgtccaggtctagccgaggccaggaagttgtagataacacattatttagcatgaagaaaatatgcttagggtctttcaatgcaaggacaaatttgttcataaccagcacaaggttccatgcttcctagatcccagatctttgactctcaggactggaggcatcctcagcagccctttgcagctccctggcagcctgattcttctccctccactgtggatgacagggctctccctgtcttcatctggctgctggtgcatcagacccaccactggaggaagacctggggacatggccattccaacatgccccagagagcccttcatcacacagtcagctttcgtgagaggtagaggacccagggccacaataacatgctgcccgaccttaagcagatcactttacctgctgggtctcagacctttcatctttcctgcctgcctcacagtcaaacagaaaagtctaagaagtgcacacaaatttctcagagcaacaggagcattttatgaggctgggcacaaagaacgtttctggaagaaatgtcagttagtggtggatagatcgtgtcaaaggtgtgggttgctgcttatggaatggtggttctctggcccaggatgagagaattcaagtgccccagacatgcagattcctgcatatgtgcctcaagtcttttgggtcataagtcagcaagttgagttcatttcagaccctggccagctggtggtcctcagagatcagtgaactttggcaacagatgtctgaccacattggctcttgctctcctgtaggtacatgtctactccatcggttagtctagccatctttctttaaacacttgaattagggtaagggagagtttaggatcccctaatatgcccagaggagggatctgggaaagactaaggctgaatcttcctgaagttaggggccaggacgacgtaatctagcattgcactgcttgtcccatcttgataatgagttcctctgggccaaggagagtggttagattcagctctaatacagagcctggcattgcatgtgctcagtaattacaagctgcattaatttaccttcttggctcagtgcctggcacagatctgggcacacggtcaggtgcctggactgtttacccaaatgcttcatctttaattaacctcaagctccatctcaatacgtctcacgccatactctgccccaaacagagaggaatctggcctgtgtgcttctaattcctttacacttatctcatccaaatagtgcactgcacgatccgtttgatgtccaacttctgagcctgctttataagtcagctaagccccttcccgctcagaaataggaagtcacatttttgccaaggataaaccaactccagcctggattgaggtcaagttcagtttagagcatggtgcccacagggctggctgggccctctaaggcagagctccagtctcctgccaggtctcaagctcaaacacgtccatcagggctgagctgtaaagaattcagctgcctgccaagatgcccgtgggactcctgaccatcccatgagctgcccagaacttgccgtctcagaagggagatagctgccaagctgggcaagatggcactggggccaattagctgccatcaagcctgccagggaaacccacgaagctataaagttggggtgcactgggctgggagtcagcaggcccacccggctgtgcagccttggagaagtgtctcctctctgtgggccttattattcctcctactgttactattatccatcaagtgaagggtcctttctgctgtcaggttccaggactctgtaattactgaggcacctgccccatagggtttcaggcctcccaggtgggagttagcccacctgggtcctctgtctcctcaaccaccaccttgaggagccgaggggctaaagtctctcggagtccctgtcacctgcctccccacttggctgctgtgcctccccaggtgccccacagctgtgcccacctctcagcctttgatttggcaggaaagcttctcgtgggctccaagatctggcaagtcaggacatgcgacacatggcacatgcagttgccagagccctttggccagaggggtcaacataagcagccggccaaaaggtttcttggtggagtgaaagcttgtgctggccccagtttgggtgagatctgctcccttgcagagagaacgtggcagaacagggaacaggaggcaggaattgttttgcatcacactgatctggggccacatcctggctgggggatcttcagcaagtcccttcgcctctttggggggctcagtttcctcatctgtgaaatggggatagtcacatctcacagaactagcgcaagaatcagtgaagcaagtgtgcaaagtgcttgccacgctgcaggctttggaaaaatggcagctctcattactattaacatcatgtgaggcctaagcccctgtctctaaaactgccctcctgtgcccactccagtccctcggcccagctcaatccatttagccaggacttcaacagcctctcctttaacccaagctggattcatgacaccagaacagagaggtctggatttatgtcctcactctcccacttgccgtgtgaccttgggctacccacctggttctctctggatctcagtttattcatttgttctgtggggtggggactgctttcctcagcaccagtatcccacctcccaccccaccccagcgctttggttgaaaacacttaccaagagctctggagggccagatagacactcaggggtttcacaatagcagcattctctttcctaaattatcttcccaggccgcgggtgcatccagcagaggggaggatggccaacgttcacacctctggctcccaaatccagcttcacaaaggctaagcctgcctgcctgcccctcctgctgagggccccacagtcggagaagccaaacccagacccaggaggcttcggtgatccaagagcaagccagtccagagccacagtccacaggaggtcactgatgtcccgggttcccctcccgggccagcactagggctagggggttataacacaggccacataagaatagttttatcggtagaataaatacatttttcttttttaatatggacacgtattttacaaaagagccccatagcactatgggaaattaagatccttctacaaaaaagaagatgtaacttgggtacagtaaagctctagagtgtctagccaatcccatgtggactgccctcgacgtgttgggcaccccctggaggtggtggcaggagcagttgggtgtggccgaagacccctgtgtcatttctctggcttctccacttggggtggccgaggtcaggagggcccaaggctatgcagcaggaagcagacagcgatggtggtggcgatggcggggagaaggcccagggtgggtgccgagctgctggcgggccctggcgggtcctgctgttgtagctggtctgaaagctggaaggggggcttggcggtccccgagctgtgggtgggctgcaggggcagcgggggtggtgaggcggtggtgctggaaaggaggaagcacatggcagagtcaccatcggcagcctcgtcctgggcagaagccttggggctcagatctgattttttcaggtctattttgcctaatacaatggagaagggaacaaggagcttgagcaggcaaaccgggcagcccagagccacacaaccagcctggctgagctccagagtccacacggaccccctttgccgggctctgggggatgggccaggccctggcagccacaggttgtcacatctcagccactcagatgtcaccactcgagagaatgggtcccaggcagaaagaatagtgttttggggagatagatctggggtaccatggggtggtcagtcatcgacgtacacaggtgccctgcctgctggctgctctccccttgcagaccgccaaaacacgcagaaaacaagacaagcaaccccaccgcgttccctgccattatcataactaccgcttgttgagcatccatcatgagctcagcactttccaagcaatatttctgatcctcataacaagccttcaaaatgggtctcattgctccctttccatgaatgagaaaactgaggctcagagaggctgtgtggtggctggcggggaggctacctggtggtcaggtcccagaggaaagtgggagtgggacgccatgaagcaggagccctgggtctgccttactttgcacagttgcaggatatgtttagtgagaggtgcagtctttcacgaatttacaaaaacagaatctagttttggaaataacaggtgagattcttggctcaagaaagcccacgtgacagagagagatggaaggagagtcagggcaggagccaactggaagctgacctgagcccagcacacggtggccttgggaagctggaggcgggggcagggggtactcagggccaggttactggctcaggtccaggaaagagacataggaaatggacaggcagagagagacagaggctaacacagggactgaggagggagtgcacaactacagaggcctagcagagaggtcaggaggctgacaggagacctgtggacgagagggacaggctctgggatagagaaacaggctgggccctgaagtaatggccatgcctatcctcgaggaaccctgagcaggcaggaggcagacagagatgcagatgcagacagaggagcccacaagccccgtcacccagaggggagcaccggggggcagcaggtagatgaagggaaggccatgagggcctcccggaagcagggaggccacagtcagcctgaaaggcatagtgaatttagtttgagcatggggagggcactcctggacggtgaaaaaagaacgtacagagccctgcccctgcaccaggctctgtgtgaagcactggccactctttaacctttggacctcatgacaacactgggaggcagggatgactgctgtccccattgtacttaggaagaaactgaggcacaaagcggttaagtggctttcctccaagacacaaaacagggccaggatctgaactgggcacacagtaggtgctcaatagcagatgggtgggcaagaagcttgcccttccctttgggctggccagcctagagggtaggctgtagaaacagggcagggcaggcttcatggggtctgcagcatgcgtgccttcctgccacgcttcccactgcttgccccacctcgacaggctgccctgggtcactccgggctgcatttcctcgggctgggccgtgaggtcctaacagctggccataatcacagtggtgacagcctgtaatcaccaccaccagaactaagtccaggccaccgtcctggccagacgcctctcacatagccctggctcagcttcagctaggccaggtgggcaggggagggaacccggggccaccaagcatatcctgactccacatgggctcttggcttgggagcaggtgtccaaacggcctctggcactctgtcctggcttgacgtatgtcattaaagagaggggtcctcactcactgccccatccctctctccctttactttcttccggtgatgctctggccttcagcaccccctgcagttgcataaggttcctttcaacctggtgtgatgtgccatgatcttctgtctttagagagactccaaggaactatcaggaggggagggagcaaactcttgttccacccagaggatgcagggatggcgtttctgagtagagtgtgtgtgtgtggaagtggggggggagggccaggtggcttccaatgtcccttacacacccacagaatcaagcatgttgtgcctcccaccccatgccggcctgatctggcctgactgccctcccctttcatggttctctcaacacataccaccctctccatcacacctacagtcttgctgccattttcctactcaccttcgaaggccagactcaatgcccttcccctggagggcttctttgatctgccttccatccctcaatgccacttggggcagttaaggcttctcccaaaccttgtacatttctcattgacctctctgtgttgtaggtctccatttattatacgtagtttgcatgggtttctatatgtaacgtgctttgaacagtgcctggcacacaagaagtgctagaagaggttggctatttttagcatcattattaatatttttgtgtctgtgtctctcctaataataacaccttccacttatagagcacttacaatgtgctgacatacattgcttggtgctatacacgtgttatgttattattattcccctttctaaggtgtggaaactgagcttgaaggacttcagatttcttgcaagagacagtgtctccccagcctgagacaggccaaggagccgtccctgaatgaacagatgagcaaacccctgatggagagcccatgagcgaagcgtgggtgcttccggctgagatctctcaaacccgcagatggaggcttgccaggcggggacactgaggcctcatctggcctcagcccctggaggggattagtgcctgtgccgggcagggatcattacctcagcccctttcctccctttcttttctaatgaaaacaaaaacaaaaataaaaaaaaagaaacccacatacaaaacacaagaagtccataaaaacgtcctcctagctgctgccccatcctttcagcctgaggaactgttggtttggtgggctggcttcaggacagcaggctggtgtgccccttgaggtgcccggagctggggcccccaccatcagaaggcgagaccaagtaggagttatgaatactatgtctcacaaggtgcccaaaggcattttctttcacactttgaaaaccaaagatgaaaactcccgcttggagcctgagtgggctttttattgcttggcaggagtcccagagaaatggggcaggactggtgggtggggggtgtggaggacaagcccctccaaatgcccccagcccacctcctgggcctgattctgctcacaaagctcagtcccccagtccagatccccaccccttcctaggctcacaatgggggaaactgtctcatggcaaagtggcctcaaagccaaaccaaacactgcaagtgttcccaggctccacagatggctggcaccaagaggccgcatcggctctgagtcaacagggaccccaaagtggggaagaggccctctgcttgggcagaaggcagaagcctggctctagcctgtagtgcgttcctggcttgctgtgtgactttggcaagtgctatcctctagacctcggtttccccatcaacacaatgaacaggaacagacccgtggactttaaaatgtttactagcagcagaagccagagcgagatcttaggtggaagcccaaggcagaaagcaaggctgtgtgtgtctgagacactgtcagctgtctgaccatgaggcacctccaaggggctccctggagcaggggtgggtcttggcactagagggtctctgagagccatcccagtctaggatctgggcatcccaagccttcttgccggtacaaggggctggtgggctgtaccctgactgacctccttagagagcttttcagcctgaggagaccggatttggggcacacagggcctgggtcacaggtggccctctgcctggggatagagatctcactgtgatcacttagcagagaccctgttgtgatgccagtctgggcctcagcctctctgggccaagcaggtcggatgagagatccaaagcaactggtttgcctgcggctctgggtatctaggactttgtgatatctagggctcctcccgcctccacacctttgtccacatggtcttctgtgctgggaatgccttcacgctttgctcagcctcactgggccatgactgatcaattccatcttgggcacagggcagacaggcttgttttctaatagcttcatagcagaccatagctggaagggcctgtctgtccctcagatgggaaactgggcccagagaggaaacgggacttaccaagatcactcaggagagctgaggcagggtctctggactgtggctccagggctcttcagtggcaccacactggaagccatctgtccctggccatgacacgagacttttcctcttcctgtccctcactagcactaaatgcagtatgtgcccaatatgttcctgtcaaactgggggaagttcacagcacccaaccaatgcctcatttaagggtttggccaaaggccctttctgctagggtagggggctggtcatctcagaccagagactctgaaagtcacaggtgtcaataccagctgcaactgttaccgagtgttactggtggtctgatgccagcttaaagcttacgagcatcatctcacataatctctaagcctcaaagtaagtaaaaggggggactggatttgaaccccattctgcctgaatttgtctgtttttattcattggatgatcctgcttctcattctcatgggggcatcttctacctcgaatctgatggggtcatcttctgcctctaatctgatggggtcctgtcctcacctggagactctgcccatctcgaaccatcccagaaggaggactggctgtgctatggggaactggagctggagaatctgggggcaggagggagacactgcgtctcttcccctctttgagagctctagccatctgctcaaacttcaggggaagctgagacccagaggacaatgactctgtggcacatgtgtcctgcaccccctccccctgcatggtggaactcaccaaggctctgtatctgtcttgtcacccacctctgtgccctgctttgggccatgcctgacactgggaaggtagtctcttccctacacctggccagcatgacttgcccaaggacttccaatctagatggcccagacattctgctccctgtttatgaaactccccttcctctcccatgtcagctgtggacttggagaataagagctggcatgacctccaaagacccatcaaggccctaactgcacaaaaggagaaacagaaggagtagtacaggtcccacgctgcacagaaatgacctctaccctgttttagagcaccctggtcacagccctgcccttcccccaagcctggctctcagcggtgggggttccccaagaatattctgccactgcacagccatctgtggacacacgcttcgtctgccctttccatgggtccccataaatcatcctgccatgggctactgcttctctaaacttcctccagtgtgtgtttacatctccggtaatgaggggcaagggggaggccagcctgttccaggtggcatccgggacaggcactccaggcgcgtccctggctcactccctccttctcacactcgctcccagcccaacccggatctgatcctcacggcctcccagcctggagcatgagtgaggactcgcagtctgtgctactgtgtcaggacaggggcacccaccggcactgcgtggaggaagggaggcctcagctgggccagggagagggggaagggcaaccacatggtgctgggtgatgacagcgacccttagggtcaggcaggtctgcctgactctctgcctggccttaggcaagttacctaacctgctgagtctgtttcctctggtataaaataggcctaccttccacaattcttgacagaaaaagggacagaatggaggcaggtatctggcacagcaggggaagcttgacaaatatccactggcaccccactccaagcagagagaggagcaggacgaaggtgtggaggtgggacggggcacctcgggtggcactcagcctggtgaggacaggggcagcagacctcgaggaagcagtgtggtggctgaggcggaaagaaggtgaaggccctgcatctgggctgagcagcggcgtgggggcactgtaggaccccaggctgaggagcggccatatgggagggcactcggggccaggacgacaggtgcaagatgagctgggagaggtgatggggagtaggagatggctccaatggggtttcggaggagaaaaatgagaaatgggagtaaaagcttccccaaaaatggttttgttagaaggactatcagtgggccccaggtcacccccagagagctctcatctgcttctcttagaaaattggaaacctggggactgcaggagggtgggatgagtcccctgggagcaacggaggctgtgccctgcacctgggcctctcagggagctcagggcctgctcccctagaagcggcaagaaatttcaacaaacaggctgccaggcggtggtggaaactttcttctccaacccaatcagatggaataaagttagccaactgcaatttacctgtggggacagaaaaggggctcccttcttgccaaagaaaagctgttttcttctcctgaaatcaggctctgtgtttcggagctatgtgttgtgagaaggaagccgtttggagtcatttgctgaaatttaccttcagacatggttaggggccggagctccattgctggagctgacagcccagcttcccgtcaccccatgggctggccccaccactggccaggtctcctgattaccctagtgtgttgatcagggctctgagtgaccagcctaattggaacttttaatgggttgccagctccttcacttgcttcaagcctccctggcagcttgcaaaccctccctgccactgacgaaagtggctctcagtaactctatgccctcactcccgattagaagggggaggcccatgctgggcacgtgaaccaaatgtgtcatagccaatatagccacagtaatgcctctgccttaggcaggcagggtgatatggttaggctgtgtctccacccaaatctcatcttgaatcgtaactcccataattcccacgtgttgtgggagggatctggtgggagataattgaatcatgggggcggtttcccacgtactattcttgtggcagtgaataagtctcatgagatctgaaggttttataacccctttggcttggttctcattctctctctttgcctgctgccatgtaagatgtggctttgctcctccttgccttctttcatgattgtgaggcttcctcagccatgtggaactgtgagtcaatgaaacctcttttctttataaattacccagtctcgggtatgtctttattagcagcatgagaacagactaatacacagggccaggttctgcagaagtacatttctcagtaacccaaggttctctgaaaccaatgcccaaaggatcaatgggcttgactcttatttgctggaagtcttttaaagatagtgtgtaccccacagtttatgataatgggctggaccatggcaacattttggcattggctctgagacctggctgtaggagattcatgaagtgcaaagtgcaagaggcagcccttgattccttgtggggaccctggtcaaaccctctccgactcaggccttggttcaccatctataatgcacagtgtagtcagggcttcccacagctgctcagaagaatctccaggtgtacacgcaacatacagagtcccaggcccttgtcctacacattctgatacatgaggtctgcggtggggcctgagaatctgtttatttaacgaatagccaaggtgattctctctagggtttcgggggaaaatcctggatggcgatctctagggtccagatggagagtctaaggctccccctgatagagactctgagatggagactctatgactgctaagcatggcatattcagagctgggccagtgcagtgggtaggattctaccccatcactgacagtccctccctgggacattccttgtgctctagcaacactgttcactaaatatggagactcctgccaaaaagtggaatctggggaaactcctgtgtactgagattgcaggcagaggttggaagacagcatcctggtcacagcaggactttggtgacagacaagctgaggtgggtggtagaggtggcaggaggggcatataggaagaggacagaagggtctccgtgcattaggatgatttctcctatctgtccattttcaacaagatatatcacaaatcccccatccactcctaagacagagcccacagcttcaagggcattgatcaccatctatcccatctctctcttagagcacggttccctttgcagcctccctgccagggtgtcggctactcacagcttctaggcacagggagctcatgccttttggcttagccagcttgttccattttctcctagtttcacctccagtccatgggacaaatggcgccctgtttgtacaggtgtgtcccaggaaagctgagtgcaaagcagatttgtgcgctgtgcctgaagaaagcttctatttcctcacctttaaggtgcagagaattgtacttgttgttgaattgcttttgttttgagaataaaactgaaaaatcagatgggaacgtgctgtagaaagccacctgccacacttccttagagcagggctggcctgacgacagtgtgcccagctgtggggggttcagggtatactatcccgggtgcagacgcccagctcctgggcagacctgccctccctggctcacctgtcctcgatgcggacccagaggtcattgaactgccgcggccgctggtgtgtgctctgcctcttgtgccacttcctctgccggccaaactcctccagctggctgaggctgtcggggagcaggaggtgtggggacagggctggatcctcatcctctggtggggcggtgggggtcacagagggtgcttcggggacagcggcagctggggtcactggggccgggctcgtcgaggtcccctcaggagagggcgctgggctctggggggcagggctggaaagaggtaatggcacatggggcacatgtgttggagaatgtcatccatgtgtggtgggaatacagtccaattcagtgggagtttgtcatggcaggagaaagtgccagggtgcccctgctgggcccggtgacagcagcccaggaaaacctcgtctggtgctgaaagccagtgctttgagtcatgccttcatttgtttagtcgacggatatttactgagcaccaaccctgtcccaggcacttttttaggaggtaggtatcagcatgatggaaacagacaatgcctctgatctctgagagcttacattccaaagcagcagacagagagtaaaacagaggatgccagacgctgctaactgccgaggagcaaatgaaacagagacaggtgtgagagtgggggtgaagggtgctactcagggaaggtggtctggtcaccagcaggtgacatttgagcccaggctaggaagacgtgagggagcgagccctgggtacgtctctggggcgtatctgagcttggtcagggtctcatttattcaacaactctggctgagactttaggtgagtttaacctcactgtgcctcagtctcctacgctgtgaaatgggggtgttgcagactctatctcacagggtacttcatcaggattatgaaggtgaacaccggcaaagcaccgagaacagtgtctggcaaatagtaagcagccaaaacatttaagtaattaagattattagcattgtgcattcatccaaccttccattcatacattcaatacacatttcctgtgcaccttttcagtggagcaaagacagtgttaagtagtcagagctggaggtagactgatgtgggtccacagcccggctccacaacttgcaagccgtgtgatgaagggcaagttacttaatcatatcaagcagcaatgagctatagcacaagaataataatactacctacttcatggggttgtcatgaggatgaatgagatgaggtcttaacacagtgcctggcacataagcctctcttggatgttggccgacaagcaaatagacctggctgtcaggcaggcgctaaagtgtcatttgtcacattgtggaattcatgttttatacaggggcatacacgtgcaccgcttagcccaagggcaccctctgtttttctcccttttattctttcctctccatggccacaatagaatttgttttagggacatgtgatcctgggagaaggttgggaatggtttcaggaattgtggctgagtgggcagcttgcaaggttagacagtacccaagacagcaggcaggccgtcttcccagcccactctcacacggcacgatgggtgaggagcttctctctttgaaggaaagaaggccatcagctcagcctctcctcccctacccccatggcaaccccagattctcaggattcaggctgcctggagatgccgcagctgctggggagataattcaaaacagtcagacaaaaagctagatccaggaagcacctgtggccgatgatggcttttattgttggagcctcctcagcattcccgcccccctccgccctgccaactcccttgctcccccgtgcaggaggctaaggctgagagtccttggagcagagcccatgggggagctgtggagggccccctcccctaatgcctgggctctgagatgaataggaggctcgctagcctcactggcctgcctgcctcccctgccctggccagaacagacacaatgagcttcaaggggaaggtccttggggctgctggggtgagggctggggtgaggggagaggagggaaacttgaagaaggctttgtccctgaggctaccttggaatccccaaccctcaaacacatgcttgcccctggcccccagtataaactaatgcgtgctgggcccaaacggttcaggtaggaagagcagccttgtcagtttgactcagatgagaagtggtgggagactgggatgaagtcccaatgtgagggtttatcgagacctcagttcaccctcagagctggtacagggagtaatagttcagggaggccctggagccagactgccacttacaccgctgtgtgtccttctgcaagtgacttcacctctctgggcctcatgttcctcaaggataaggtggggaaactcatagctttgacctcacagggctgttatgcagattaaatgagttaaaaggtcttagagcctggtacggagagagcagttaataaatactggctatgaagatccaagcttctttcaaactccgggtctttatgctggagcacgagctgcatggaaccctggagtctgaggatcctgtcactgacctctggggctccccgggactcagagcctggctctcgctgacacctctcatgtctggcctggtgctggtgctgtggaaccacagatggactgagctggtccctaccctcgggcagctcccagactgtgggggtgggggttggaagacctggcaggaatagcggatggccattagtggctatttgagcagggtgggtatgccctggcaggaaagttaggggtgaggggcatagccagagacagcaacggagaaggtgaggaccaggagtgggtggggcagcagggctgccacagagtggggctgtgacccaggaaagagaccagggccctgcccatcctcccagtaccatctcgattcagagccagggcagccacagtcttccaagcagcacccaggagttctactgagtccctctacccccgacccaacccaccatctgtaaatcataagtacctctccagtcttaacgctgctctcactcccacccatgctctggccctgctgtcacctagagccaagacggctcaccagctccttcccaatctcctgcctccagcccagcctttccattcttgcttcctggtagagacctgcctctgcctcaccagaagcctcttcacagctctcctgaaagcctgggcaggaaggcagggtcagtgagggccaaggcacacccagatgtggcttacctgtgtatggcctgcccggcgggtgtgtggtccacctccagccctgcctgccgcaggatgtcgatgactgtgttgttccccagaaagtgacctggaacacaagtgacaaaaggggctcagccacatgccaggccaccggccacaggggactgccccaggccatcccctaagtttgtatctgggccagtgacctacaccaaagtcaatgccccagattccctgagaggcagtatagcatagaaggtaagacatggtcctggtgccaccctgcctgggttcaaatcctggctctgccgctcattaactgtatctccccatgcctcagtttcctcatctgcaaagtgagaatggctgtaatagcaacatccagggttgctgtgaggattataaaaaacagctacctgcacgtagtaagggctctccgtgcttccctggtgcatctctgtgcctcacaccatgaagctgaccccagccccccacagtccaggctgggacagcctccagcagtcactcaaagcccagctccagggaaccctcaagcccctagcagggctatggctcatcttggtaagttctaccagcaactcaggcctccctcctttagcatgggagtggggttctgtgtgttcatgtgggcctcctcactcagctcccagagagcagagatggcatctccactgccctgcacaggctcagcacctactggctggattcacagactcatccacctagtacctgtggagaacgcactatgggccaggtcctgggactcactgaggtgtaagatcccagccggggtaaccaaaaaccctgactgattgcagggcctggcagacagtgacggtcacctacaggaggcagaaacatagaactgaaccctccagaggtgtgtgtggggagaggggctggcctccatgtcagtcccccactcactattcattcattcagcaaacattcatgacaaccttgctctgtggtcagttctgcactaggaacgatgaatacagaaatgggcaatttagttgaaagccccatttgggagtggaaatcgtcttcctgtgttggaatgcaggcttgatgtctgagtactcaggggagcctctcctgggctctggttgggaagaaccctcaggaggcccagtggctctggacacaggaggtgctgggagtcaacactctgggatgtccctctgcctcgggggcctcagtctcccccacctgctcaatgtggtgcttgttcagggcccatgggcccctcctgccatgggcctgccctgtggctgcactcattagggaagcactctcccctactgctccctgttcatcctgaaccctaggggagatccctgcactattcctctaattgcctgtgaatggtggtgacaggtggaagccagaaggtcagcatgctgacagccccagggaggtctaggagagtagaaagtggacaggctgttggggaacagagatgctctggcagaggaagccagcatagaactgcatagtggctggagcagagaatgaaccgtgctgctgtcttgccccaccagcctcgcacacctctgggctggtttcacaactcctcaggaagtctcccagcccagtgatctccctcttgctgaccatgccctgccagagcatctggagttaccttaggcctggctgaccatgcctgactatgtgccatgtggctggctgaccctgcctccctgaagtttcacttgaggatcactgggaaaggtcactgggcttggaatgtcagagggctctagtctggcaaccaccacacttactctgagacctcaggcaagcatattaccctctaatgccctcagtttcttgctatgcataatatctataggctcttctggctctcagagcctatggggaaggtttttgtttcattccagagacccttatgaaaagatacctccctctcttatttcctttccccacctattcatctcgttcatttaatgaacactgcctaggtgcatatcttgtgctgggtagtgatgaagaggcagggtctttttccaggcactcacagacttgagaatgggaatcctgtaatccgggcactaagtatgatggagagggaactgttcacacaggaggctgtgagggcacacaggaggcctctaagccagcctggggtcaagcagacttcctggagggggcactgctagctgcagggtgggataagagttatcgaggtgaggataggagtgggtggcacagtgggggaggctgttccagtagggggaacagcatgtgcaatgactaggaggtgaatgaggcacatttgggaagctaactgcagaagaggcatgggcagcacaggcatgaacaggcccttccggagctctggccctgacctagtgctgttgaggacaaaagatccaggctcccgccaaggctctcattctgccccgcagcctgtgatcctaagcaagtggcttccctgccaccagcctcagttttcttgtgcgtcaaacgggcctacagttctttgaccgactccttggggcaactgtaaagccctaatgaggcagaagaagtggatgtcccttggaaaagcccagagtgcagtactgagtgatgggctggagacagtccccggcagggcggggtcatccccactcttgcctttccccacagcaccataaagctggaaagggacgggaagaggcagcctccagcacgcaggctggaggaactctctgcaagcggctcttggactctactcctggcagcaaaggcaactccttttctgcctccttggagacctgtgcaaagacaaggcctcccagcccaacagcggtcctcgcgtttgcccagaggatttcaagagctgccaggaaaaaaagccctgcctcgggctgtacaggagcagcagcaaatatttactgactgctgcgcggctgctccaagaggagcgtttctgggactgagtagaggagacacttagagggcccaggcctcagcccggccgatggtgcaggcctcaccggatgcccactggatcctgagcactgcgcggcaatggtccacgtgtctggccggcgttcctatccatcccctcaacctcaaccattccacacctttattgttttctgtaagacccaaaacagaagacttcagatgctttgagaaaatgaaaccaatcaggaataatccttccaattcccattctctccttctctaagccacactcaccttcctttccctctgccagggcagggagaatggtcacctccacccaggtggctactccttgcacaactccaggaggcgccattcccatgtggcctgtgccccagaactgtgtaatgcggttcctgcgctcccgagcccatgtttctaccaccctgccctctctgggcttggtttcacagcaccccacagctgggttggcaacacttgcaacggccccagtgctcacgactccattccatcctggttctctctgtacttctctcactgccccctatctgtcctgttggtgggctcctctttctcctgcccagtcaatgtgggagccctgggaaccatgcccttggccctcttcttctcacccacagacagatcatccaccctgatggttttggtaactacacaatgctgaccactctggaattgccacttttgcccagatgcatttgtccagcgacctactgggcatctccacctaaacatcctcagaacctatagaatccaactcttccttctctgcaacaatgtcttgcgtctcaaccaggctctgctattcaacctaaataggtcctatcttgattctcctcgctcctcatcttcatacgatcagttcccagaggccccctgctgtgacctcctaaacgtgcttgactctggcctaggtcaccatcaccttctgcctgaatcactgcagaaactgctctccttgctctctctagttcacaccccagagctgactttgtcagaacgtgctcccaacccacctgagggggatctaagagctttttgagggcaggggtcatgcctgattcatctttatccccagagataaactcaagtctggcatgtggcagtggctttgtgaatgtgtgttgaatgaatgagtgaaaaaacctgttactccatatcctttccatgatctcatcctatccccaggagacctgagctcatggatctcctcttcttgtaactcagccctgccccttggtggtgctcctccagattctaccaatcccaggaatttggcccttggaccagcccgagtcagggcccagagcatgccgtcctcaggagctggcagacaggaaccatgcttgcctccaaggtcagaaatcctaaaataggtgccacacctatcctggaacctgcagggaaagtcatggaaagtctccaaaggggccccacgatgttggggctcagcctgcaaggcttgcccaggctccccaggtctcctggccacggctcagcagccccttccaacactgacagctgttctctggccagctctctgcaggaagatacgttccatttcatctgctgaggcctcgtggatgagaagaggaggaaacagagggaggaccatggggtgggggggttgcggcacacagagccatgcagacaaagagagggagagaggagaaagagagagagaggtagggagaagagcagagagatactcacagaaaggggcacggaggaggaagagagcttcaggagcagatggagagcagaaaggcaatgtggagagaaagagaaaggggcccagagacaggcagtaagagacacagagacaacagtagggagagagggaagaagagacaccaagaaaaacagaaagagacaaggacaggacaaagagatacaaagacacagagacagagaggtaaggagagaagggagaaagaggagagagggaactcagaaatgaagacaaaaagcgtggtggagaccaattcactgaggacatcagggaaggcttccgagaggaggggctcatgtatccagtcatgtatcgaggactcccccaggatgggtgggattcagatgcagatgtaagagaagacaggcaaagtaaggagaagcaagggcctaaaggtggactggatcttaaaaattgcggggctgggatggtgcctgcctaccttgagagaagccagggtcccacataaaggacacttatatacaaacaggaagaggttccctgctctgagcaggtgcagcccccatgatgttttagtgcaaagaaaaagactccctttctcctaagcgcaatctagcctatgccagggcacaaggctcagtgagcagagcacaggccaaggccagatctaccccgcctcccatcagcctggcacagcctgacagcccctgttgatcctctgacatgggaaggcagggtagagcgagtgctgtcctagggttaggactgttagaacaccccactcatcaattaaccatgtcaccttggggagtttccagtctcactttgtgcctcagtttccccacatggtgttgggccccatggtctcggtctcatgggtcctcccacctctatgattccttcgtttgatgacctgcacacatgctcatacttagtgggcctcccgagtacaggatgcttctcaaacgtcatttcatttcatccttgcagcggccctttgaggtgttgccagtttccagatgaggaaacaggctcagtgaggggacgtgactcgcccaaggtcacacacctggtaaaaggcaaagcttggacttcaatccagagatgtcccagtttactgcatgtcctactacacccactctgaagtattggcagctgcaagggatcctgagttcacatttgggggcaggaaattgtcagaaacatgcgtcccttccaaggttcaccagatcggagaggagagtgtgcaagtgctcagcaagaataacacacaattaacagggcagtttcaggaccgtgttgaggggctgggcagagggaggaggggagaaccagatgttcccacaaaggctccaaagcagcactggctccccccgatcagcacacatgttttctctccagtgagtatgctgggtttccagttttctcctcctggaagaggcatcccaagcccatatttatgttccgtctgaaattaatgcaagggaaactttcaaatgctaatctagctgccaggacaggccggccggatatcaagctatggcggtgttttttttcctgaggaagtatgacaggagggctggatgggagggccagtggaggatggacaactggtctctcaaagagtgtctggagggacactggcagagccgagcttcctttctcctgctttgcaggccgcccagggaagggctagggacctttcagttcagtggggcctgagatgacaccacctctgtacccaaccttgtgccaggagctgacacacagtcccctcccctgaggaggtcacggtatggagagggggagatgggcaggcaaacactcacaggacagcatgagccatgcagtgccaggggccatggggttgaagtggaaggagagggacccagactaaggagatgagtgaggagtgagaggaagagaggagaaagggcattcctggtagagcacagcaggatcaaatgcacggaggggagaggtggtgtggcacgtgctggccaacagcagttctgggttgcagtaacataaagtgaaaggagaggtggcaatagtgagggttggaacacgagggtgtccctcctccatgacattctgattgctgcaggacatggtgaaggggacagattcaagctgggaccaaaaaacactctcccaggcaactgtccagctgtaaggaagtgagtgctccaccctgggaggtgtgtaagctgagggtcgaagagcacttgtcaggcctgtgaggggtattcagacatcctatggggaactgctgtgtctgggtggaaccagagattctgcctgctttagcagcctttaccagctgctcctctttggaggctgttagaacgcaggacgtcagaaatgaaagtgccccaggtcttcagctggacagctcagctctgccatgaacagcgcaaagatggttacaaattccgagaggagcaaccctgctgaggctaacagaacttgccctgtgtcacgctggcagaaaggggcagagctgggctcaagcccaggcatggcacggggtgcatccatgtcaaggcccagatccaggcaatggccatgcaggctgattccaggtcagcacaggacagagcctgtgatgggttctgtgaactgcaggaggcagtgctcagccagggatctccatggccatgtcagtcactctttacaacatccagaggctccttttttagaatcacaacaccccaggactcctgggagctccctgttggcagggacagggccccacgcctcctgagcctcagtgctacttggagctgaatttggctcttggggttttgccacagcgtcccagttgcatcctcagaggccaccaagcacttctgcccctcgaccccagtggctctactgtctcctgtgtgggagtcctgttcttagaggacttcgagctctgaggggccagggaccctgaaataatggtggcaacacaagagctcacatttacggaatgactgtgcaaggccaggccctgagtgctagtgagctggatctcaggctcatctgcagagtgggaggccgcaggctgagagaagtgaagcaactgatctgcccaaggcgacttctgatcaggagaacgcagggtttctaactcacacagtctgggtccaagcccatgcttttaatctacactttcttctcttcttgcctttctcacactgtccaggaagaatgttgagctccctgccagatttgtacattctccttcactgatggagcagccctgggatctgtcctggggtgtgggcactctgttcttctagactctcctctgtttcggagggtgagggctggctccagctagggacaagccaggaggggatgttcctctggctggctggatgttctggcctgaagcagcaacggcgactctggccaaggattgcagcccttcacaggaatgccagttgccagatgcatgcgtggtggggtggcaggaccctttgaagcaccgttggaaattctgaaacacttcagatgctgtggcctcaagctccagcttggggagggtggcagaccagggcgcttgccagtgagagaggatagcagctgttatttttgtttgttcatttgttttgtttttttttagagatgagggtctcactctgtcacccaggctggagtgcagccttggctcactgcagccttgacatctgggctcaagcaacccttccaccttagcctcttgagtatctgggactataggcatgcatcaccatgactatgactggcaaatttttttatttttgtagaaatggggtcttgggatattgcccaggctggtctcaaactcctggcttcaggtgattctcctgcctcagcctcccaaagtgctgggactacaaatgtgagccactgtgactggcctgcctcttgtttccaaggtgaaaaaggccctatatggacgatggccgctcttctgtgcccagctatgagctctgaagggctgccattctgacgccaccaagtgaagaaccatgatggggaaggaggttggtgtgggtcttgccctgaggactatggagatgatgagtaaactggaaggcagctggatctgcatcagggaaatttcaactggttttcacctcctccaggaagctttctctaacttaccctgcctcctttcagtgccagtcactcaaacctctgttagacatgtgtggaaacgctgaatgttgggggctaaaggggaccttggacctagctctgtctaaagcccctcactgtgcagacagaggaggaaagactctgagaaggccacatagaagatctcagaatcccctttctaccctcacgtctttggcgtaactctcaccttgctctattttctttcttttctggcttttccctacctaatcatcttgccgcctcccctccctacaaatgctcctgcttagcactaaactccccctcctctagctgtgattgcatggtttactcagcagtacctgggactctctttccttaggtcttttcacctgtcaatctagcctcagcttccaaaggcagatgtgatgtggttggacccctcagtctcccaccatgggggcagaagatgtaggttttaggctgggttttgctgtgggataatgtagaagcaggcagcatttctgtttatggacctcagggttggtgcattcattcattcattcattcattcattcaacaagtgggtaatacgcaccttcttagtgctcagggagtggacatcctagactgggagcatgagagaggctgtgatagcaaaatcctggaggcctatgggagcccagaagggaaatcagggaaggcccagcagaagaattcccagcagaacagagggcccaagtgacagctggatggattttttagggatcaggatgacttcctggtcatcaggaagaatgacctagacaatgtgaccaccatttcacttcagttctaagactctctgacatcccatctgtacttggatttactgaccagccaaatggaataataaataccatcctgtttccctccaagaggaattgaggatgtggaagggccatataagttgatggatatgggaattttttcaagcaggatggtgtccactctctagggagcaatttctaacgttatgaattttaaaaggtgttaatggtattctgtgtgttggtcttatatctctcccttctctcaagcctgggtgcttacctctgatctgcttctgtgtcccagcttcacaggtgtgttttggattatggggtctgcggcactctagctggggtagaaacaggctggcatgagcctgggggctgcatgtgccaaatgtgtgggtgcctgagtaatggagccagcctctctgtctctggtgctcacactgcttgcctcttaactcttcaagttctgccttctgcctggacttctgctccctgtggagcaggtgacagcagtcctgcgaagagtgatttccattcctggaaggctcttagctccatactcctcccaaggaatccaagagaggctggagcaaataatgctagcatgttagaaggctctgattacagcatgctggaatattagagctgtgcaactttaaagcaacagcatgttagggtcaaggattttggaatgtcagaagttagaattatactcagattatagcacgtgctagggacggagtgtgtgataaccactggttctcagagtttgaaatgaatgggccctagaggttacctggtccacccctgagtccggctcatgtctccagcccagttcctctaattcctacattactcattctagtccaggaaaaaagaatgctagaagatttctggatggctgaacaagtaaatatcctgagaaacctgtttccctggaactaagggtaaaattgtaattttcttctagtgcataagactggaccccacccccacaattgggcctggagataccttgactcaatggaatgaacttcattctgtgtgatttggtccagtatgtcctcacagaacatctcctaggtgtcagcaattctgaggcgtatgtgccctgtcctggagtagttcacatgcaatgggatgatcactgagcagtgggtgctaggataaaatcagcacacaggcctgggtgacaacatccacatttacaccccagctgcttggtgttgctggagaaaatcttacacccgtgacttggcaggttcatgggccctcattgcagtcagcatcctctatgttcctagcatagacagagcagatttgtagctggcatgtgccctaatctcggtccccagcagacatcacaaatcaataagggcctcttctctgctgggctctgatgcgactttatcatcttataccataacgttccaggcaggtgctaccaatcaatcataatggcccatgggaggaaacatctttaacttcttgtcctggtcagttcttgtggccaatttctcttatgtcaaatagtctcacctcttcaaaccaagaatcctcccttctctctcctcttcctctgtggatgacttcaccttctacttcagacagtggtgctctgattagaagccatcagctgagaatttgctccctttttggctgccaaattacttgcctgccagcctcctccctccttcccttcagttacaggtgaagaggtgtcttcctccacccaaggcgtcctcctcaaccctgcacccaagctctggtccccaccttgctgccttcttggaacctcaggcttatcatttttcccccctctctcctgtatcatcagcctcactcatcctagaatattctcttcctcatatttcaagcatgctcaattctttctcatcttaaaaaaaaaaaaggtaggtgagtgggaagaacaatgcaattaccagattttcattttgccaaatgaggactttgagacttttatctgcttcccaccatcatctttttaattttcttaagtaaggaatattttaacttcaaacacagttgaaaggagataatttcagaatataaacctgtaaattgaataaatttagctaacaaggaattcaccaccttgtacttatttttctgttaattgtaccagaggaaacccaaggacctgcatctacaagcaactggactagaaaatcttggggggctcttgaggctcagcctgtccagctacaggagctcagcagacagaaaatgggcttttcctcccctctggatgacacacccctccatggccacagcctggctacttccagaacatctgggcttgcacactggccacagccacctcctggatagggagggcttccatctgggcccccccagcatcacccaggcctgctcaaggttgtcacacatttgcaccccacctgccctgaactgcagggtaacctctagaagaggtcacacagtgccaggttgcagaaacatcacagatgctaagagtatttcatgagaggcaccagctaaacaggcactcgtttccacaaaatcatcaacacttttgtatgcatacagcaagggcaccacgtgcaagggaaatggccacacctgggactcaagaggccaggcttcccatggcaggtctgcctccatggccttgaggaagccgttcatcttccctgaggctttgttttcatctgcaaaatgagtatcattaaaatccatctcgtggtgttacgtaatcagagagcctggaatggtggctggcacatagtaagggcttttatgataagaacccttccaccatggaagagcattttaatactgtgttctcaaatgagtgtatccagaacaatcccatgaggcagatgtattgtcccagttttacagatgagggactgaggcccttggaggtgaaatggctttcccagcatctcttagctcacagtggcagagccatactttacacccaggcctcctgaccccaaagctcttaccctttgcactgaagccccctcagagcagaagagaggagaagccagactgcagtcagcactggaaatccctgtctgtcctcgcaggctctcagggcaggattctggagctgggctgggtcggggttgggtcctaacaagcactggaggggccaggcaggcggaggctcaatctctcaccttcacatgcttggccccatccagactccagaaccacagagctttcaggaacttcagctggacactgaggctgggcctgtcgtggaatgacagaagagcccccagcaggggcttggctcagacacctggcaaggctgggttggtgggggtcatatgtttctatttccagagatgtttcttagagatacccatggactctaggcttgagagacatttgcatgagcagacacatgcctgggggatggatagctgcattcctggtagtatagacccttcctacatcccatagccttgggggtcttatgagttatttgggacctggcaggcaatgggctgcgagagcccactgagtcccagggtccccactgcccggcagtccggggacagaactgcaggggcccccaggtgggtaggtgaggagtggagcgggtatgtcttcaggtctcactccaccaagagagtgcttagtcccagctctgcacgtaagtcagcctgtcaccagatgtgggactcagaaattacatgatcataagaatgtaacgaggccggagtggacttccctcaccacagctttcatgcggatgcgttccatgtcaataggatgactctgtaacaggcccgctggggtggctcaatgccctgcacacaaaaacagagcccttggatcatagatcctgggcctagggtacggttctggccttgtcctggactttctgggggctttgctcatgtccctgccctctgtggacctcagttgtcccacagccaggatgaggtgggcagctcaagctcagaggctctgtccagcttggaaattcttgggtggaaaggagatctgctgtgcagagtgggccatttgttccaggcatggctgagccaggagaagtggcagctgccagcaggatctgcacgtggctccagatctgttgtttttggagagtggattcatgagagcggaggtgagtctccctttgccctgactttactgctggcctatccttataaattcaccagcccagaggagaacaggatgggagaccctggtcaacgttcatttcttcactcattcattctttcattcactcagcaaacttaaagcctattacatgctaccaaagacacagcgatgattaagtggtgccccacctctgaggcgagcatgggagacaaagccagcaccactcactgaccacaatgtggggaggagtccagaggcagggaggaggggaggaggctgggactgggatagtgccagtgggcatggacagaatggatgggtgtgaggtctttctggtggcctgtcaacaggattcactggggactgattacattttggagatgggagaagctggcgtttggcatgcctgtgtgctggcctgttgctggagtggacatcagtgcccctacaaacctagggtttcaggaaaaggaggttagtgtccacggctcccctcactgctgtgattttcattgttagactcttctgctttcttgctcacagacagagctggtggtagctacccccagccctgggagactctgctcctgggtcctggggcaggcaggactactcaggtggggtgtgtagaatgaaggccccttcactgactgcactctctgggggctccccttaggcctggggaggagcctgggggctggatgactcagggtggttccccatttggagtctactgggggctgttccagagcaggatgcactgccctgatgcctataggagggagggcggaagaggcagctggatggtgagggagtgggaggggactcttccctgcacagtcctcaaagctgtcctgactcacaccgagctcccagcaggtgccctgcggctggagagtggcttaccctctccatgctgccagtcaatgtcctgctcctgcccctacacccctacaggaatccctcccttctctaaaacctatggctgaatagctctggaatcctagatggcccaagtgagtcctggctcttcctgttcagatgggtaaactgaggctacaagagggaaagagacttgccggaggccacaacaggccacagcagagatcctgcatgaacccagaactctttctgcccaactgctgtgccttaaaggtgctgtcccaggaggactgtatctacttctgagcccctcccctgtgtctctactacgtgagggctgcaaaggaggggcgaggcccagcagatgtgcctctggctcttgcccttaaggatgaatgttcaaacagtggacatatcccattacaaaatcaggacatccacaagggccctggtgggttagactgactgctcgccctggagggcggcatgagggtgacaggaggggaagggaacacagtggcaccaggtgtggtgagcatgtccaggagccatctcattaattctcacaatgcaggaggtgagttctggcaacccaaattgcaggtaacatgagcaagaaataaatgtctgttgctgtcagttactgagcaaaagctggttagtaacaagaggcaaacacaatatcctggtcccagtgtaaacatagtgttactggcagggacagccatatagaaggaaacaaagagtgagggaggagaggaaaaatgaaaggcaaaggaacagggagagaaatgctaagtgagccctgcacctgaacatgtagactcccctttgcatgaggaggccaggtcccccagaagcaagcatcaagttcactgttccatgtgtgatgatcacacttatactcagtatcatcatcatcatgatgatcattgcagctgcctttttgagttcctactatgtggcaggttatttttaaaatattatcactaatctttacaactattctacaaagtagatattttcagttcatcaaatagttattgctatcactgcccatttatataagaaagaattgagtctttgagaaggtaccagccaaggtgatgtggatgggctgggatctagagccaggactgtgggacgccagagccagcctctccctctggggccacatgtgcttcacagccttgctcctggctctgtgggtgggcctgaggctgggctgggcagtgggagctggctttagtcctgggctctcacatggctgcctgggggcatgaaggcaccacagaaattatcctggccatggcaggggtcatcactcccctttcccgtggggaccgttatggaagaacccttgacccgaatcaggagaactgccttggatctcggtgctgctgctaagcactgtgtggcttttcctgccccatcctgggcctcgacttctccctcgatgaagtagaggttaggggagagccaagcaaatctcccaggattctgcaaacaatcccttccccacactggcccaaacctgctccgaaggcaaagaagcagatcttgtcctcgttctcccgtagaagcgccatgaccctcttccccatgcgctcattcctcttgtagatgagctcctggcggaagtagctgtcaatctcctgggccgtcacctgctcgtgtggcgggagggtggtgttgataaagttgggcagctgcaaaggcaagacagaggctgccttcagttttttttttttttttttttttgataaagggtgttactgtcacccaggttggagtgcagtggctcactgcagcctcaactctctggctcaagccatcctcctgcctcagcctcccaaataggtatgaaccaccatgactagctaatttttaaatattttgtagagattgaatcccactatgttgccctggctgatctcgaactcctcctggctcaagcaatcctcctgccttggcttcgcaaagtgctaggattataggcatgagccactgcgcatgacctgctgtcagttctttatggagcaaggtggacttaggataagtatgcacagccccagtggggctgggcaacttccttttatgaggcccctacagtgggctacatgttttgtacatgtttctcatcaattccaaaatcctctcagataagcattgttattccagttttacagatgaagcaagcaagagtggaaaagatccagagatgtgctggcagtgccaggataaggcctagcttctgggcttccacatgtgttgctctgccttgtgtctctgccctgctgaacctcagcagatgctgaggtctggggaggctggcactgtgctcatcttgttaactgctctcacttcaccgccgagcctggtgctggcaagtacaaggaatttagttcagcaagaggatgtgcagggtcagttgagctgcctggtacagcgggaaggccactgagtacaagagtaggctcaccccctgttctgatgctgcgtggcaccgggcaagttacttaacttttccgagtcccagctttgtcacttgtaagatgaaactgatgatattgtggggattcaataagaggatgggggctgtcatgggctacattcagcacatgccaccctacagagatgagagaaaggatcatcacttttgattttcccaatgcctgagccaccatctgctgccaccaccaactccccatccctgcaccaccactttccaggacataatgcaaatgcctccatccctttttgaatacctcaaccccaggaccatggcttcccccaagttggcttgctcaacaacctagcttggagctgcctaggtgttttgccatcaccccacactatacgcccagccacatggcctgggaacagcattaacagggtcttgaactaggcagagagcttcctgggttcagggacagagcttttgtcattcctggcccccaacagccggcacaaagaaggtacccagattccttgaaccttgaacttaaagttgtgctgtccctttctgaccacagttgccccactgtgttcttctattcccaacattttgtctttccaacctggataacaggcccaggtgctcctgcactgtctcctccaatatgcacatggggctgttgaggaaattgaggcagggaatcagaatatactctctctttcctcacaacctgtcagtgtcattccaacctccaagctcctgctcacaggatggtttccacctggtgtcccctcttccacttctctatcttcacctacccaggcccaaagcacaagacaccagaccttgcaaactgaagggtgaggtggatggagagcctggcatgaagaggctaattttctacaggattaagcccctaaatggccctgcagcccagccacatggcttctagagccactgcagtgttgtcaacactccttctgaggaaaatggagtcaatggaggctgagccctaagggactctaaggaggctaggatatttgcctctgctatctgctggccaaggcctagtgtgttccccagagtgagaggagaggtaaaggtacatgcaccatggggcttctctgccagaaaggcctgactcaccgctctgggatgaacaagacaataatatggctgatgtcccctaaccttgtgcagtgcgcaacctggatagctatagacagcagtgttgctagtgcccaatcagagttggcaatggaattcttacttccctacataccccctttgaaagcgataattggaaaccctaacacaacagggcatgcttgaacttgatgcagctatgggaacactgacggcttctgaacggggagaagcacagaaagcccatgactcagaggagttatttctggaaatgtgaccctcacaggttctaccgttctttaggtatggaaaataatgtgaaaactatgttgtaccaccaaataaatatttgtctaatcagtgaatgaatgagtgagctgaggggccttagaagtatggggctatgaatgtagggcctgaagtcagacagccaggacaacttgggttggaatccctcttttgcagcttactagctgagtggtctctctagaaccagaaagtgacttggcctctctaagactaagtttccaaattggtaacatgggggtaacacacattattgtagggattaaacaagatgtgttttggaaagtgcttactgagcactgtgcctggcacaaaggaagtcctgaatcaatgtcagctattacacaactggcctggggatggagctggcttcatcacttttcccagtgaagggtggctttgggcacagggtaaggatgaagatgacaaataaatggctctgaaccattggagagtaccatgaaggcagcagtccacttcccctctccttccaagggtccctggaacctgaacacgggtccagcccctcctcctatgcttcctgaccacaaatgtgcatgtacacaaagatgattctccatttgttaattggggagtcaaaaaaaattaacaaggacaagaacccaaaagtgaaagtttaaagccatgaaggaaactgggctagctccccaggctccaggggctggccagccgctggccagcattctctgcatgtttcatgctgatgggccttggctccttgccaaggatgagttctgggtttgggccacggctgggatggaagcaaattaatgatgtcattagacttgttgggggccttaaatcttctatgacaagtttaagtgcaggatgcacaatgacattttaaagaggacatgtgaggtctccagggatggggtgatgaggtgattggttggacagggctggggtggggctgtgggggatgagttcagtgtagtcttccctgacccatgaaccatgtcaggtctaatagtcaaatgctcaggtctgctgacaccacctatctaaactctgcaccccttccctgtagcccatccatccaacagacaccctgtgggaaattccatgagccgggccctgtgttgggctagggggcctgagagcttcctcagactgggtctgctcctcttgatgagggtcacagactgatgggggagtcacatatgcgcacaagaacactgatggatatgcgctttgagaggacaacgaggaatgtgtgagcccagaggaggcacctaatagggtaactacgtgtcttggtttgaccagaacagtccaggtcgatggctagaggagattgctccatgcctgttaattatcttgatcctcaattgtatctgactctcaaaattatctgggtttggacaataaatgcatgcagcaactctacacctaaggcagtcttgaggctcaggccaggcttccaaggggaaggcctttggatcaccctgctgttgctaggcacagacagtgccagtggcctgggggctgcagaggccagggatgcagccattgctgcaggtggggacagtggagccaggatgcaggccaaggatgaggtgcccctggcccctttcccagtgttatccacccaggcctgcacctgtcctgccctggcctccagatgttgcttcctcatcctccacattatagccagaggcatctttctgaccacattgctctccagcttgcgctctccacccctcagcatcccctctttacccccatctaggggaccctactgccaagcctggttctcgtatcactgtctccctaaagccttcaggcaaaggcactgtggccccacagcctccgtatcctcagtgccctgcagactttgaggcccccagctacagacacagccccacctccaacagatcctcatgggaactggattcagccttgctaccctgacaccaggcttttctgcaccttggggtagggttgcctagcccctcctcaagcgactagattctatctgtgcatccttggggcagcctgggttgctcttcgaatccaggtggcccaatccacctaccttctgtcccacttcaagtacgggaactgttgggagacctctgaggcagttccacttgccaaaggcaaatcagtggtctggacccaagctcaaagaaaatctgagcttgccttctcctgaggtcacctcatgcctccgtttctcagcttagggtcagccacagtctggccagcaccctgtcctgcacactcccgccctcctggccacatcatggccagaccatcctaagtcatgaccagggtctcctttgccacagagctccctggctgctcaggactcacgggggtctccctcagcagatgaagcagggtgggcctggccacaaagggggtcactcgtaggtgagattcctaggagcctcgtggtgtcagggtgcttctctccaccctcacttctctgccactgagtcagagctctcggaatcctgagtgtcctgcagcaaagcctccagttcttttctctttcattctctatgctgctgcaaggatgccacatgcctacatttgctcgggtgacagtcactcactgccatgtgctctgtgccaggcctaagctgggcaacggggaccaagataggcagcacaccatcaccctcaggagctcctggtcgtgtgggggcaagtactgatggaacaccatggcccggcccggtctgtctgcaggctatactctcagcacccctctccggctcactggtgcatggtttcctctgctggaatattattcctccccttgtctatggccaactcaggttcttccatgccctctcatcttgcaaaaatctttccttctctccccagtcccaggccctacccacaagcccatctaaatcagccgttccttccacaggctccaaatgcttcctccactccatcctcatagcaaggatcacactttggtgcaattcattctcgaatgtccccatcttccctatgtgactgtaagccccttttcatagcactgtgtctagcatttataaactatttcattccttccttccttccttccttccttcattcattcattcagcaaatgtttactgagtccagctctgggccaggggctgctccagccagttgagataaatccatgaataaaacagaccgaactccctgccctcatggagcttatgatctagtagggagagcaaccaataaacagtcactaatcaatgaatcaagtagatagtgtgttagaggatggcaaaggccatggggaaaaaaagtggagcataataaagagggtgagagtgtggtcatgcaggccaggttgcaattctgagtcaggtggttggggccagcctcactgagatgacgagattttagttaaatgctgcaggcagagagggagtgagccatggtcatacctgggagaggcattcggcagagggagcagccagtgcaaaggcagaagctggtgagttgggttcgcacaccagcaagaaggcccatgcagcccaagtggtgtgcaggaggggagagcagaaagtgacagggtagggagagagcatgggggccatgcaggccactgtagagactctggctttcaccttgataaaaatgggaagtccacgcaatgtcctgagcagggaagtggtgtgttctgcctaattcaactgcttcttgaatgaacgggtattcaagcacaatgacagaggaggcacaaggccctagaggtgcctgggagaatgcctgaccctatccaggggctcaggaaggtttctcaggaggtgacatatgactatgaccaagtgggaggaaccctggaggagaaaggagcctgaacaaaggcccagaagcttgaaaagacaaggtacaatggaagagttgcaagttccacagtctgcagagcaaggtctgtagggtggaggacctgggctgtgacaaggccagcagagggcacgttgtaaggtccttgaatgctggaggaagcatcttggaattcaccatgagagcaatgaatggggaggcatggtggagtctgagcaggggtgagccatgctcagccccttgggttctacttgctgcccgaccagctggtgacaatctttcctctgagactcaaatcaaagcagaatgctctgggctggactcaagtccaagctctgagtaactgtgggcttttccttccctggaacttaatttccccagatgtagaactgaacctctgaggcctccctggtcttacaagctaagtttccagagtcctaggccccagagccacatagatctggctcaagttgctgctcttggtaacttaaaactcaacaactcataagctgtgttgccttggacaaatctcttctcatctctgagcctcaatttccccacctataaaaggggaataacgatagctccttcttgccatggctggagagaagattacctatgcctggcacgtcatagggatctaataaatgccaggtatccaggtctttggagaggagcctcacctgggatgtgtcgtggttgaagatgactgcgctgaggtctccgcagttgtagtgcttgatgaggtcctccgtggtgtaggaggcctgcaggctcccggcccgcacactctcctgctgcagcagggtttggttcagggcaaacagcacctgggccgaggaaagagagaggaatgagggctgtgctcagggaccctggctgagctctaggactgaccctcctccctctggacttcagagcaacaggcctgaaacagagaaggtgtgtggggctggcaccagctggctcaggctgtgtgtttccagtttctgctcctgcctcatgtctctgagcacgttcagcctgctctcacctccagccctttgcccacacaggtccccattcctgctctgggtctcaacatcttattaaagaagcagcaaaatgagaacccaacttgtgtctgggtttcggaatgatgggtgagtttttcttttgactcctttgtgttcctgtgcttaaaagtgcatgaattaattttgtaatcaagagcatcctgcaaacaaagcaacaggacaagaacaaaaggcccggttggatgtcaaggcccaacctaaaggccgcctaccctggaagccttcctcacccagggaaaggcctgaggagctcggtcctgaacatctgctctatccttgtattcagcatgcatgtcctcaagctcctctgtcctcggggccaccgtgcctgtgcccagccagatctgtgggcatcaggatcactgtgggcatcaggatcactgacaaaatgtcagatgcccagatctcgccctctgggatcagaggctctgtatttttaacaggatccctgcacacttcctaagcagtctgaccgtctctggcatttgaggatcgtggctctaatggaacacaacctgctcattttagatggggacactgaggcccagggaagggaagggaagggagggacctgctcaattcacatagctaggcctggagctagttttaggagacagagtatcccagactcctttgttcaacagaagggaggaggctgatcattatttgggctatttaacacagataaagagaaaaacttggtccctgtacagaaagtcaggaggctgtctcagggaactggtccctgctgttagcccagcctagccctcagtctttaggccctgctcattctgtctgcacaatgccttggacaccaagttcccagccttgtcacccacctcaattcaggccccagcatttctcgttgagtcccctgcaccagtcccgcccatctccgggcacaccccctcccttctcttctataccatagttatctgtcatggtcctcttttaaatgcacaaatctgatgatttctctctctctcttttgctcaaaacgttcacaggtccctcccacctgcaggctaaagggctagctcttgagtagagcctccaaggcagtaacctggaccctgctatggtcaataacctcatttcttacatggctttcatgcctccaaatactaaaatactcagcattccttcaagcaaaaaaaaaaaaatcttctgcctttgtgcctctgtaaatgctgttccatagggaaatccggctccctcgtctccacttgcaaactcagacttagctgtccagactctcctcggctgtctcctccaggaagcttctctgaccacctggggactgggttaggcccctcactgggggtcccacagcctccatgggtggcagactgatagattaatggccctaaaccttagcccctccctgtattcatgcccttttccatggaactttgtagctcctttccagtctgaccctggacatccttcagccaaggggatgctagtaaccattataaattcaggcctgaaaagtagttacgtgctgctgatgctgctgctgctgtctgcacctctgccactgccctgagaacaatccaggctagactgctggatgatgagagacatgtggcgcagagccgtccagcgaaggccatcctccaccaagaatagccaacagcctgccaatccccatacatgcaaactagcccagccaagatcagcagagactattcacaattgtccccagatgcatgagtggaaaactcttattgttattgttacacagcatagttgtggtgatagatacaccatgcttccttccactacggagtgaacattatattgtatttgctgtttagctaccagcctcccacattaggctatgagctccttcaagacaggaattgtgtcgtgttcatttttgaatttgcagcactcagcactgtgcctggtgaagataaagtgtcacttcattgtttctttatttctttgacactgctatggtcacttcatagttcaaggctgctcattgagtccttaaatctagcccctacaacttctgcactctgcattttgaggcatgccaccaccttgtggcagaaggtcccaccaagtggcagcagtcacttggttcaagaacacataatctgaccagaaaagctcataaaataggtgtgcacagccaggccaaagtactaacataggcaacagggccaagcgtgtgctcatgagatcacctccctcccctctcattttgttcatggctgggcaggagcgctagattgcactggatgcagcccaggctgctccacctaatgagctggctggagatgaggtcagcccccaccaccccctacccaaaactccacctctgggccttctccaggcctctaggctctggccgccaccattgaaatctgatatgtagccatctggtgcagggtgtcgatggcagcatggtggctggggatggatcacaggaggcagtggccctgttgctgtgggcattgctaaggcaacaggcacttcctcccacacggcacatgcctcggatgaaagtgtccatgtcgagttgatccgctctccttccctgggggcctgggacacaggcttcccgtgactacactcggccactgcacacacctgctcccttgtttctcggcgtcggcttggccaagacaccacctgacctgtggtgaggtcatcggcccaggcacccagaagagctgactggaggagaaatgtctccccaggaccttgctcgactcacagagttgcttctgcaatcatgcaaccatcacagagctggaaggtgttccagtgaatttagtatgttataatctgtggggtgctaaaaacagtcctggcatgtagtaagtgctggataagtgtttgttaaataaaactgagaggaaaatagacctaaagcttcccagattggagctggaagagccctggaggtcatctggtccagaggcttttcaggccttttaaagccatgttcttgctgttgttttccaaaggaatcttacttagaactcaaaatatggagaaggtaaaaatggaaacttccctggttgatgtaagggaggcaggcgggcgcctgaagtctcactagctcaatgtctccctgcagcagggacttctgcaccaaggcccttctgtggaacccacaggtaccctggagcctagtttgagaaccactgatctcatcctgtggcctcctcatattaaagaggagaggaggctagggtccagagcaggcaggatggggcttgcctaaggccacacaatgagctgtgggcagagtggactcaaccccaactcttaactcctggtccagaactctgcagtgccctggaccacatggctggatttccagatgtccacaggcacagcccacattcatccacacacactgccacacccattttttttttttttagagccttgtgaaatagccagggaatatttattgttagtctgttactaataagtctgttattaatagtctattacaaatatataaaacagaggccagaccatttatgaggccttcccatgtgtcacagcaggagtgtggtggggccaggactgaaacccaagcctatcatcctgattctccctacctcggtggggtttggtgtctcccaaagacccctgtccttctttttccttagacacttatctcactgaattgtccctgttctctgcctctctgtttcctgctgaatcccaatgtctccattagcagacattcaggaagcactgcaagaagaggtatgctgatccagaatcatgcgcactttcccttacacctcctgccccgtaccatcattttgcaatttataaagaagtcttcatccattcattaccaggattacgatgtttattgagcacttactatgtgtcaggaactttctaaactcatgttcatttatttaatctttacagcaactctgaggtaactctattattagctccatttaattaaaaaaaaaaaactgcagcaaagagacatcaaataccttgccaaaggtgacaaagctggagagggatggatcaggcatttgggccaggcctggaatgtatcctcctagttaaccactgtcctgtaggccctccctctgctctccctggaagagagccaagagggatgttgtccgtagtcaaagatgggaaaccaaagaagcagaagggagtgatgggcacaaggccacacagctggtaaaagacagggctggggtttgaaattacgtctggcaccggaccaggttctcacaaccaggacttcagcgcggtatgtgctccttcaccagcatccttggtgcttccaacagacagagggaagctacatccattcattcacaaacatttactttcagctcctctctgcagggatttgagattagtagattaattggacttggcttccatctgtgcagagctcattttagaggcagatgtgccaactggccagcacagcaagggtggtaagtacacaggctttataatgaagcgcctggccctgactcctgcctctctttcactcaccctgaattcccaagcctggtgctgctcagactcgagatgtcttctgctcctggccaccttagaataacaaaccttctttgtacatagcctcggtggcccactctaggataatgtttatgataaggctttgacatggaataacaaacatcgggtgaaggctagagctgcctctctcaccctggatggctgtgtggaggcccagccaccaggagctccagagcatcctctgtggactcccctcaccaacgctggctggacatgaaatggcttgtggcatctgctgaatgtaggcccagaatttaaacacgtcttcaaacgaggaactaggaaggagtgaggcaggcgccaggagggtgggaacaggtttattgttccagagtagtcctgtaaacagtcctagatgggctggaatggtagacttgaaggcctatgttcacttgatggcccagcaatggcactgagaaggcagcaggacccccttagtcaagaagagggtttagagtcagggtcccttgggacaagcctggctctcagcttgcaagtctgctcacccaactcaaagcccaagggaatcactgcaaaggccccaatccactcagccattcttcctgagcaccaggcattgttctaggtgctggggagttagccagggacaaaacagactttaaaaatccctgcccttacagagctcacctgctagaggggtaaagtgagaatacataaattattagtaaaaatactaatatgcagcatgttggacacacaacaatggcttcattaaactggaagtgaagactgccacccagccacatggattcctcacacctctgagtcaacaggcaaagaaggggttactatgctgcctggaatgattgatcctgactaccaagggggaaattagattgccaccccagtggaggtgaggaagagtgtttctggaatgcaggagaccttttagggcatctcttagtattaccataccctgagattaaagtcaatggaaaaccacaacaacccaatccagacaggactactaatggcccagaccattcaacaatgaaggcttgggtcatgccgccaggttaagaaccatgagcagttgaggttgttgttgaaagcaaagagaatacagaatgggtagtagaagaaggtagtcagcaataccagctatgataacgtgaccagtgacagagatgagaactgtaattgtgatgagagttcctccctcttttgttattcatatttgtgtgtgtgtgtgtctgtgtgtgtgtttctatctcaaatatctttgctttcttccctctcatccctttatcatataacataagatatattgacttatagtatttaggtattgttagctttacatcatatatttaaggtacaggatatcaagaaaagtaaatgtcacccaaagactttgcatcctcttctggggaaagaaacagagcatttttggtgtatgcaggatagcagcatcatgttaggtggaactatggccatgttattgtcagtatttggagattcagtatggttgaagatgtgtatgggagcccaactgagaaggggtgaacttgtgatggttaattttatgtgtcaacttggttaggccacgctatccagatatttggtcaaactttttttagatgcttctgtgaaggtactttttagatgagactcatatttaaatcagtaggctttgagatgcagattaccctccataacgtaggtgggcttcatccgctcagttgaaggccttactagaaaaaatctgaccctgtcaaagaacaaggaattctaccagcagactgcttttggacttgaactgcagcatcaactcttccctggatttccagcccgctggcctgccctgcaaattttagacttacccaccaatgtcaccaacactacgtgtgtgtgtgtgtgtgtgtataaaatgtatatacctatatatatatttacagagatacatacacacatacatatattctattggttctgtttttctggagaactaatacagaatatgttatagaaaaaaataaagcagtaaattggatggggagtgatgaaggaaggggaaccagcaggtgcaaaggccctgtacatatgtgaggagaagcagaggccagcgtggctgaagctgagccaacaaggaagacagtgatgggagacaaagttagggttaatgagcaagcccccaattacatggagcattgtaaagatgctaggaaaccatctcacaccataattctttcagataaggactatttccatatgacaaacaaggaaactgagcccttgaggagggtaaagtcacttgcataaggtcccacattgaagaactaacgagttaggattcaaactcaggtccagctggcaggtctgggttctttctgctgtccctggtcctggcccaccaagccacctccacccaaccagctggtaggaagtacagacaagaagagacaagtaggggccagtctttgaggcccaggttctaagctgtcagctgggaaggagagggggtgttagaactttagctgtggtgcactgtcagagctgccatatgagaataagaaagaggtcacccttgctaaggtaacctcacctggttcacggcctccccagtctgctttcactgcccaggctgacgaaaccttgctccctgcccaggatcccctcctctgcacgtcctctgtctggaaacctctctccatctaccagctgacactcccctttgcacctggctgtagaggctccttccctcaggagaactctgagccatggactgcaagggtcccctgctaagtgcccccaaagcacctgacacttcccaggccaggtactccccattttattactaacactcgtccttcccgcttgaggatgaatgctctgaggtcaggcaaatcctctgtcttcatcttgactatgttcccagagtgcagtgcccaatacacacatagcagctgcttgaggaatgcttgtaggatgaataagtgaatggaaagccaagtgagtcgcccgtcacaggacccccaccctgagcagctccctgccagaagccagtacctcccatggtgcagagctgggaggagctgcgcctgctagaccctgggcccaaatcatctctcagcactgggtaggggtggaggacagctcacttcacaggaagccttctctggcctgggggacatttcttcaaaggttagagctgccaggctctggctgagatttatttatttattctccttgccccatcggcagcaccaaagccatgccgactacctccctgcttcctgttcagtattccgagtctcctaggcctccagcactgaatcctgtctccggacactgggctactgagcagcaggcatccaaataaacacaagatttcctggagctgtggactggctctgggctgggagcagggaccagggatctagtcaccactggactcttcactacgaacctctgggtgaattattttccttccctgggtcttggtttactcacctttgaaaagaactaatttacacattcattgaacaaatatttattgagcacttatgtagcagatgctgttccaggccctggaggtataggagtgaacactgcaaataaagatccccaccctaaaggagctttcattccagtaggagaaagctgaccataaagaaacaagaagtaaaccatccagtatgttggagagtgatagttgctatggagaaaataaggcaaagaggaatatagggtgtgtgtgtgtgtgtgcgcgcgcgcgcgcgcacgtgtgtgtgttgggagttgatattttattattattattttaaatttttttagagttggggccctgctctgttgtcgaggctggagtgcagtggtgcgatctctgcttgctgcagcctgagcctcctggactcaagtgatcctcctgccttagcctcccaataaactaggacaacaagttcgtgccatcaccccctgcccccccgccacccattttagataagatgtccaggtaaggttgcaatgagaggtgacatttgagaaaaggtctgaaggagatgagggagggagccacgtgggtatctgagagaagagggaacaggccctgaggcagagcaggcctgataggtttgcagccaatgtggctggagatgcatgagcaagggggagtgaggcgacggacctgtgttaggcagggacccaacagcaaccaggtggcacactgccagtgagatgagttccaaagaagtaatttcagctgaaagagtgactgaagagcagtgattgtcagaatattcacgaaggtgtgggcaggccatagtgaggcagcagggagtagctgcagggggaagcttacctgtctctaaacctttaggggaagagagggagcagggatctggacctggcacagccacaggcttgaaagggagcacaactatggctgagcatggcctggaccacggcaacgccagggaaggaggagaagggtgggcggaggtaagaaatattcaactccctttcccttctgcctgcccatctcctgccagggaggacaaggcgggagcctaggtgatgctgcgtcagctcatgcacagggtggggcagggagagcagaaagtggatctggagaggaaagtggagaatttccagcacaagggagagaggtcatagtgaggtgggtggtgggcagggcctgtagagccctgtggtctttgaaggcctgtggcttcctgctgagatgtgaagtcacggggagtctgggcagaagaacgtggggggagctgtgttgataatggaatctagggaggcaggggtgaagcagagaggtccaactgaagatgaaggcagctctgccctcctcccttcccctcaccacccccccatcgcccacccagtgcccagccacaacccaagaagcatggacttggcctctagtacagctgtcgcctgccccgtggacttggtggtgctgcccacacctccatctgccctgcagtgggctggctgagctctcagtgctttcctgggcgggcatcgggaagcctgactcaccctagctttctttccttcttttctctgaatgcttagtttctccacccaaagaccacccttaaagatcctagtgttcctcctctgtccttcaagtcatgccaggaaatgctcataaatccggagccacccacatgatgagattagcattctgctgggtgggtagggaggctgatggttgggactggctggggctggcccagaggcttggggtctccaggaaaggagtttatgtggggtctgccctgttggagggcaaagggatcccttcgattttagctttcagtacagctaagtccaagggcgctcagagatgcatattctggtgctgtgggctctgacccagaccagctgtgagacccactctctgggccacagggttcctctgaaacaggagggtgtgggagtacctcctagctctggaagacctattccaggagcccaacatttcagaacattacacctaccatcccatgatttcaacagtctatgtttccaaatactttacatgtggaggctcatttatttttcttcagagccctgtgaggacagcattattgaaaacccaaggctcagagcagtaagtggcatcccttgttccccagtgatggggctccatacccagggcctccactctgcccaggcttaatgcatcgagctctctctgcttctgctgtgaatcttctatttctattcttcagtaactacctttgatttcataaaccgaacacactctgtccattgaggaaaataataaaacatactggaaagtcccagagaatcacctacaccaacttatcctcagttataaagctttgagcaacttcaaggtgatggaggagatgacggaaggcacgggtaattataatgtggtaagttaataataaaacacagaggttgggggcctcagaggggtttctgacccagcctgggagtcggtgagggaatcacaggcttcagctgggctgcaaagatgagtagcgttgagaaggaaagtgttcaccgcaggctgtgcatggtggctcacatctgtaatcccagcactttgcggggctgaggcaggaggatggccagaagtttgagacaggcctgggaaacacagggagaccccatctctaaaaacaacaacaaagagccagatatgctgtcacgtgcctgtagtcccagctacgcagcaggctaaggtgagaggattgcctgaggccaggagttcaaggctgcagtgagctatgatcttaccactatactgcagcctgggcaacagagtgagattctgtctcaaaagaaaaaacaaagaaagaaagaaaaagaaagtgttaactgcagaatgatatagaggagcatggtgtgtttaaagacgagccagcagtcagggctggaagacattcagtagtggagggtcttcaatctcatgccatggaccatgcactcaacccaagcagcatacatgaccctctctacctgatcttcagacagtagacaagtcacctgtggaggctggaatggatgagaaatcagagatgagctgactgaggcccatggagggataatggtctacacgggaggcgatcagtcagcggtagccgtggttaccattatcactgttattgttattaagcagctgcttccattggttcgaggcatgtcatttttattttccctgctgtctcagacctgccctgctgacacagctgcctaaacttcaaaaggcaagtctccattttcatttgcaaaatcagtatgaaattcctagagggcccctctaattcctctggtctgaccacatagcaattaccaatttgcagaggagggagggggtctcacaggccctccagcagtatggggacctctgctcttccttagtcctgggcagtagccaaggaggaccggattggagggggcacctccaggtggccagggatggaaggagaggagttgagtctgggagtgctcaatactgatgagagaaattgtaacatgcctctctgtttgtctgctaagccaccggttaccaagccttcagagacaaacagcagctgaaagggcagagatctgacccagttttaaacctaggacctgctacatgcaggctgtgtgaagttcttattctggctctttggggcagactcttctcttctctttgctgcgtctcagcttacccatctgccaagtggggtgtatatttgtcctgcctgcttgagactagcattctaaaaaccttgtaaagcaatattgcccttccttaggacacatacccacacccacacacacactttaagaaatttctgttccctaagcaccggggtgggtcccagttgcaggaggtgttctgaagagaggctggaattctgcatatgtggatgagatttccgttctctcttcagtcttcagtatggactagtgctaggctctgtgctgggtgccaaggccatgggaccaaatcagtaccctgtccatccttgacaagctcaaaggcagggtggagcaagggaggaagttccaggaagacttgcgacaagatcaagtaacattcattaaggctggggctaagggatggacaaggtgctgtgagagtccagcaaatgtgggggaccacaaacaggattcccaaaggaggtggctctggctctgcagcaatcccctgtggggacacacatttgccacacagaagggaaagaaaaggaattccaggcagtgtcaacagcccatgcagaggaatgggggctgcggtgaagctggcatgttcagggccgtgtcagtgacggcaggggctggagtgcagcctgtggctggtggaggtggacatgggatagacccagagcagggagtcgaggtggatctggagctcagactttactctacggacaatgggatgccactgaatttattaaggagggagtgatcatcaggctttctctttagaagctgcccctggctgctgtgtggagaaaggctttgaggacactgactgtagcaggagacattcttggctctggacaaggagaggtgagaaggccccacttgggccccaggggctttggggaggcatggaggaagggaggggcagattagaattccaaatctttcctggcttgcatgttttagaactctccaactcagggctctgaggctttcctattgcccattactgcccccgctctccttccccgacttttgaatctgggccctccccactcccttcccttttaggaatccttgagccccacttgagggagcggttggacaaatgcagatgagacccagaatggccggaagaaaagaagactgcgtgggacccgcctgggactctgtggtgctgacagtccagggaacagatactcctcccagggtgcatcaaaggagacagctgcgcagaacttggcctcacagacaaaactaaaatgcagtgccaacttctgctttttgcctgtctgaagtcacaggagacacttcctggcaacaggatgggaacactggagactctggcactgcaagagacggtcaggcgagggagggtccttagatcctgcatggggcttctcgttgtgcagagagaacactgagccccagagagggcagcaaagtgcccaaggtcacacagcaagccaggggatgcagaataaggcaagaacaagggatcggtctgcttcatttgggcagctcgggtctcctatgctcccttatcccctccttccccctaccacagaaagggaaaatgtttttagacccaaggcaaaagaatgtgaaactgaaatctgagccttgggtcttgggaaaagaacacagagaagtcagacacattctggatgagcacagatctgcttacactgcagatgggaaatactcagggctatccaaggcctccttgttgtgcaggtctgacctgggagggcgggctgtatgtgaggcgatgagagcagacaggggcccttgaaggagcaggttaaaggggccagtctgcttccaggatccaccttgggcagagggaggactgctccagccttttagctccctgcccagaatcttctcaaggagcctcaggctcatgcaggcattccagcatggacctgccaccagggacccaccaggtcagaaacaggggtccctgctggccaccacttgtccacagcccaagcatccatcctgccccacctggaagctcacctcctccaagaaggccttcccttctgctccagcctttatttgtcttcctcttgtgtgagctcctgcaaccgggaagcacagctgcaggccagagcttctttcaacctggagtgtctggggctccaagtgactgagggttgtgtaagaatgtgtgtgcacacatgtgtgggcaagagagaggtagagatggtgacagagatagatagatagatagatagatagatagatagatagatagatagatagatagaaatagagtcaggagtgtggactgtgctttgtgttatcccagccatcaagagacccaaccacagacttatattcacacatgtaacaagcatatgtgtttgttcttggtcaggtgctgtgcgggggtcctggggagactgagattaatgggacttggttccctccttcctgacaccaaggagccccatcaatcattctccatggtctggtcttagactgacttgccaggccctttgtgatctggtctggctgtttttgtgtcttcagcctcacccccttcccctctctctcttttacttttacttcttgctgctggagggcatgcacacagtgatctcaggccctggggcccggggtctgggctgcatcttgaatcctgagcagccctgacctgaggtagggcccactggtcttggcctaatggggaaagggcatgctgtgtgtgggtgagaccacggcactctcccaggctcaaattccccatggctcccctctgccctgggaataaccatgaacttcttcaacatggactctcagaagtacttggcagggacctgtctgtctctctggactcctcctgctccctaacctccttgctttgggtttttactgccttcatgtgccgcccatatagtttttttgaatgtgcaatttgtttcctgcttcaggacctttgcacatgctggtccttctgcccggtatgccattcccatcatctctcccctttgcctccttaacttgtaatatttcagacagttgctcaagtaccacctcctgcacactccttccctgatcccccagatccactcaggggcccctgtttgaagctctcctacaccctggactctttattcagagtacttataatggtttgtctttatatacttatgaggttaatcatttgttccatgacagggagtatgtgaagtttgtcacaagtatttcattcaaatcctgccaactctgtgaggtggttctcaattttatccctattttactggtgagacaaaggaggcacagagaggttaagtgactttcctgaggtcacacagcaagtaagtggtggatgaatgaaaatagtctagcaattttagccatgtgccaaacagtcatctaccgacttctctgcagatgtaacgagagtgggggctatgtcagctttactcattctcgtatcccagtacctagtccaggacctgccatttgtagccactcactaaagggaaaaagggaatggaggaaggaagtgggaaggaaggaaggaggggaggagtggctggtgtgccagctgttagagagatatccttgagcagcctttcctagaggggcggcctccagaggccatgttttccatcccccccaacacccctgccccagctcctggatccaggagagccagtgttcaaaaccagtcagtgtgctttctcaaaagaggatggaaggagcacactgggaacccagatgtgaaccagagcactcccatctgggttcccagtgtgaagccagggcaaaagcaacagaacctcgggattgggggccctgaaacggtgcgtccaggggtcctcagctgtggaacctcccttttcaaaatacctccccttccctctacctccaactcccacctcatctccttggggaacatgcctcagctacagggagagacatgtcagtgtagtgacagggagctcatcacctgcctggctgctccatgccctctcggggcacggatgtcggctgtgaagaggaccttccgtctctggtcctgaaatctgtccccaggaggcttcatctctgctgggggagcccaactccacccagcctgctcccaggactgatatctgctcctctagggatgagggcccagtcccttcacgggctcctcgcaggacatgcaaggaggcctcactgctctctcttgtggccagactcccaccatccccagccacacccagaccgaagctgtccagagccgctctcaggggccgtgggcccaggagcaggcctgggaggtcagcaagcctgggaggcttccaccccagctcctccacccccgtttgaaggggatcaggttcccccacaaacataattgaacgaaaatatgagagagaaaaggtctttgttctcccatttacagcgtcagaaaatatgtaacaaattagccgtttatgaggtaagagagcagggctgtgtgccgccgcggagaggcagggctgcgcataagggggcctttcagccggcttcagggggcggccaggcgggcaggcgttgcgggggaccggctctgccccaggcctgccagtatggcctggcacccatgggatggagggctgggaggccctggttgacctctggcttggactctgggtgaggcttggcaaatggggacgtgatgcccaccagctcatgatgcacacagctcttggaagtcagatggccaggatggggagtggggaccacagggcttggctcccaaacatgccactcacctggtcccctgagtaaccccgagtccttcttctccttcttgggacctgttttgccatctctgacaggagtggggtgttcacaatgatatctaatagtttgtccaatgctcttggggcaccagtgtccaactgcacggacttcaatatcttccctgctggtttctctgaaacttaggagctgggaggtggttcttggtattacacatgactttcctctcaaacacctttgatttctcttccaaggtttgatgaagagttccagcggaagcatcagccagtcattaattccaggggagggtgcacgtggaaccagaaggggtggctggccaggcaggaggctgtccctcaccagggagaggaaagagcgctcctctctccagccttgctgtggcctttaacttgcttcactgggtgtccagaatcacaggcgggtggaatgacagcagtttgaatgacacctggtaggcagacagtttggtattgaagtgctgggatttcacatcctctgggttgtctcgctgtggctccgatgcctttgacgtgaacagctcacaagtccatcactcgcattctgtggcgtctggccatctcccaatttggagtttctgattctgtggttagaccttatgtttccagggcctgggcttttcattctttctaattttttaaaaatgtatgattattgtctagagacattatttttaaaaagtataaaccatcccagtgctgacaagcctgttgtggggaggactcagcgtgataaggcatctcagggtgctggcatttagcctccaatacaatctagcagggctagggcacagggccagcggccaccctgcaggctcacagggacaggattccgctctgcagttagccccaaggatgggactctccagcacttttccctccagtcgctccagggcgggaggatcacggcccatgccagtggagtgtaaggaaccccctggaaaagcggggcgcttgaatatcctgagtgtttggtctgcagtcaccaacacatcgctttcctggatctgattttatttattttgattggatctttaacagctctttacaaggctgaaaccgaagccgcctgaggtccccaggaggcttgctaaaacttcaactgcacccagtttagcagagcaacttgaaagttaatcagcggtgagggacaatttgcctcattatttccagccctggaatttggcggcagatggaatttggggcctggtgtggacacggcaatgaacacagcaaggactgtcgccccttggtatggccttgtggggtctgggcctggatgggctgatactccctctgaagacgggcggtgccgggaaggatttcccacttgagagaacaagggcaatcaggctgccctatctcaggtccaggccagtgtggagtaatccttagatacacagttctgagcacgtattcgggctgaaccctgcactggattctggggaaacaagagtggaatccgatacagttgcatccaatataggacgcagaccagagacactggggtaaattctcacaggagaggaacacctgtggctggcaccttctgcatgaatctgcgaaaaacaaatctgccccacttgccctcactttctcaataaggtccactcagacccttgactttaatgttaaccccctcccaggcactcccacctccacactctgccatactctccacagcacatagcactgaccaccttctaacacactatgttagttcctcacttatcatgtttattgtttatcacatcaccttccacaggaaggtaagaccctccttccatgagggcaggaatgtttgttttgttcattagtctatctccagccccagcacatatgatgcactcaataaatgtcgtgtgaacaaatgaatgaactgtgtggccttttattacctgttaccagtcccaggccctcctatgtaagtccagtccccctgagcctccatcctttcagcagcagggtgctggtgcctagggagaaggcaaggtggtgcttacacagcaagtgaaattgcttactttacagaaaagctcaaagaggggcaggggcctgtccaaggtcacacagcacgagaacacatgtttagacagaccgtgggatatgcctgggcctggcctacctcaagcttggtgaggtaccaggaaaatgcgcctaaaaggaagaagtggaagctctcagtgaggtcagcagcggtgggcagggctagggcccctggctaccggggcatcctttcccaccctgcttttttccccagccagccctatgccctcactgcttccagcaccctgtgtcctgtgactcaagggcccactttcccctgttggtctcatgtccgtcctccatcaacaggtgggaatagcaacgttaaggcaacagataccatttattcaatactgagaagttcacacacaccacacacacacacacacacacacacacacacacacacacaaaatcttacttactcttcccataatccatgaaggaattattatttcagtttttaaaataataagactacggctcagagaggctgaacaagttgccaaggtcactcaggtagtagcaggaagttctgacctcaaagagttctttccttcctcctggacgtttggacacccaccgtccttgcatcctctgggcatctgtgtatcgtgatggtgcccctgtctgggttcccctccccttgatgctgtcttgcagaccgctccctgcaacatgagcacaggctctcaccctctgagctgaaacggcctcctgtttctcccagtagtgttccagaaatgccagggcatcattttcacatgatggtgctacagaggcagcaagccagtcagtggcacccaccagtggctgttctgtataaggctctgtgctatggagtcttgagaggtggacagagaaacatattagcagtcagaggccctgggttcaagtccccctgaacatggttagggacaatcaattcacccctctgagtgttccatgttctcatctgaaaaaatggatataagaaatcccaggactgtttgaggaatggtaggggcccacaggagtctgactcagctacaggacttggctgtgggagcagaaatgaatagccccaaatatcaggactggaaggaacccgattgtttctccagggcgggagttgccctggcaatgcccctgacaggcagatgctcagggctgtgccatgcctctgtggcaggagctcagtatccccaaagcagcctgccacatccttggaccactcccacatctagaatgcttttcacactgagcttgaccctgcctgcctgcctcagtccagcccagtagccccttagaacttgtctgcaccctgtgatcctgcaaaggcctgcagagatttagggcagcaaccaccagtgtcagccagtccttctccagcatggattccaggatgcccctcaaccctggtcaccctctttgtacacccttcaggctgtcatcatccctcttcaaaagcagcagatgcagacatttgaggaaaaaaattattctacagggggtggaacaatgaggcactgctgattaactctcagccaaccagaaaatgtaactgcctacccctggagcactgggtaatgtgttctctcgtagacattcacacagagacgtgcacaaacacgtgcatgcacacactctcagtcatattcatactctaaaacacaccactgacatcttacacaaaggtacgtttcatgtacagacacaaatagatgcacacagacctctaggcacatgtgtgtacacgtacacacacacacacacacaaacacacatacactcctccagtggagattcagctcacccccgaggcctgaccgatccactacacattgctttgggctctcttcctccttcccacacatctgtgggctcactgtcgggaaagaactctccacctttctactctgggcatctataagtcccagaaattaggcccctgcctggtttttaggttctggagtgaagtgcagataccacctcaactatcttgggactcaaacaggcttttcagtacagtgcctgctgagctctgagcttccctgtcacaggggtgatgaggggaggggggcaggtagagaatcaggctgtggaatcaaattttctggctttgccacttgctcactctgtgactctgggccagtcccttgacctcactgatggcattttctcatctgtaaaatgggatgtctttcttgcagggttgctgtgaaagttggagctaacatacatactatgcttttcatttgttaataactcttttaatcctataaggtagctactcttattatccccatttcagagatgaggaaacagaagttaaatcacaatacatggttgtgatgataatttgtagcattgccctttcccaagatgcctttacattttagttctagcagctgagggtcaggacacgagtaataagaacacacttgtaagcactagcaactcctgatccaggtggtctcgtagaaggctgtggttccatccagcatgtcatccagagagagtgccacctggccacaccctcagctcctggattatctgagtacctccaaggtgccatcttccctgaaggcctctcattccaggggtggactccttctccaccctaagtgaagagtggtgatggggacatgatgctggtgaggcattcagggcactgaagtgagagatggggccggcctggcagatccatctgtgtgatagggtcttgctgtgctcatgcatcccctgggacgccacaggttcttgcctggagatctgctgcaggctgggaaggcagaggtactgaacatgtagctgcatgggggaggcagacggcagaaagtctgccaagctgctgcagtgtcagcacattcttggaacaaatgcactgaaaggctggtcctccgattccacttccaagtgagaatcaggaccttgctgtcccagcaggttcgtgcctgggtcactgactggggctggaggcttctgggggaagaggagaggcttcagagctctgccagctgccattctacagaggcaagcccctccggccccatctggcctccctgacccagggcgctggcctctgattgcattcccctagtgacagggagctcattagggcctggggctttggggaaggttgttcctctgtaggcatgcctggttctagagaatggatatgtgtgtttgctggggctgtcagagcagggggaggtgcagacaaatggggaggagagaggcacatccttgctacagactgagaatggggtggtgagagagaggccttcagcccggctgaacaggaaggcagagactttgttacagagcagcagcatccaggcagccgaggcctgtaaagatcttccttctagtctaaccctctgggttttcacaaggtgggaccaaggcccagcatcaaagtctgtcgattcctacttcagaactctttctgtggggtagccatgaaaggggtgagatttgaggggctccaggaatcactaccaacatcaacagggctcttctggggcctgcctgcaatggctccttgctccctctgtttggaaggttgtaggtgcctgataatgtggacagcttcttgggtcccctgcttgggggaatgggtgtatcccaagcctggaggcctgatcgctgtcactggccttcagaggaaagttggcaattctctcatccttcctgagcctggatttcctcacggtgaagtgggggctgctcctatctactgcacagggttgctgtgagggtcagtgacacataaggacatcacccagcacagagccaggctcgctcgtgtcctctttcctcactcctttttttggagaaggcagtgtctgggcaggcccagctccttaggcaacacagatgggtaaatccagttcccgccagttccacagaggcaggtctggggggaatctttcagcaacgtgagttaccagcgccccctcaacagcctgcaaattcaaccctgactctgacgcccacctactgaccactcactttgtgctgtacatgcccttcatcccatgctgtaactggtcagactggtccaacaaacctgtgggtggatggggttaacacacccacttcacagatgaggaaactgaggcccaggcacacagttcacctggtaggcagaggaagtggcactcaaacccatgtctgcctgacttcaaagcccatgccctattcattctgatctcaaacttgctggaagcagaggacacaggcagagaagacctttgtgggagagaggccccacaaccaagaggctgagagcaggtgcaggatgaattattgagggtgacattcgaggctcctggccctttaatagttcctttccttcctctgtgttccattgtttccgggcccagagctgcctgtggagctgctaatcatgggcagttaccagagtggcacatcataaatagtctgtaaagggcccagggagctcagcccacaccctcagagccaggcagcaccctccaacatatgcatattcacacggctgcccacaggaggaggccaacttggccagcacagccctggctttgcactgtcttcttcatggtcagaagtccctgcgacgaggatgaaccgccagcccaattttacccacgggggaatctcaggctcagagagaggggtgactttgccaaggtcacagagcgggctgtgggaggagcagggactggatgtctttgtttcacagaacaacatgagcaggaataaaggcaggccccactgtgctttccaaagctcttccaaatctggggtctcaataattctcacaatagccattttgcaaatgcagagagtcaggctcagagaaagaaagtcaaagtccatcatgagccctgctgatggaattaccttcccacagcacaaatccaacagcactgccttgctccaaagccccgtgtggctcccactgcctccttatcctccacagcctgtcacctcctttttacattcactgtcccctcattcacaccatggttctgaaaagccaaataacaactcatgagtctcccaagaccccattctcttttactcctccacacttctgttaagctatgccctccacctagaagggcctcctgccaaacctccacctggctgacacccacttgcactgagcacccatcattctttacctgtgggattggatgctgagctctgccagggcagcatccttggcacagttcccaaaacccagcctggtgcggagtaggtgcccagaaaggccctcacttcaagaatcactgtctatactctcagaaggcacccaccctcccaacccttagttcaggaggttcaggaaatcctcagggtgggcactgagccgggaggaagtggctgagttcccagcatgtagttctactcttaaggaagggaaagcaactccctgaggctctaacagtgtgtagggccttggactgggagtcaggagcctgggttcatgttctgcctccaccactaacttgctgtgtggaactgggcaagtcaccaacccttgctgggttttggtttcctcatctgttcaacagggagaggttagaggtttcaacagaatggagaccaggtctgtttcctcaccaatgcaggtcccccatgcctggcagatgatagatgctcaggaaacatttatttacccaatggcagttgggcaagtgaggttggaaggtcgcatgtagtttgaaagtctagcagcccaactggcttgaaggggactgtggtgagctccatccatcacacatacatcaaggcagaagggctgggctggagctgagccacagacttaactgtggtcaaaggagaaatacctatctttctagttgaaaggacatttctaattttaccattgtgtttggttgtggtttagctcatgacatataatttatttaatatgaaatatatttaagtggggtgcaaatctggggtctcactaattctcacaacatcattatatcatatatcattacacatgtgatatataatgtattttacatatgtaatttattttaaaatatatatttatttcaaataaataaaagagagtttgagctgctcaagttgcattaaaaggagccatgatgttaaacatacaaagagttgagaaacactgtcttgggtgaagggacgtttctaggagccatttttttggtggtggtttgttttttttgagacaggatttcactctgttacccaggctggagtgcactggcgtgatcataactcactgcagcctcaaactcctgggctcaagcaatcctcctgcttcagcctcccgaatagctagaactacaggtgcgtgccatcatgcctggctaatttttaatttttagtggagacgtgatcttgttatgttgcccaggctggtctcaaactcctagcctcaagtgatcctccctccttggcctcccaaagggtcaggattacaggtgtgagctactgcgcccggcctagggagccattcttggagaagatgatgtttaggaagtcatcgggaagtactggggcaggactcttgagttctatttctgtagtgacccccacacactgtggggcctagggcaaagatggggaaacctttggggcctcatagtctggctctgccaaggtgtccacactccatggaggactgagtatgaatgggtgtgtgactgtagggtggggagggcgaggatgcagcacgggcctcgctggggctgccagggatgccacccagactctttactccctgtaatgccatctatcccagcaagctccccaaactcagcctccggctcacagggtgtgtaatggaggagacagccagggaattccccagctcatcagctcagggctccggaaacatgaatgcatcagggaaatctgcaggcagtgccgaagacacgcttgatttctcaaatcgagaggcacattttcagcatctgcatgtgctctgcagtgggaccacctaggttggaatgcctctgtctgtgtggcccatggcaagacccttatctctctgctctgcatgcagggcctttaaattgctgggacatgaaacatttggggtggagctggccaagggagctcctaaaagatccagagcctgaaagaagcatttccctcccttcagattcacagcacctgacttgtcttgtttgtgttgaggtcaaggcccacagccctgaggaaacaaacggcaaattgagaaggggcctattagggaaaaataatcagaacagccacttgtcactgctctgagaatgggagctgaggccccagcaagggacaaccaccaacactttggcccacaatgaggtacccccctttttaaacaggagggatttaaacaaggtttgagtccactttggcccacaatgaggtacccccccttattaaacaggagggatttaaacaaggtttgagtccactttggcccacaatgaggtacccccctttttaaacagaagggatttaaataaggtttgagtcaagctgagccaccaccacctggggacagctactccaaggcttagtcaagtgagcttggatgcaggggcataaaggggtgggagtccagcaaggtcagaaggcttggccacccttcagcccgggcatctcaggctaggatcctcagtttcctcctgttaactggggacaatgagcccttccttgcaggcctgcctgaggtattaacaacatacatacaaacgggagcataagggctcagtccagggccacacacagtaggtgcgacctagatagccgatgtttcctccttctctctagggctcctgggttctagctctcaccctctgtggtcccacccccatgggcagcactgtccccctcgctggctggtccttggaattctgaagtcttccaaactcccctccttcctcacaaacaggctcctgaactgaaaatcccccaccaagtccctggcgtccccctatgtgggtgagggggacagtataggcagaggggtgagtggcgaccacatcacttgcccctcctgtcttcccatcccctttaattgtgctagaaagtcactgggatttgacagtgcacgagggccgctcagtcagcagctgctgcagcctttgaggaacatatgacctacggtttgtagaacaaataataaaggaaaaatactcagcaaatgattcccttttgtggccagagcatgccgaggccagaggtataagtccctttggtcaggaactctaagtggccccttgtcaggatttgggttcccagaggggcttcttcatcctcagcctctctcagaagctgcccctggtatttcctattgtagatggactgaatttaacccaatagcaacattgggtgagcctcaacattaagcacccacaccctagaaagtggagcccttaaaagatcagggagttttagactctcacgtgacaggtgccacctagagcggtctcacagcacacaggtggcagaggcagggctatgacccagcccccttccccacgagcctctcaagctccacagcctgcctccgtcctgtgcacacctactgtgcgtctgcatcggccaatgctgcggatgcaggaaccatggctggaggacaatgctctcatttgatgcctaccctgagcctgtgatgtggggagggcagggagggtcattactgctgaggaaactgaggatgactggccccagggaccccagagaggtcctgtgcctgacttgtctcttatgttgggacatcagtatgggtctggtcttggcttttcaaatgcttacaagaggctaattttaaatatcccaggggacaagaaggaaggaatgtgctggcttctcaaacctcgagctgcccatagagttcttctttcaaggagcagtctccagccagttcctggaggggcttcacttacccccactcccctgggagaggggctcagttagggcaggctgtgagcggagcccaagtgtttagaagctgcagcttgaagaacctgaggttgcagctcagctcctacgcagcctaggagtgactgctggcatatcactcctgtgcgctagactcctcactgtcgatggcgtgcataatccacatccgtctgcaggagcagatgccctgggctggggtcagcccggactccatcctctccatcaccactccctgccagatccccaagcctacctcccaaatcttcaacccagaactcctctctgtcgccactcccatgctcaggccactttcctggtcctcccttccttatcctgtccccttcacttcactcgtcatcagttctaagatttaaattggaacacaagcacctatggcacattcaatgacttcccgtgaataaattcatgcatgacacttaggacattctaaaaaatattaccaaccacaaaaagtcctttactgcaccccattgttcttaggagaaagtcagttttgtcactgaacactggggccagtggcccccatggccacttcctcttggtctcttgtcactactcaccccatggttttacctggctatactgggcttctttgtgtcaggccttctctggtctctgggccttaaactttcttctctcttccctgccaccccccaagcctcttccatgaccccctctgcctaaattccatccgtccttagaattcccagctaagtattattcttgagaccctttcctgcctggtcagaagtgctcctgtgctcttgactctccatctgctcttctggggtcttactgccttgccccaggatgtccccctcccagatgggacctccctgaaggcagcagcatcgcaccctcattcaccccttgccccgttcccagccccaaggatgggcctggcccagaggatggccctcaatacatctttgatgaacacatgaaagacaagttgcctgtgataacattaaattctagacccttggggagacagtaaggacagagagatcacaggggctgcatatgcaccaggcatttgctaccaagaaatgaagtgacttcgtaagttcacttgcatgagaaaacccaccaagctgggaatcagaaggaactgggttctagtcccagctctgcctcaaagccaaagcaccttcattctccagggccttggtttcccctcctaacaaaagggatgtgcccctccctgctttgcacatctttgaggattaaacaatgtaagagtggtgaaaggaggctttgacaagtacaaagctctagtcagacatataggatgacggatattattcaggcacaaagagaggtttctccaaggcctgttatctcttttttattttctttcaaggaaatggcttagcccagcctgcctgcattattgttggcactgtgagccagggaaagacggaggcaaagagggagaaggaatctttaagagagactctctgggggacactaatatttttaatagtttgtgggttatgaagcaaatctctgttctctgtattatatatctcagctgagcccgaagaatgtttccagcgtctttaatgaaactgaagcagtaacccagcagagagagagaaaggcagaaagaggagatttatttgcagagatgtttgctcagagaaaggtgaaagcgaccagagaggcagggggcccgactgagccacattcccccagcccttgagtgccctgattctgtccttggttgccacgtgtcctcacctttgaagagtataggcagctacgtgtgctggtctcctatccccatggctggggggtgcctatgcttttccctctaattgtctggagacggggggcaaactcaccaacagttgggaggactggcttttacagcacgtaagaaagccggctgtagcccagagcctcggtgggagagcagaattattaataggtcctactgaggcctcgggaaaaatgcaagactgcatggagtttaaaaggtcagcgtgaataacaaaaacagactttctggggagtcagaatggatttaaaatacactcagaggagcctggggctcctttgctgctgcgggcgcagtgtgaacgtcttttgtgtgttcgcaggcatgtgtgtatacacctccaggatctgcagacatttgtcagctcccagggagcttgcagcctcacagggtgtgtgctctgggcaacttttaggtgccaagaatggcagctcagtgacagagctgctgtatgctgggtgatcactcccccctctctttataaagagaggagagtggattaattggtcttaaggacatttccaattcgaaagtcgaagccgtggaggatggagagaacctttcaaatcaccagcgggtcgcaaactggctaggtgactctgggtgagttggcatgctccttggcctgggtgtgtagttcccacccacagctactgcaggacgactggcacacggagcacctggctctttctcctcttgccaggcttcttcttccagtatgtcgtcgctcatcctttacttgaactttggaagactcattcaatgagatgagtatttactgaacacctactgtgtgctccaagtgctgttctaggcactgtgatacagcaaaaaaactcctatggtctggagcttatgttttatgatcactggtgtctgcctgtcctggagtcatgtgagtcagactcttaaagaagaggtcgggctgggcgcagtggctcatgcctgtaatcccagcactttgggaggccaaggcgcgcggatcacgaggtcaggagatcgagaccatcttggctaatgtggtgaagccccatctctactaaaaaaatacaaaaattggccaggcatggtggcgggtgcctgtattcccagctacttgggaggctgaggcaggagaaaggcgtgaatccgggaggcggagcttgcagtgagccaagatcacgccactgcactccagcctgggcaacaagcaagactccgtctcaaaaaaaaaaaagaggtcagacgtgggtccagtccgaccagtcatgaccacaggggaggcacatcatctctcagaaacttggcttcctaaactgcagaatagggataacaatagcaatcctgttttgggggggatgatttaaatgcatgggactagcaggggcttagcaaatatttgttagtggataactaataggtaccaaagcatttacaaatttaaatggctataattcttccttcctctctccctttcacagtcttctgcaggtgctgaagggctgcactgtgactatcaggaaaccctagttaagtcccaataattttataatagtagggactaacattacttgagcacctgctgtctacaagtcttgacgctgggtgctaggggcacagagaagaatctggtagtttctttgttctttttatatttggtgtggttagggagacacagttgcaaatagtcactagctatttggggctctcagagtggggcagggggaggcacgggagcttgtgaggacctgggaaggcacctaactctgctttgaggagctgggaaggctttgtaactccctgaaaaagtgaccctccacctggctgtcacagtcataggctcctagtctcagagggtccttatttaataagatcctcctgtttattttacagccatagaaattcagaccatataaattgtgtggtaagtggcagaattcattaggattgactcccaggcttgtaaccccttgaaacttgtattttagcaaatcagaattcatttaaacacagatgcttggaccaggcaatgatgtagtcagcactgatgactggaatcccaggctctgtgggggatggtggcagagaggttctgagccagggagtcttgatctgactcctgatttgccaaggagttctgagtccagatttacctgaccctgggctcttaggtagcaggggaaaggacatgttacaggtgagaagaagatgtggagttaagataaagtctcaggtcctacctggctgagcaggtcaaaaggtgcagccttgaaaagaggttgaaatttaaaaactaaaaccaactttcccagatagggcagtagcatttggttgagttaagataaccatgaccctggtcaaagatctggctggggaatgatcattggcagaagaggttgtcaggagacagaagatgctgggatgggtgaacacatgcctagtccttccctcttggtagctggagtaatctggagtctcactgcctctagtaacatttacctgtttttcagtctaccttaatcatgcccttctgagggcttctatgacccttataatacccataccttttgccacttagtagatcttcaggacattgccttctgcattctcttacatccagcttgccctttcacacctgtatatcctgcctcctggcaaaagtggaaggagttggatatcagtgaaccatttggtggactaaggacctctgaaaattctccccttcataaagcaacaagaacacagacaaaaatggtcagaataagctttttcagaactctggaaattaaccaaaggcttgcgggattccagggaacattaatcagcaaaatctcagtaaaaacagtaagctttgtggcattttaacttgccctattacccatacgccttctgcagtatccttgaaaaccaacacctgcaatcccagtgaaaaccagcagcctggcagtcactggcaaaggaaaaactgggttggagctccttcaaaatcccattcccagacaactatcactgtttgacccatctgatggttctctggaagatcctaccctcaatgctgtctgtatttgatctgacctaaagcttgctttgtgctaacagcattttccccaggggcgtttgttgcagacaatcagagtcaaatttttgaacatcacagcagcctgaggcattcgaaaacagctggatcatacaagagactaaccaaaaagctttaaaggaaaagctaggaaataagatgtccacatgggctctgagaagctccaacatattcctgagaatctagaaggctgcatgcaagcatagggctgtgtaaatgcccagagctatgtacatgctcaggaaagacctgagaaggctctaagctctcacctctgctaaccttgaggctttaaaacaggaagtgcaggctaaggcagagttgtaaactgcatggatgggtgttaaggatgtgctccaacacacacacacacgcgcacacacacacacacacacacacagagcccttcagcaaagactgagggacttactggttccagacgtttaagtaaatctctgtctaatcattagctgatcacaaagctaactgagcagagacttcaatggctttacagactttacagaattagttcagaaaagtcattaattaaatagtgacaacaaacagcaaaggcaacaacaaatcctgagaagggaagagaatctgatttccagatttgccacattatattcttttaagtgtcaaattttcaacaaaaatattactagaaatacatagaaacaagaaactatgagccataaataggagaaaaaagcagttaataaggagtatctttgaggaagtccagaagttggacttactaggcaaagactttaaatcagctattttaatatgatcaaggaactaggaaaccatgtctgaagaactaaagaaatgtatgagaattatgcctcatcacatatagaatagtaataaataaacagaaattattttaaagaaagaaccaaataaacattcacatattgtatagttgaaaagtacaataactgaaatgaaaaattcactagaggagctcaaaatatttcagcaggcagaagaatcaacaaatttgaagataggccaattgggattattcagtctgaggaacaaaaagataaaataatttaaaaaatgaacaaacatggcacaccatcaagtgtaccaacatatgcatactgggagttcaagaaggaaaggaaagaaagaaggataaaggattttgatgaaataatggctgaacactgccaaaatttgatttaaaaacattaatctacacaaccaagaagctcagtgaactccaagtaggataaattcaaagagatccacacccagacatatcataatcaagctgtcaaaagccaaggacagaaagaaccttgaaaggagcaagagacaactgaaccatcatacagctcagtaagattaatggctgatttctcaacagaaatcatggaggccagaaggtgatatattaaaaagtgctaaaaggaaaagaacgtcaatgaagaattctatatccagcaaaactatctctcaataacaaagaagaaattaagatattctcagatgaacaaatattgagataatttgtaaccaacataccttcccttcactaaatgctgaagtgaatcatttaggctgaaatgaaaggacactagacagcgacataaacccaggaagaaataaagggtaccagtaaagataactatgtaggtaagtataaaagacagtacaaatgaaaaatgaattttgaagggttctggttcttagttcatttcttcatttgtgacttttttccactgtctgatttaaaaggcataaaagcagttataaatctatactgatgaggtacaaggatgcaatttgtatgacaataatggcacaaaggaggagggaggaaaaggagctacacagaaaaagtttttatatattattgtcattaagttgatattaatatgaatttataattctcggggcaactactaggaaaactaactcaaaatgcaagtagtcatagacctgggttcacatgaaaaagctgtcatttcagtctagatgaccttgggcaagtaatgccccatttttgaatcttagtttccttatctttcaaatggggataactatggacaatccaaggtttacctatatccctaataaggtaatgagtgtgccatgcatgtcaaagagaagagactgacctccagtggactgtgggaggccaccctggtggcctggcctgaatcttgcccctcagccttcttagctgtgtggcttggggcaatcattcaacttctcagggccccagttccttcttttgtgcaaaggagaaacaacagcccctcatctagagactgcatggaattatgtgtgttgtccttaaagcagagtgcttggcatatagtaggtatccaataaatgttggtatccaagaaatgttggcgattattcttaactgtgagcaatccaagagggcagtgatgccttcatagacagaatgtttttgtcccctcaaagttcattgttgaaacctaattcccactgtgatagtatttctaggtggggcctttgggaggtaattaggttatgtgggcggagccctcatgaatgagattagtacttacaaaagagaccccagagaggtcctttgccccttccaccatatgaggacacagctagaagactgccttttatgaaccaggaagcacacccttaccagacactgaatatgctggtgccttgatcttggacttcctggcctccaggactgtgagaaataaatttctgttgtttataagccacccagtctatggcatttaggtccaatagcccaaatgaactaggaaaccctcttaatctggggtcccccaaagcctgtcatagagtggcttcctattaggtgtggtgtttgttcactgaactgaaattcactggcctttttgtcatccagagagaagcctaaaatcctgtgaaagttcacaccacaggggagagcactggggctcaggaagccagggctgggatgagaacagttgctggtgggatccaaccctctcccctgctgggctctgggagtccacagccagggccagcagtacagtggactccttatgaggaaatgtcataacctcagcaccaagagggaacagatctgcatttttcccacattaggacgtcttgttaagaacgggttcttggccctgacagatatttgggatccaagggtgaccaggcctgtttaaaatctcttaaaggaaccctcacactccctctacccaatgcagccccatctccttcacagccgatctcaacagtctccatttcctacttccccatctcctaccagatctaatttgacttccacccagaccctccctgcctctgctcccgccaaggtccccaagagcctcctgtgactgtatctgagttcagtgccttggactcgcctcctgtctgtatcaccttgaccatcaggcctctgcagggcggagagagagacgaaccgggcttctgaagaatgcacattccatggcccgagtcctcctgaaaactctgagtgatgagcggaaaatgattcccgagggcaattattgcactaggtttgcacagcggtgcaaataagcacgaaaaaaggaagaatgtagcctgctatgggccaggccttttccaggccccttccatgggtttcctcatttaatactcacagcaaccctaagaggcagatactattatagcccatggttcatctcatgaggaaaccgaggcacagataggttaaattatgtgctcaagtctacagagtgagaaggtggagccagcacggggattcaagtaatctcagggcgaagtccagcccttaaccagaatcccatgtaacctttcaaggctggacacctgccctgggcaggccggcacagccctgcctttgtgtaatttagggccaatttacacagcactcaaaggaagcagtgtgagacagtctgtttgcaatgagactttgccactgtcctccctctcaccctaccccacttccaagaacactggtttccctttgtcagacacatccatggctggtttctaagctaagctgacctttctggaagtcattcatccagggacccaaaggcatctgggcaagaaggcaaatgttaattgtcctgcttggaagatgaggcagggaaggctgaggcttgagattatcaatgcccatagcagaatggacttcccaaggaggtggtgagcatccatctctggaggagggtcagcagggtctgcagcccaagaagagcggctgcagctcatgtctgaggttcctgcaggctctgtgaggctctgagtctgtctgcagcttgctggctgcttttgggcacttcattaacttctctgaatcttctgtttcctggtcagtaacccaagagtgttgaacaatagtccctagggtcagttactgctgataggtttagatattcacttccaagtcatccactgaagaagactaagtccctttggtgacacttgtaaggagacgcagtgtaaaccacaaatggtcagtgctggaaagacatggctatcgactgatgcagtcacatggctgacagatatgatggctgacgcccagaagagtaagggacatactgagggccacacagcagattcagcacactggggcctgaccaagaagagaggaggaaatggagaaatgagcagtccaatcagagggtcaaggctgagccctaaatactcctgagacgaaacgggagagatgtccaggcaggggcgaaagctggagctccagctggcttgcggcctgggctgtttctgtctgcccttgttactctgataccctcatgtggcgggagggcactgggttggcacggaggccatcagtcctggtccccatctgctgtgataagccacacccttggcgtcaggccttgtgggatagattggaacgctgccttcaagacattgtgggataaggtgagatcatggatgccagtgctctggtgacaggacgttatacaatggagtaagcgttacccgagaggtcacaaccccaccacagagtctattctcagagaagagactactgcataaaggccaggggcctgacacacacacccgtgagcaagcagagtgggcacggggacatatgggatggcctttagctctgtgcacacctccactgcaagtgctaggagcctgccccctcactcccaccacacacacacactcacccacacagaaacacattcactcacacctaaccagtcccccagtgagactgattcagcctcttcaatgtctctggatgctacagctttccctttatcaagctgacactacctggcttcaggcctcatggtcctccacccagagtagtggatcaacctcctctctggatccctgccatccacgctccagcctgcagccagagggaatttatgaaatgcaaactacacctctgatgggaagggcagagagagaatgaactgaggctgttcaaacccgagggtctggagcaggcccagctcctgcatggagtgcgtgggaactttgggcaacactgacagtgtcctcgccatcatcactgctgttactataatggccagcaataaatgatgaggggagggcaaccgcttaactccggtcacaccatttaatctctctctgtgactctctccatagcagtaaagcagaacccctggctacctggtagaataaagttgagggtggggagctggacatgggcagtgttgagtgctgtgtctggctgccccctccatcgatggccaagcttgttgctgccactgtcatcagcctttctgtaggtccagggtagtgtggacatctcccctgtaaactgtgagttcctggagagtgtttacctcctcggattctgttctggggcctggggtgcagcccagggcctaatgagagtctgggtttgctgagtgaacaatcggaggatcttggtctctggaccaggaccatgagtcctggtcactatcacagcagatggtgggcactatcatgtagggactggggaagttaagcacgctcactccagggccgtcctttcctcagtcaacaactgatgggcactcgctacatgctgagccctttcacatacattgccttaagcagtcttcgacaaggcccccagaggtacgtatcatcctttccatttccagcagtggagactgaggccctcagagattcagtaacttgttcaaggtcacactagtcaagctggtaagtggtacagccatgattccaaggcaaatcccctgagtcttcctctaacattcttttctctgcttagacagaccctataggcccagcctcctgtccctccctggtccacagcattctttagagcactcatgttggcaacagagtttggcagacccactgggattaattaatgacaggcctgtcttcagggtggccctggtggctatcgaggctgcttcatacctgttgattacataatccataaatatatttgacatctttaattggaatcaggcccccccaggtcctgaccacagttgagttatgagctccaaactccctgctggcagcactgagcttctgcctgaagtggggcccagggagaaggaatcaacttggggcgtgatgacatttctcaaggattaagaaaaagagaaaaatttgctgcttaagtttaaggatggagattgtccttaagctctgtggctgtagctcacctgccaattccatctcccctcctccagaaagcctttttgaccttctgaaccctgggctgctggacccatgtgacagggaaggaaagagagagagaatgaatgaagcctattcaaacctgacagtctggagcaggcctacctcctgcgtggagtgcttggtgaccttgggcaacactgacagtgtccttgccatcaccactgctgttactaaaatggccagcaataaatgactgacgaggggagggcaactgcttaactccttaactcatttaatctctctctgtgactctctctccatagcagtaaagcagagcccctggttacctgctgcctgcacccattttggttttgctgtagggcctttggactctcttgctagaaaactgggtaaggcacacaatttgccttacctgtcttgtctcctaaggcaggccaaggctttccccaacccaacacacataccagatgttgcagcaacaagataagactccctgctcccctggatacaaggttttcacctgttcctatatctgcaggggcagccaggccagcgcctgaatccctgaactgtcacacaacccacccctatcttctttcactcactctttcacttattcattcattgtcactgaatgcttaccacttgccaggctctctgggaggtgcaggaagaggcatggatggggagttacactgccgaggagctcctggtctagaggagcccacagcccggtgggaatcatgtcagcagagaagccaggggaggcacaagccagggactaatgagctcagcttggggaggggcaaggtggaggaaaggcaggttcccagagccaggggcaaccagttgagcagtctttctggacaggtcttgcaaggatgacccaaccttctccttttcttttctttttcttttttttttttttttgagacagagtctcgctctgtcatgcaatggtgtgatttcagctcactgcaacctctgcttcctggattcaaacagttctctgcctcagcttcctgagtagctgggattacaggcacctgccaccatgcctggctaatttttttgtatttttagtagagatggggtttcacgaccgtggccaggctggtcttgagctcccaacctcgtgatccacccgcctcagcctcccaaagtgctgggattacaggcatgaaccactgcgcctggccgaaaccaaccttctcctttgccttgtttgataacaaagctggctcctgtgaaaatttagacaaaaggtttgtagaaagtgccgggcacaatgtagctctttgattttagcttccctttctgagcttttccccatctagactctcatagagaatggtgatactggcagggtgcactagggtaaaaggcagaggctgcccacggttggaggccactgattcaggggctctggccacctcagagttcgtttgaccacccccagggctcaggggatcacattttggctcaccttgcctcagggcagtagactccatctgtccccaggctccctcctttgcctttcttattctgcctggtccctgctggggctataccctcccaggggggaggatactggtcctacagacatctgcctttcctctccctccagcaccagcctcggtggaaagcttccaggtgacatggtttggaagttcaaacttcaggaaagaaaaagcatgctctataacacaacaagtacgcagccaggactagattcagtccccagtgtgggcactcacttgggcaagtggcttacttctctgagcttcattttcctccctgcaatgcttctgaaatagctaattggatgattcattcctatggatgcgtctgccccattcagaaactgtttatggcagtgaacaaaactaactctctaatgtgtggagatttcattgtagcagaagagaggaattaacaagtggatacttggtgtgtagggtggtgataacccctgtggacaaacataaagcaaagtaagggaggtggcaggagctgttctgtttagtgtggccaaggacagcttcactgggatggggatgttggagctgagaactgaaggggctaagagagctgtcctggggagatctaaggaccattttagacagaggtagtgtcatgatgaaggagcatggcagctgcccgaaggacagcaagaggccagtgtggctgctgtatagtgaaagggggtggaggagggaggtgtgagatgaggtcagtggtgacagtaggggtggggtgattgtcaagcaggacctaaggccatcctgaagacccttttccttagagcaaggagggagccactggagggttttaagccgggggcataagacctgatttgcatgttaaaggctccctctgcctgtagagtggaggagaaaatgccagggtgcagggcagacgcagggaccctggtccagcggcttatgagagaaggggagaaagtgagcaggggtgttctggatgcagactgaaggtagagccaatagggtctgctgaccaactggacgtagggcgagagcaagaggagtcagcatgagccccgttgatctggcctgagcaactgtcggagtggagcaggcttgggagtaggggaagatttggagtttggtttagggtatgtgcattttgaagtgcctgctgaacaaccagacggagtgtcaggaaggaagtccaggatggagttatacatttgggagatgactttttaaaggaaggaagacagaagagaggtttatgggtagagaccttaatgtttagaggtcaggggcatgaggaggaaccagctggaacactgtgaaggagtggccagccaggcaagcagtgaagacagaggggtggcccgaaattcaagtaagaactgttttaagaagttgccaactcagtcaaagcctgctgacaacaggactcccttgcaggagaaggcagatgagtggggtgtggagcctgaaaagaagaggaaaccaaacatggggtagtttatcccctcccaagatgccaattcagaatagatctttttggaaatggaatggccagggctgtggagcctctctcgatgggcacccagccccaggcccgtaacatgtggaagaaagccccaatagaagctgactttagccctaactcctggaatgtctttgaaccccacaaggaaaagctggagctcggaagcaggtaatttcagccaagtgcactgtgtttgcttagagtttgggtgcagcaaccagttaattactcaagtaaatcatgtcaccgtcccctgcagccccagtgcaataacaccgtgctgaccacactttaaaaagtgatataagcctctgagtgcaagctaagaggttttataggccaccctttgaataggcctttttctcccggagcccacaagagtcgtgtgtgtccatgcctgcccagagttggggagggagggtggctcttgggggccaccttcttatacgaggtccatatgagttggggcccatccagggctggctggcagcccagcttggaggcgggagaagttcatcttttctgtgtcctctgatcacatcaatgtgatgtgtttctctcattgcccagatgccgttagccctccaactccaatccctatgatctcaatgaacatcttttgggccaggctctggcctgagtgcctgggactcaggtgtgctaaggtacagtgcttactctctggcaaacccaagagatgggcagacgctctgctccaagggtaaggcagaatgaactaaattcttcacaggagaaaaaagcataaagtgatgtgagtcccggagagggaatgatggattcaggaacatctgttgggcctacgaggataagatttcaacagacaggattcatggtaagagaattacaggcagtgaaagcagcatgagtaaaggtcaggaacttgggtaaattcttcaactggatattaacagaagctgagatcctttgacttagacactcagagtcagactctcaggtggcttgagtcacagactgatgggcccctgtaatgtaagaactgcagttctttgagcaagacagaagtacacctggtcacatccctcccccagggcaggagatcctccagcagtcaccaacaggtagcaccttccaagacaggtggagacagggtgaggattccatcctgtgcaggcatccacccagcatcactgtcccccgtccatcaatctccagacgctggtcaggtgcgtgctcgtgaccagctttggcccctgtgttccaatgactatgccttgccccttccacctccaagaaaagctcaccttcccacccctttttctgccacgttatggaaagagcatgtccgttagcatggtagtgattgataactggagatgatctcatttaggagcttggtctcaggtctaaccctaccctgacatattttacctccttaatccacactttctcttcttaatattaggataataacaacaaaaatagtgagtaattattttgctcttactaagtgtctggcactggggtaaaaccttgacagccatgatctttgctaattttcaaaacaatctatgctacaggcactattattctcctcttacatattaggagactgaggcacagagaggtaaagtaatttgcccacagtcacccagccagtaaatggtgaaactgggatatgaaccaaggaagtctgactttagagactgctattaatgacaatgagaagaaaaattataattataatcataataaactatctctcctcaggcatatgtgcagcaaattcattatagagtgggtgtttaaagtctgcttttaggggctttagatacaaggtatgtgaatatatgaccacagacaatgtggctgctgagagattatttttgtataataaggaatgtatttttataatctgaatagttacctcctaatgtgtttagtcctcattgaactgtgggcttcttaaaggaaatgaacacgttttattctatttgaaatccctagaacaatgcctggcacatagtaagtgcttagtaaatgcttgctgaatgaactgacacacacagtacgtttcctctttccagggctgacctgcatgctgggaaagtgaaagggtggaggaagtgtctctatcttcataaatttgcaaagggggtctgcgtgagtagccaggcttaaggacttcccatacctggctttatggcaatactttaatagctgctatgcaaagactgctagagcttctcaatgaagaagttaaaaaaagaaaagaaccagcatatagctaagatgtggttaatacattcagcatgcttccccctccagttaattaaaaaacttgattacaggaaagttgaagtggcttttctttccaagggaaatgcaccaacttctgaggaatgggaaagagggatgccaagagctgccccattgccatttccacctgctccaactgcccatctggctcatctgtgaaatgagctagacttactcctgggcagtgagaaggagctgatgtggtagaagtgatatgtgctcatccaagagccgaaggcctgagttcctagcctgtttctctaattctctgtatgaccatagctggggctgtgcctgtttgggtcttcatttcctcacctgtggaggggattgattgtgaccctcacgtctgaggtgctggggaggttgagtgagacagtgagagtgaggtacatgaaacatagaggccaggtctcagggaaggcaaggcatctggtcaattcagggaacaaaaggaaaaaaatccctgcaggggctcactgagtcctgtagacgaaacatctgggggacttactgtatttttcagtttgaaccactcttgagttggaacatggacaatgggtgaacatccatatagatcatccacctagactgggagtgattcacacctgtaacacattctggcttaacataatgcaggccaggttaagttaaaacatgcatacacacacacacacacacacacacacacacacacacacaaatgagggctgggtgccctctgaccctcagctcgatagctacctcctgggcagtgatctgcgggagataggagtgtccagatcaaaggatggagaggggtagatttatggtgtgcagggatcctcccaggtgtttcttctctgacctcctccccactggagcatctggagaggaggtgttggccttgggaaaggagaaagaataagggcttttcctggaaactgctccttcttgggggaacttggaggtggtcttgcacttggggaggctgggcctgccgccaaggtcttagctaaggttaaagaggacactacctcaactgaaaagctctgcagtgggtcattcctagccaggtaaaatggacttatcttccatggtgcgctgccacaccacccccttcacaggaaggactggtcgcctctatgttctgaaagcatgcaactccttttggagagttcttccatcttggaggaagggcccatattgattatcttcgtgtctccaatggccagcacagtggctggcatgggtcattatgcatggaaatatgtcgggttgcaatgaattgaatagttttgacattgttatgtcaactgacattgaatggtgccctctcactggactgatggggaaactgaggcccagagctggaaagtcaattgcacacagtggctgcaggagtcagcagcagatgcggaactgagctcagtattccctcacatctgctccagcgccctgcagcccttgcacatggatctgggcctcagaaaaaagctctccctctccatcctgccttaatccactcaactaggttgtgcacagcccagtcaagagggggaaatgtccacattaccaaaatcatacgaaagaaattatggatggaaaaatcattaccttataaatcggccgagctgttcagaacttgtaggaaacggcatataaaactcatatggcacgttagggctttgatagcgcctcattacagccctcagactccagtgaaaaatgtcctcacccagagggggctaattttcctttattaatgacatggggcggggctgacgccataaattccagctacctgagagccctgagcttgagacaaactcttctaagagacgtctctctccaggctaggctgctccaccccgttttactctgctgtatgcaaaggaagcaagactagagaagacagcctcccctgactcaaggaccccagcccctagactagagaaacacatggagagacagcaagatctttcttttctctatgagggccaaacccaaaatgttaagtaattcaggcacttaatagaaagtagagggctgagaaaagggggatacacatattacccccaattttaggtgtgatttctataatggaagttgtgtgcattctaccatctacattcctcacagccagtctgtgaccagggtgaggggtcagctatgaccaggatcagggctctggctgtgaccaagattacggctcaggctgtaaccaggatcagggctcaggctatcctgagtgggcagaactagaccctgctcacaggcccacaggggatttaagaatgtagtcacagtcatcatatcagaaaacactcaaccaaacctggaccctaaaagcaaacgtggcttccagcccatggttttgcctttgttacagatgcatgaacccccagagtgacacagcttagcatcttctagtttaaattctcagcttgcccatgacacaaacgaggaaactgagggctgcaaatattccctgaatgttgggttagtaacctggaagggcagggaaagtttgtccaggtcaccagacccccagccgaacacaatttcctagctgccttcacttgctccacagcaaaggaataatgggaaatcatggcctgtcaagtctggctgtatggttctaatccttgaccatgtgtccccaggagaaaagaaaagggagagtttgtctgtcttctcaggtagtcacatgtccttaaggatattaggctatcttccctatggacatggctccctgaaatgccagaggccttcatccctgtgggtccccatcggcaacccttcctgtctatatgtggctattaaaggcttcatgcacattgcctgatgtgagctctgcagcagcctttcagtctctggtacagctgagaaaataattgaggatcacagcagttaagtggctgataaggctgaattgtgtcctactccctcctaattcatatggtgaagctcccacccccaggacctcagaatgtgatgtatttggagatagggcctttacaaaggtaattaagtttaaatgaggccattagggtgggccctaatccaatctgactgttgcccttataaaaagaggtggattgggaaacacagagacaccagacatgtgtacaactggacaatcacgagaagaggcatccagaacactgccatctgtgaacgaaggaggaaggccccagaggaaaccaatgctggcagcaccttgaccttggactgtgcctccaggactgtgaggaagtacattcctgttgcttcggccacccagtctgtggttctttgttacggcagtctcagcagatgaatacagtggctcacctaagatttgccaaaataagacaggaaaatcttcccagtgctgaattcttccctactgtgagtgggcacctctcaaagccccagctagctagaatgtaagttctgagatggcagaagttgtgtctttacctctctgtctccatctggcattgggcattgtcagtctttgttgttttgtttgacctggtgtgagccggtgggattggctgctaagtgaggggatggggtgcgggagggaggacagggcaaacctggcccctgaaggccaacgtggctcccgcccaaggtttttgcttttgttaccactgtggtcagcaccctgccttacacaactgccttcctgctccatccccacccactgcagcccaaagtagaatcccctgatgggacatttggcttaacctggcatttcacaggcctgttccttccagaagaagctgcagccccagccagcactggcccacagactcacaggagaattgcaaaaccaaggcatgcaccccagatcaaattcccctgccttgggtcttcgagctacttgtttatacaaaagaaaatctatttcccaccctcagctgggaggtggctggaccacagacaatcctgtcactggggcctgcataggaggtgtggcttctagggagctttcccctagtcacaagtcctagaggatgctgtagacttctcacaggagctggcccagtccctctcagccaggacaggggcaaaggcctgaacacagagtcagtaaccaagaggacgtgtgatggaggactttctcacagtctgtgctatctcatgatggagtaggctgtcccaggcagagctgagctcaccaggaggagtatatgcaagctactgtcagaaactgaggaaaggcccctaacaccatatggaagcttggccaaaataatccgaaaggcctcttccaaccttgaaagagcaggggtctaagaatctagattcatgcattcaatgaacattcataggtgctctccaccctaagggcacattgcatggacactgcagagctagagctgagccttgacccttggtctcccacactccagcttgtgcccttccctccaggccaagccacctccccatcttggtgccccagtgcctgacttgggatttggcctggaccaaggggtgagtgagtgctgcctggcaccactaagaaggaagtgcagacgggagggagggaatgaatgaatcctgcaggtgggcccctgcccactctccgcctcctctggctcatgtcttctatatcagtggtccccaacctttttggcacctgggaccgatttcatggaagacaatttctccacagactcgggggttgggagatggtttagggattaaattgttccacttcagatcatcagaccttagattctcataaggagcacacaacctagatcacttgcatgcacagttcacaacagggttcatgctcctctgagaatctaatgccaccgctgatctgacaggaggcggagctcaggtggtaatgctcgctcacctgctcacctcctgctgtgtggcctggttcctaacaggctatggactggtaccagtccacagaccaggtggtggagacccctgttctatatgaatgttctacctgagaaggagggcagagtctgggctcactgaggactgactggtgacaggccccattctccttgtttcaggctgtcttggactctgctgcacactcatgactctccttcttcccaccccatgctccatggcccaccccagcccttcagaactaaagcagctcatcagcacataaaatataacaaattataaataatcaaaatgggaaaccagccttttaaatatcaaggcctcttgggataataactatgtcccccaacctaaggagagtcacaagaatgtatgtgaacctgcggggtggtgtgtgtagtcacagagtgggacatgggtgaggaaaaagagggaggaagggagggagagagggaaagagattgatttttgacattatgctcagtaagaaatttagatcttcttttgagttatactggagctgaagaaatgtcagagagttttgtagagtcagaagtttctgctccaagtccttctctgtcatttgctcggacaagtgatattcagtgtcccaagccacaatgggagtgacaatccccacttcccagggccactgtgagaattagttgagtgtgtgtgtacatatcccacagaggctgacctactaagtactagacatgagcaaatcgcaccacatgcatcactgtcctgggccttcccattggttctgtgagcattatcattttattggcgaggaaccctaggcttagagaaattgcggaaatagctcaatataactcagctaatatgtgccagaggtgggatttgaacccagactgtctggctacagaatttgtgctcttaatcaatgtgattcacaaagtaggctcttgacaaatgtctatgaaatgacaaaagggcaacccaaaggcagagtgagcaaaagcaagggaggctagcaagagtcattctagagctctgtgctaagggaaaggaaaacagaaagctagaaactgtccaaagaataaccccaaacccaaacacccaccagccaccgccatgggccctgggggactaggctcccgagaaacctccggggctctggaatgagagctgggcccagactgcggcctgagatagacgaggccaggcggaggtttggggcagagtcccttggtaaggcgtgcggagctcctggccccatggagccacacacataaggattctaaggcagcctttgttgctgttggaggctaggaattccaggccaaagtaatctaaccgaccatgaacagaattaaatttctgcctcccccacttcctgacccactatgggattcattttcacgatcccctttcaatgatgtgagcccgtttcagagagctggaagcaggccccatgtggctgcgcaacgccaagaatctgagccttccctgcagcccaccagggccaccattgctggtcacgtctggccagaactctccgggaatgtcagctctcagcaggaccagcagactctcaaagcacgctgtgattgcccgagctccctctgagcctatccatttctgctgtgttccaggcactggttacatactatttcaataatcccagaggaggaggtaccattgttatccccattctgcagatgaagaaatggggtgggtggtggtggtgctgctgaggttaagttattcatccaagctcattttcccaagtgtcttcgactgaagaactcttaacaaccataatacctgccccaaagttgagtatttcaaagtatatatatatttttggtcatctttaaaacagggcgatggtgactaatacctctttgaaggcccagctgagttctcatattctctttgattgggtttaagagtttcacttccacggctccccaaaggcagccagggctggtggggcaggtaaaggggggtgggtgggaaagcctccccaacatcctggaagcatgcctagcagagaaaagccttttctaatgaatgttggctaagcagagtggccactgagcaaataccctgaacgggggcttggttgatgctagggccgagggccactcactgggagatggtcaagctggggaatgtcaagatctgggagttgagcaaacacatatccctgggactccacattcctcagtctgcagcctggggcccaaacccaccaacgcaccccggcattgtctagcagtggcccgaattagccaaggggcaagatcaatatttgctggtacatattgggtcccacctccggcagcatctgtgtttggacagtgctgcctcccactgcccagaatcttttcccaaacgcactctgggcccagcaggtctccacagggtggtggtcactgaacttggaggctgagggttggggataactctggtgggatttctcatcatgtctgacctcaaacctttccacatatttcagaaccaggaaagtcacgcaggaaagagtctaaaaggatctctgggagcctagctcagggactgtgtggagaccatgatggttaatatgggttatcctgggagaagtcatctttgattcctcccctaccatccactcacccatccatccatccacctatccacccatccaatatttattagattttgaatagctctgtcaatctgtcttcttctcagctgtcactggccctacacaagcttaagcccctctggcctagaaaaccataacaagacttctaactggggtctctgtttcccacctcttactctgcaattattctccaagtcgtagctagagtggactttctaaaccacaaatatgatcacatctctccctgtttaaaccttgcaatggctcccactgcctgcagcagcaagcaagcctagctccttagatggcttacagagagactataatgatttcattactgtttccttctcccactagcctcattctggcctatctcccacaattcatatgacataatagttacaagcagagctttggggtcagaaagacatgggtttcaactctgctacttactagctatgtcattttgggcaggccacttcaatttctgaacctctgtaaaatggggacggtctcctgggtttgaaactaggaaaatatatgtcagattcttagcacaatgcctactgtctagagttggcagggtcagtcatgctacctcttgggaaggggttactaggaaaggttgtgaatgacttaccctcctttggcctctctcatgaggctgttgcagcccctgttctcttccttcagctgatctccagagtctggttctgttttgatcagggaaggaaggtattgcagatgatgcttcaggcgtctgaattaaggcttttttcctttgaggtcacataatcaagatgtaactggagcacaaatgttttatccaatcaatgaaactaaatcactttgctaattgcctggaataagtcatagtcctctgtgatttgatggtgagggtctcaaaacagagtgtagggtgccacaagccactttagcaagtaataatgacactaacgaagtgctttagaccctgctagggaagtgacctcgcaatttgcatttttttacatttagagcaagtaaagctgaaagagggaaagtagttcaccaaaggtcacagataggcagtaacagaggtagaattcaaggtcaggctctgcccctgagcttgtttgcattttgtttggtgtttgtttattgaagtttgtagtattttatttaaaaaggcagcttgtataggtggtgagaggtaggggagagagtatgcctttggagtcacatgtaaaaaagtttggagctcacatttttcaagtgaatagctgtgtgatgtagggcaagctgcttaccacctctgagcctatttcctcatttgtgaaatgagggtaataggccttcttgggatcatcagcagatatgatataaaatggctcagagtaccttggcactgagctgaaacttcagaggcccttagactgtggttcatgtgggtttttgaataagactgggttttgtttaaacctttttatttaaaatgaaatatttcaaaagaagagtacagagaaatcgaataaatatctatgtatttgctactgagagttaacacacattgatcttccaatatatttgtttcccatattttttaaaatattgatcttctactatatttgtttcacatgttttttaaaaacaaaatgtatagaatcataagttccctttcctctccttaatcccagtcccttctcttgtcctccagaggcaatcacttctgaggctggagtgtatccttgtctgcatttttactcttctattacatgcacatatgtgcataaacagtatgggatatcgttctgtttttaaatttgcataagtagaagactgcacatattgttctgatttgcctttttaaccggatattatctaagtaagatttacccatgttgacacgcataggtcatccattctgacagctgtctagtatttcactctgtgaacatagtatgattcgtttatccatttgtccactgctatggatggaatgcttgtgttctcccaaacttcctatgctgaaatgtgatggtaattggagatgggggctttgggaggtaatcaggtcatgaaggtggagccctcattagtgcccttacagggaaagacacagagggcttacttcctctctctttccactttgtgagggcacactagaagacagccatctgcaaaccagaagagggcccgcatcagaacttgaccatgctaacaccctgatacggaacttgccagcttccagaactaagagaaatcaatatctgttatttaagctatccagttggtgatattatgttatagcagccttagtggatgagggcgcttgcagatgaaaaatgccccagaccctggcccctagtttttcactgtgctgtcatgaagaagagagatgtgaggagaggagaaaccattttccctggaaggatggacaagccactttctaagcatgagattggactcaaagaaaggcccctgaaatgctgttcagcctggatgagtggcacagagatagctccctttctgcccaccatgtaagcggggtctgcgggcaggacccctgcctgcttccaggcaccccttccacacacactgtggagtgcttcctgaccctactttgggatctctctgcctcccttgccatggatcctgctctaccctctgctgtcctactgctgccatggtgcttggcacacagtatgtgctcagtaaatattagtgagtgaacgcatgagagtgtgaagtgaaaatgaatgtgtgtgtgaataatgaaagggctgggtggatgaatgcagttagttcttggatttaggatatgtttgggcttagaataccatctccctcaactttgaaaaggcattttgaggtgggctgagagtcccagtccctgattctaggaccagctttgccatcgtaggacacagcatggtgcttagagaggctcagagtttttccagtcatgatgtcctgatggtctaagtggaccacttcactccaaccatgcacccaccctcaagctctggttacacactgtccacacacagcctctcatttttcaagagcacagtctgggatgaattccttgctcaccacctatgctaaaagagatttattactcccacaaactctttttatcccactccttctcagagactttgatagatctttatcttgataaatgatgaggcctgggccccgcaggcagagagagaggtgagtggtaagatgtgagcctggaaaggaaaaggaaaaggaaaacgtactagaggctgtcagccattgatgtgcaggagaagctgtcactcagagctcctccacagccagctgagaatagctgaataggaggttttttgacagtttcagcaatggtccaacaacttgccaggtgaccgcagtagcactgccttcggtccttgagcctgttgggagatggcctttgcagccaagcaaactgtggcctctgttcacctttatgttttggagttgaccatcataaaggcactttctgcatccaagtgggcagtcttggtgcattgcaaggattttcctgaagtggcttccccttccctcagcccctgggcctttagtaggtgctccctaatcagggaaaccctagtatcctggaccctcccccttcctgaagccactcccagagcttgctgcctgagctctcatcttcttagcctgcagacttggcaggtgctcctgtttaggcacaatgagccgggccagccaccgttgctgcattagccctgccccaccgtgtgcctacctagcaaccttctatgcctccttccaggcacagaaccatagacttctccttggggaagccttccctgatcccgtgagcaagggggttaaggcccccttctcagtacctacctctgggtgtccctctgaattcctcctgactgctgtgcccgaggtctgtctgttcacttgtctgtcctttcagctgacctcctagggcagcattctgatcaacatcagtttcccagggccctgcccaggctgggcacagagaaggcctccaagaataatgaaagagtgagggagtgaaggaactctccccagatcccacccctacttctaggtggtctactccctggatgtagccactggcccttgcttctcttagcatcattttgacacacagtaagtcctcattgaggagtaactgctaataatgtctgtgtgcaaggactgtgccaagcattttgtatcttagttaatacggtacccaccccccaccccttatccacagtttcactttccatggtttcagttacttgcagacaggtgagtacacacaataaaatattttgagagagatagatagagatcccatttgcataacttttattaaagtatattgttataatggttctattgtatgattagttattattgttaatctcactgtgctgaatttataaatcaaactttatcatacgtacgcattggaagaaacagcatatacagggtttgctactatctgcggtttcaggcatcctccgacaaggggcaactacaatagtcattcattctttattttactttattttattttattttattttattttattttattttattttattttattttattttattttatttttttgagacagggtcttgctccatcacccaggctggtgtgcagtggtgcaatcacagctcactgcaacctcaaaatcttgggttcaagcaatccttccgcctcagcctcttgagtagctgggactacaggcatgtgccaccatgactggctaattttaaaatttttttgtagaaacagggtcttgctatgttgcccaggctgatctcaaactcctggcctcaagtgatcctcacccctcggcctcccgaaatgttgggattacaggggtaaaccaccacacctagccacactatattcttaatagccttacaaagtgaaatttattaatccagtgtcagataatgacagtaagcctcagcaaagggaagtgacttccaagtttcccacagcttacaagtacagtcaggattcaaacatgactgccttatccccaaagccatgtgctttaactctgcctcatcctgaatggtggtaggcagccagtgttgctgtctcttccagaagcctgccagacaagaagaggcctttgccctgctagagtggctaagcctgcagatgcctctagagaaaggtcctcaggatggcggcctggtggactagtgggataactgggcacagcagagagctcctttctgggcatgggaaccatggtggcttagtcaaggtgggcaaacctgtctgctccttaaatcaaatccagccacagttaccacccctcctcactcacatacacatactcgcaggctggtctttgagcctgcttaggggtggtctttgcaaccaagcaagctgtggtctttgctcagctggcaaggaacagaggggtacttgctgagagttatcattttctgggacacaaagctgcccctcttgaggctggcatggtgcttcattccagcagactgaagctttgcagccctgacccttttgtttcccccatccttcctttctttttcctgccctctctaacccatctggcctgctcctcccaccgcctttgctgtggtctggtggttacccacagccagccagcctcacactggctgggaaacggatagggctaaccaggtactcacctggcctttgtggttcatctgagctccagttggaccccagccctgtactcagaatcagccccacagccctgtccaccccacaccctccttttatacttcttcccaacaactgtgtgtgaggatagtctcatgtagcccctgggcattacctgccttagttttgacttgtagagctctggccacagaattcagaagtctttctgcagcagcccctttctggcctgaccctggagtttggggaggtttgtgcatgcaccagcaggcatgtggccagagcatgccttagctgctgctcatcgtggtggaagaagcagtgatcacatctcctggctcagagtggcccccacttccccaccatctccacctgcccaaatcagaccaatctgacaagtgtctgtccagcttctcccttgaggatgaagtccttagcaccttccagccttggcacctctatcacagggctgacgtcattctattttgtataataatgatcactcctcacatcgacaactcttcacggttaaccaaaccctcagattcatgagctcacttagcccttactacaacctggttagtcctgttgacagatgtgaaatgaagctcagggaggtgacgtatcttgcccagggtcacccaactggagatgcagtggaaccagggtgtgaatctgcttggtcagactgcactaccttgtgtgcctcccaggtgctagacagtgcaggtaccagggctgtgatggcggacagggcagtcactggcccttgatgtcctgaggctttcattcctggagaactaaatgctggttgatctaaaccgactcaaatcaccacctgcactccttcattcctgctgtttccctctcttaaaactctccttcaaattcctgaaggctcagctgaaggctgctttctcctataagtctttcccacctagttgttactaaacacttgccctcttccaagctaccacagctgcacaagctcaccctgatggtgtgcagccattactgtgacctatgtgagttgggtctacctgaacatctctgtctcctccttctctttgtctcttaatgagtgtctcctggcataggactgtacactcagaaaacatgcctcacagaccacccaggggcttgagtctgcttgagaaatggtcccaggtgccaaatccctgttacaaatgacatagggacctgggtgagtcctggattcctgaatgacttttctcctctgggccccagcatcttattagtaaaatgaggctgtgctatggtttgaatgtggtttgtctttgccgaaattcatgttgaagtttaattgccagtgtggcagtattgggaggtgggcctagtcagaagtgttttggtcatggggggtctctcaagaatagcttggtgccattctacagtaatgagttcttgctctcatgggttgttataatgcaaggttcctcctcccatttggttccttttgcacatgcctgctcctgttctgtctgccatattatgatgtagtatgaaagcccttgctagaagccagcaccatgtccttcaactccccagcctgcaaaatcgtaagccaaataagcctcttttctttataaatgacctagtctcaaatatcctgtctaagcaacatgaaatggactaagacagggtctcatagaccaatggaatgttagccttggtgatcatctcttccaattctcttgtgctacaggggaggagatgaaaaccagagatgtttactggttcccagaagaaccaggactacatctggtctggcttaggtgacctcaataatcccttttaggtttaaattatttgattatctatagcagtggttctcaaactggggataattttgctatttcccatcccgaggagacattcagcaacacctagaaggcatttttggttgcacaaatggtggtggtgggggtggcgggggtatgttattggcatctaatgagtagaggccgggaatgttgtaaaacgtcctacaatatacatgacagcaccccccaccctgcaacaatgattatccttcctaaaatgtcaataatgagaggacagagataattaacatcagaaataaaggagggtacttcctacagattccatggacattaaatggaaaataataagacacaacttgataacctagataaaatgggccaactccttgaaagacccacaatctgccaaaactcacacaagaagaaacagacaatctgaataggcccatttctactaaagaaattggatcgataattaagaatcttccaaaacaaaaagcaccaggccctgatggattcactagtgaattctgccaaacatttaggaaagagattataccaagtctctaaacctccttcagaacacagaagcagggggatatttcctaactcattctgtgaggcctaacctcagccaacctcaaaccagacaaagacattacaggaaaagaaggttacagaccaatatttttcatgaatataggtataaaaatcctcagcaaaagattagcaaattgaatccaataatgtataaaaagaattacataccacaaccaagtgggatttatctcaggtatgcaaagctggttcaatattaaaaaatcaattaacataattcatcaaatcagcaggttaaagaagaaaatacatgtaaaaaaagtattagacaaaatccaacacccattcatgatccaagctctcagtaagtaggaatagaggggaactctgtcaagttgataaataataactacagaaaacctacagttaacatcacacttaatgctaagaaactcgaagctttctcacaaagatcaggaacaaagcaaggatgtcctgtcttataattccttttcaacaccgtactggaagtcctagctaatgtaattaagaaaatgaaataaaatatatacttattgagaaggaagaaatacatcttttttcacagatgacatgattatctacgtagaaaatctgaaagaattgtcaaaaaactcctggaactaataaacaattataacaagtttgcaggatacaagattaatacacaaaagtcagtatatttcctatttaccagcaataatgatgatgaacaagatgaatgtgaaattaaaaacacaataccatttacattaacaccaaaaatatgaaatgctaggtataaatctaacaaaatatgcacaagatatatatgagaaaaactacaaaactcttatgaaatataagaactaaataaatggagagatattccatgttcatagataggaagacaatattttcaagatgtcaggtcttcccaactcaatctacatattcaacacaatcctaatcaaaatcccaccaagttattttgtgtctatcaacaaactgattctaaagtttatatggagaggcaaaagactggatagtgaacacaatattaaaggagaagaacaaagttaaaggaatgacagtactcaattcaagacttattataaagctataatcatcaagacagtgtggtgttggtgaaagaaaagacaaatagatcaaatgcaacagaaaagggtgcccagaaatagactcacataaatgtagtcaactaatctttgacacaggcactatggctgccttttcaacaaatagtgcttgaacaaatggtcattcacatgtaaaataatgaatctaggcacagaccttacactcttcacaaaaattaagacaaaatgaatcacagccctaaatgtaaaacacgaaactatgaaactcctagaaggtaacatagaagaaaatctagatggctttcagtttggtggtgactttttagataggacaccaaagcatgatccatgaaagaaagaattgataagctggactttattaaaataaaaaatctgctctgtgaaggatactgccaagagaatgaaaagataagctcagattgggagaaaatatttgcaaaagactgataaatataaatatatatatatatataggataactggataattggatatatcctatataattttatatatatatatatatatataatctcttaaaactcaacaataagaaaacaacctgattaaaagatgggccaaagaccttaatagactactcaccaaagaatgtacagatgacaagtaagtatataaaaagatgctccacatcctatgtcatcaggcaaatgcaaattaaaatgacaatgagataccactcaactatcagaagggcaaaaatccagaacactgatagtgcccagtgctggagaggatgtggtgcaacaggaactctcatacattgctgatgggaagcaaaatggtacagccactttggaagatggttaggtcttacaaaattaaacacactcttaccatgtgatccagcaatcatactccttggtacttacccaaaaatttgaaaacttatgtccatacaaaaacctgtacacagacatttataacagctttgttcataattgacggaacttggaagcaaccatgatgtccgtcagtagattaatggataaataaactacagtacatctagccaatggactattacacagcactaaaacgaaattggccatcaagccatgaaaagacataatggaaactgaaatgcattattactaagtgaaagaagccaatctggaaagattagttactatataattccaactatatgacattctggaaaacgcaacaaaactatggaaacaataaaaagatcagtagtggccaggtgttgtggggagggaggaattaataggtggagcatagataatttttagggcaatgaaataatctgtatgatactataatggtagacacatgtccaccatttgtccaaacccacagaatgtacaccaccaagagggaaccctaatgtagtcactaatctttggactttgggtgatgtgtcaatgagcttaatcagttgtaatgatggacacatgtccatcattggtggacacgtgtcaatgaaggtttgtcagttgtaacaaatgaaccaccctggtgggagatttataataggggatgctgtgcacatgttgggcagcggttgtatgagaactccgtaacttcctctcaatgttgttgtaaacctaaaactgctctaaaaaaaaaaaagtcttacaaaaaggtcaatagtgttgagaaactttagtctacactaaggaaaattactcagttttctcaaaaattcattcttgtgatatctgtggccttttccagagtgatctgaagtagccttagtttgcttcttaggaacagatggtgcctcactgggttttcctcttgagttaacttttccttcttctgcatcaggcttcctgggagcctcttccaaatccacatggctgcctgatgacatgctgaggggcctaggtggggacactgctcctgctgtgggtggtagtggggagggggccctactgcctgaaaactagtcatctgcctggaatccctgcctttctcatttctctctgtgcgttgggtggacgatcagggctcagttaccccaacagcacccaggtttctccttttttgtcaaatagccactcctaaaccctgccctggatgagtagagcccctgactgccctctgccctaggcacaccaccactggctggacacctggccttggcttctgcagctctcagatcatgggggttggggtggggtggggtggggtaatctcccagggaggcagatgggactctgcagaaaacctgactgctggcgggaaaggaggttacaagtgggtcctccccaagaactgggcatgaggcctagcaatctgctcccttcttttgagcaacacttctttgggaggtcattgcccatttctgccttcagcatcacagtagggcccaggcctcctctccgcttgcagctgggaccaggaagccaggagcaggaaacaaggcctcgtttccttctggttggtggtgtcttacccccaccattccttcctctgcttgctacttctattttacaagctgacccaaaggccccacctctcgcagtactgatttatagggactgaacttccacccaaacactgggatatggggcctgctggtggatgctttacctgaccaactaatgcttctgaccaagtttcactgaaggttgaacagttacatggaattttgttagacatctgtggttcatttttatggaaaataatgcagtttcatagcatgggcacttgtcccagggttcaggaaatatggtttgtggaaatacaaaagaaaagttaaggcactggattctctgcccagctccagagaggttctcatcctctttctgagcctgttttctcactttaaaataaagggtttagacctgcaggtttctaatgatcctctggccttgcatcctaggcgcttgtcacatccttccaatggtgatgataattcacaccagactacggctcttagtcaaacatgcagacaagtgagagtggcagacacttccaggaggcagaaggatgttaccatgcactcagtgggtttgaaatcagttgagcctgggttcccatctcaactttccacttattctctgttgcccagacaggcttctccattcctctgtgcttcagtctcttcatctataaagggagagactcaggactgctttaaggattaaagtctgaacataaggctctagtagagtgcatgagtaagtactttgactcttgttaatcatcatcacaggccaaagagcgcatttgcactgccactgtattctgctctgtgcgcaagcaggaaggtgagccctgtccatgtgcttggcaacccccagtctggaaggaaatcagcctcggcatataaaacatcaggaacaagcaggaacgagcagacccaggctctaaagtcgatgtccgaggggctctgtcccttggaagtcatagtccagggaggcagacacaggaccagtatctcagttcagggctggctaagacagtcaagagcaaaaagcaaatttctgtattaaaagggagcctttaattcctggaagatcagagaaggctcaagagatataatttgactttaggcatcttgaccatttctctacaccctaccctttttcagagggtcactgtgaggccacagggaagcccctcctgactgcttcccatgctgtgagagggaagacactggctcagtttccttgatgcttctgaaccactgagtgcccagccagggcagcgctccctgtttgccaaccctactatcaccagcacaaacttcccaaacccttcctagtctaggagagtcctggaaaattcccaaggcatgcgctggaatgagggtgaaggataagccagaggaggccccttggctgtgttcctcctatgatgtataacttggcagtgcctgtgatgcaatccaatggttgtgctcccccttggacccctctccatcccactgggcctgtccaagcctgttattccctgactttctaacaaacacccaaatgaaggcaggctgaaaggccttgggcgccccaaggtctagaaatgagctactaatggatttcaaaggcccagatttgattgcaaagctgcaaccagctagacctccattctcaggccctgtcacagccaatctgccccttacctgctggtaggaggaggccgccctacactcagctatacaaacttcacagccacccgcctgtctcctgcaaggaagtgaaatgtgtaatgacaactgcgtttacagtgctgccctggattgtggacccagatgctctgaaatcactcttggctgtcatgtttgcagtggcacatctgcttacacatgagaaaacatggactttagccaagagggaaggcaaaaatgttggttcttttctagcttgtaccaacatccgggcttccatatctatatctttttctacaaagtggggaaaaaaatggtgtggcatcaggatgtgaaactaggagctggtggtggtaggaagggaggaaactgataaaaatgcaacaaagtgtgggctgcacgtgctgcttcctcgtgggtgacttgagtcaagttagccagcttgtctgagcttcagaaggggctgctaggaggattaaatacgataatgtttgcaaagtacttagcattacatgcgctggcttccttccatttttctggaaggaaggtgagaaggacagagggagtgaagaaagaaaatggtgatcccttccaaggacaggcaaacatgcccaatggacatcagaagtgtaaaattgtgtttttgcagctccagagtaactttcttgtgacatttggggttttaatggattccagaaacctgaaagtttctctgcagtcagaacaggatgtttaactttcgtcctttatgagaaaaaaaaatgatgcactcactaatctcttcattcactggaaatacgtgggaaacaatgagaaatgggctcaaaaaagcaaacatgaaatgtgctattttaaaatactagcaaccaacagagtgttgcaaaatgtggctggaatcaataacaaaacttttggagatgaatcattgaaatcgatgctttatcaggggtaaaatgcttgggaagctccaattttggaggcctgaaatggagtttggacttcctttattacctcgagggcaggaagaggagatccatttgtttgaaaggggtaggaggtgaacctgattgctgaaaaaacaccgtctccttgtttgtttctcttgaattcctacctaatgtgaaatgaggaaaagggaactattttacagaaaacctcaatgtggagcaactcagaagtcccaaagcaccattcgcatttggtgtctagagggacaggatcattcttcaatttaaaatgacatgaattcctgaactacatgctttatgaagccaaggcctgtgctgactttggatatcactattcccagagcctaatctagcatctgacatatggctggtaaacacttttcagtgaagaaagaaaggacagaaggaagacagcaaaggaggaaggaaggacagaaggaagagagaatgaggtcatggttgggactctgtagactctaaagcggggtccccaatcctgggtcatggactggtacatgtccatggcctgcgaggaactgggccacacagcaggaggtgagcagtgggcaagtgagcgagcattaccgcctgagcttcgcctcctgtcctatcagcagtctcattagattctcataggagcaggaaccctattgtgaactgcacatgtgagggatctaggctgcatgctccttaggagaatctaatgcctgatgatctgaggtgaaacaatttcatcactaaaccatcccctccaccctcctcaccctagactgtggaaaaattatcttccaccaaactggtccctggtgccaaaaaggttgggaaccactgctctaaagcacggtccagactagggggacatcactctactcaagcgcaatctgcctagaaacataaaggaattttgaactgtagacttcatcttccccagctgggcaagtgtccacagtcatttttgtaaaaactgagatattcatttgttggtaaactggagactcttcatcccaacagtcccttcttgggtcctcactctggactctgcccatgagcatcacgcagcagttagagaaaggtttgatgcctctgggaagattcccctaattggtccccttcttctttcctccctccctccttcccccaaatgaattatgctcatcctctacctgtgcttcccccataagaattccatgtcatggaattgtctcttgaagtattcatttctcccaccttgagggtaggaactgtcttacacatattccattcatacacatacatgtatacatatatacaaaaccattcatattaggttggttctcaataaaattttactaaataaatggacagacattgctgattagcaggaaaaagaaaaggaaaagtctcaagacttgttgaacctaagacaaataaaaatattttctgatttccagcaataggtctgcaatgtgctggaaagtaaactcattgtaaccaccaaatcagtcagcaacaacaggtgtgatcaccgatttaagcaaacatgcgccacggtggtccgcaaaagaagatgatgctgtgatggcatgtgtcctctccaaagggcaccctgttttccattctggatatctgcagtctcccaggttcagagattcagcatggggaggtaaggactggttcgccaagtcttggggctgtggagttgaccagttcttggccagggttacttcttcttcatcaagggagagggcagagagaaggcaggaaaagaaggcttgaagaacctatttctgaggctcaatggccatcagatagcgctcaaaatcgcattgcctttgagcacaggagagctgaatcagaaacacatggcacattccctcccaatcacatgcggtttgggaaatcaaggcaaatcaaaagcaaagaacatttggaagccacggaggcagctggggctgggtcccagcagttgtgctatggaaggggtatgagggtggtggagggggagattctctgcagacctaacccatcagaccaacaagaaagtgggagcccctgggtatcagtcaggatccaatcagggaaccacacagtaatttgagcacacctagcgtcccaagagctggactgaagatccccatttcttaccttgaataatgattgcctttgcctacctggcaaggaaacctgcagctaaagatttaaaatttcaccaatcaatatgttatctggtatttcttgtactcccatcccacctgtaactgcaagggagaagcaggccttcatctcagagtggaagtagagatgggggttagggaggggagcctggagatcagtggatagatcactccccattagagatgcagacctgaacccagctctgatgacgataaacaacactgtatgatgatgttcttgcattacacagagaaaactgatgggaattctgtgttgctggtagctgcagaacagtttacacctatgaagcacttccacaactagctggaggctcacagccttacctcatcttcctcaatttcctacaccccttccccctagcctcaatcagaatgaatccctctcccaggcacccacctatgtctgtctgtgtctttatgatggcacttgtcaccatgcatcaggattactcatgcgcacgtcccctcctgttttccagcacacacggaaggaaggaaacatgcattgcccacatcacctgcctcaggccttgtgcttgtgttagtgacacaaaaatgaatcagttgtacttcctaacctcaaatggctcagggtctagtgtgggacacagacatgggaggaggtacatcacaagccagcatgacctacgttaaatgggaacaaagtgcagcaggaagcctgactgggatgtgatgcactcttaaacttagtgtgtcagggaggatgggtcagtttgagctgaatcttgaaggacaatgggattgtctaggcagatcagaccaggaagggcatttaggcagggagaacagcatatgaagaatgtggaggcactgaattttataaagcatcaggactgcagggagacattcctttgggttagagcatacagcataaaaataatcataatcagggtaataatgatagctacacctacatcttttcttgttttctatatgccagactattctaagtgctttacatgtgttgactcttcttaatcttcacaaacaagcctatgaggtagataatattattcccattttacagttaaggaaactgaggcacagtcacttgcccaagtagtaaggggctgagagttatgagagttacagggtggaagctagagaggtgggcaggagcaggagaatgtgcttgggtgaactgcaaaggacccaggaaaccccagcatacgccgtcagtgtggcccctcccagatcctcccctgccctcaatccctgcagtaaccagaaccagacctggattagggtttgaaatctgacaggaggcaagttggctcagagccagcaaggaaattcattcactttcaaaaacaaaccagcccccacagccaccccgccacacgtacacactgcatgcctactgaacagaatgacttggagccctgaatgaaccgccctgaatggccgcccagggagtggaaccattttcatcctctgtgggctggttcctgcaaggctcatacctgccgctcacacactcagagccagagatggtcgggacaggtgggaagatgtgttggagggagctaaccctgcccacttcacaggtagggaaagcgaagccctgagaaggcagtggttcccagtgagctggttagaggcagagcctgcttaaggatcctggtgctctgacctccattccagtgctctgtcttttcatcgctcatccatttcctcctggcccccccaggaagtgactagctctctacaccagcaacatggggatcttggtacaaacaatggccaaatggcctctgcagtgatcagggacttctccaaggaaggagaaggaccaagggggccaacaggtgcctgtgcgtcagtgcactggtgcactcccaagggatatctgggatatgagtcatcttgcatctgctctggggaacaagagtctattaatgagccattgaactctgggctcctgcaaggcagggcagttccatgttcaggatggaccaggtgtgtgatgtgtcggtctgatgcaccttgggaggacagcagcatgcagggtcatggcagcactagtcccatcctctctggggaccctatgtctgtgggctcaggcctgttttgcatctacagtctaattcactccagtccctctggacctgtgtctggcctcccaggataacattccactccctttctgggtcatggctcaggcttgcaagtctggctgttgtggtttcagatgaccttgagcaggctgcttgtattccttaacctcatagacctcactggctgccactctccctgccacctccgggagactgaaaagaattaatgaatggaggaatggatggatggatgaagaggtaaatgccaggccccacaaggaacaggggcagcaacagagctagcagcctggggtcccaactcccagcccaagtattgcctttacctctctggcttcaactccccatgtgcatgtggggaggcagctgagcagaagtgggtgggcagctggtatagatggtgagagaatgaagatggagtgagggagaagtaaggccaaggaagagtcagagaaggactgagatgtctactaagaagctgtcccatgagaacaatccttatacgttatttaccttatcttggggagaatctggctccctggagggatagggagtcccttgagaagactgggttggtggggaaggtccagggagtggggggaaggctgggagtttgacctgggcatggctgctacctgtggggccctcagggctcctgtgcctgacagacaatgatgtctcctatctttgtcctttggggctgctataatgaaatactatagactgagaaatttataaacaataggatttatttctcactgttctggaggctgggaagtttagatcaaagtgccggcagattcagtgcctggtggggcccacttcctgcaatcatagatggtgccttcttgccatgtcctcactggtggaaggggctagctagctctagggggtagctttaatccgatcattaatcattaacaaaattaatcattaacagcattaatcctatcgtgagggcagagccctcatgacctaattgcctcccaaaggccccaccctaataccatcaccttgaaggtcaagatttcaacatgtgaattttggggggatagaaacatctggaccatagcacctcccatgcttagagcccagaacctgagtgagggatgaagctggtgtgtggctcacccaagtaccagtaagggagcttttccaaagtgtccacaatgttgatgtcaggtagtctttatttgcctctctttaccaaatttatggggtggatatatccatttctggctcactgtctaaagagctccaaacatacactctttacaagcaaaagtcagcaggggcagcagacagcatgtggctggggcgagggcgtgtgctacacagagcaagctcacaggaccaggacaacgagggaagcagggtgttggctgcatcatcttccagatgtgtctacaccagcagattttcctgtctagaccatgcgactgattttccactcccagtggagaaggtctgaacacgtgtcaagccatgcacggtcttggtggccctgtgaagcctgagagaggaccacaccaagaatctattgtgtgccaggccctggggactagaacattgtccagcacattattttactatgtcagaatctgcatgaattaatacaaaggactaaacaccaagagtcggtttgggagtcattctgacactatataaagtaggtgtttgctttttttctctccttttaagacaaaacactggctttctgtgtaagaacatgggttatgagaggacacagatgctaggagaaaaatgtgtgactggagaacttgctgtcacttgcctcaaagctaaccatggccagactgtgaccctgtcttagagaaagaagactacctgtctagcagaggtcaggatagagtgagtagcttgtaaaaatggaaacttgcaaagagagccccatctctagtgcaaggggtaagtgggtgaattcctgatgggcaaagtggcctaatgagtgagcaacttgggaacttagagataaaagaattcaattctgttccctaactcccagactattttatttttaaattgattaattaattttttttttttttttttttttttgagacggagtctcgctctgtcgcccaggccggactgcggactgcggactgcagtggcgcaatctcggctcactgcaagctccgcttcccgggttcacgccattctcctgcctcagcctcccgagtagctgggactacaggcgcccgccaccgcgcccggctaattttttgtatttttagtagagacggggtttcaccttgttagccaggatggtctcgatctcctgacctcatgatccacccgcctcggcctcccaaagtgctgggattacaggcgtgagccaccgcgcccggccttttttttttttttaagagacaaggtctccctgttgctcaggctggagtgcagtagcaggattatagctcactgaagctttgaactcttgggctcaagggatcctcccacctcagcctcctgagtagttgggacgaccgacatgcaccaccaggcctggctaatatatatatatatatacacgcacacacacacacatatacacatatatttttaagagacggattggtctccaattcctggtctcaggtggtctccctgccacagcctcccaagtgctgggattacaggagtgagccactgtgcccagcctgcactctcattttagacaggaaaaaactgaggtcttgaaacaagaagtggttattcttgtctcctcactcactgcttctgaacccaggagctcctcaactcagtctgtcctcacacacttgctcatagtgacttcaagatcctggtggggttttggcgaaggatgtagcgctttcacccaggactctatatgggtgacaaaatcagtgctgtaaggctcatgggctcagactgagaggtttggaatatgtctctagggcaggctaagccttaggtgttaaaaggagatcagcccctcccagataggaaacagtctgttccaagttgttaaaagcatgttagcactccatggagacttcttcctgagtacagtggaagactgaaaatttcctaccacaataggagctgagagtgttctttagtattcacgcacagcacgcggcaacactagatatgctgcccttaaagctaaaaagtcctagatttcaataagctttctcttaagctaagaaggacaaagtgggctgggcgtggtggctcatgcctgtaattccaacactttgggaggcagaggcaggagcaccgctttaccccaggagttcaagaccagcctgggcaatatggcaaaaccctgtctctacaaaacatataaaaatcagctgggtgtggtggtgcatgtctgtggtcccagctactcagaaggctgaggtgggggcatcacttaagcccaggagatggaggttgcagtgaaccatgatcgtgctactgcacaacagagtgaaaccctgtctcaaaaaaaaaaaaaaaaaaaaaaaaaagaagaaggaaaggaagaaagaaagaaagagcagaaaagaaaaggacaaagtgacttcttctacctgcagggaggtcattatacttcctcaatatcccaagtcccctgagagttctgatcctggcccccaggtgagttctcaacccagccacagatcagtgctggctgtggccacagccctggcctctctgcacactcacatctatttatatttgtgtttcccactgaaccttccacagtgctttgtgctgcatcagcacatgatgtatatttacaaaatgaacatgtgaaagaacagtgtcacaaacaaagccaagacagacagatatattttccacaaccaaaggaaatggtgctccctccagcccactggaggtcccagcctcccagaaggtccactccactactctacagtaacaggaatgaaaagaagtgtctggagtcacacaagcctgacttgtcactgagcttgaacaagcgcgtcaccctctctaagcctcagttcagtcaactcaagtggggagcataaccctgagatcacagggctgctgagaaaaatcaaatcaaataactcatgggaaaaagccacataaacccgaacatagaacagtgtgatgtcgtcattgccctgacttgagagaacaaagcacagatccagtgaagggacttcccatggcaacctgggaaccataactgtctctgactcctggcccagagcacagactctaggttagccagccaaccccatctctgcagcattaatcattaagtcaaaaggtcaagaggcctctagctgggagacagactaagtacctacaagtggggcttgtgtatggtggtggggaggggctaggaaatccccgcaacttcaggattcagagctctctggagaagtacaggttcatggagaaggaagccatagccctgttcctcagaagcctacctgcaacatgccagaaacttcccctggcccagccggggggcccacagcctccagcagtgctgggaggggttccgggagggagtgagtgctgccccactcagagagcactgacagcagcaggcagcactccttcatgtctctgtttactctttatatacgcacatactaagcaccaactgtttgccaggcactgggctacatgctaggtcattcatgcattcgttcatccactcatcattccttcaataacaactgtctgtcaagctcttcctgtgtgccaggcactgtgctaggcactgcagatctataatagtagctagtaagtcatgcatggcccctttcacattaagcttacagtcaggtaaggaagagagacaaagaaataaacattgcaaattgtgataagtatcatgaagggctcaaattggggttagggaataatgatggggacaggaaagaggcactcagaaagggacatctgaaaaggactctttgagtttgtgaaatacaagcaggggcccaaaggactagaagtcagctctgtgtatattttggcaatggggctggggggtgggcaggtgaatgtttcaagcacagcaaacagcctgttaaggctgttgggaagacagcttggtgtgttaaaggagctcacaggaggccagctccagggcagctggaacagagggaagggagagagtggccaagcaggggatggtgatctactctaagtgcatatccagcttcaaatggcaaaggcttgggtcctttgaaaaagacaaatacatccgtgtcctcccttacttccctccctccctcttctgtcccttgaataaatgatggtacccgatattggcaggtgttgtgaacacagggattagtggaaaccatctgaaagcatctcgccatctctattaaaaaccttaaaaatgttcaaactttctgagtagcagttgcacatctcagaactcacttgaagaaaaacacactttggaggcatgaaaaaattacctgaagggatgtgtgtagtagcagcatttatacaattataaataacctaaaagtcaattatagagaagtgattttaaaaagatgcagtcttccataaataaaatattatgcagctactggtggactgcctgaggttaggagttcaagaccaggctaacatgttgaaaccctgtctctaatacaaataaaaaattagccgggtgtggtggtgcacacctatagtcccagctactcgggagactgaggcaggaggatcacttgaacccaggaggcagagaagttgcagtgagcccaagaacatgcactccagcactctgcactccagcctgggcgacagagcaagtctccatctcagaaaaaaaaaaaaaaagaacgtgtttgtggtcgggcacggtggcttacgcctgtaatcccagcactttgggaggctgagggaggtggatcacctgaggtcaggagttcaagaccagtctggccaacatggagaaatcccatctctattaaaagcacaaaaaattagccaggtgtggtggcgagcacctgtaatcccagctacttgggtggctgaggcaggagaattgcttgaacccgagaagcggaggttgcagtgagccgaggtcacaccactgcactccagtctggacgacagagagagactctcccctgcaccccccaaaaaaagaacatgtttgtaaaaatgttttcagtgagtaggttataatgagacaacgtgatgtgcctagacagaagggattacactgtggtgattcacacaatgtggcatcacacagccacgaactagaagggccaccaacacaggcaacatcagggaagatttttagtgacaccatagcgagtgaaaaagcaagtctcagacgtctacgcatacatcattctctccttaatgatgtcaaaaaagcaggcacaatcaagcaatagcatttatatgacactactacatttttaaaaattaaaggaatgacaaatacaaaatctagaattgagctatctcttgagaggcaggggccaggagagcaggtgagcacacaggtaaatgtgagttactggtaagattttacttcttgggttaagtggtaagttcagagtttttattatggtattcacaaataaataagcaaacaaggaaaaagaaataaggttatgggccaggcacaatggctcctgcctgtaatgccaccactatgggaggctgaggtaggagaattgcttgagttcaagagtttgagaccagcttgcacaacatagtgagaccgcatctctacaaaagattttttttttttttaattagctaggtgtggtggcatgcacctgtagtcccagctactgaagacactgaggtgggacaatcacctgagcccgggaggttgaggcttcagtgagctgtgcttatgccaccacactctagcctgggtgatgaagtaagaccttgtctcaaaaaaaaaaaaaaagtttatgcatagaccagtgatgatagtacgacatgtaggaagcattacgataaaaagtattcaccagtatatggcctagtctcaattttatttaaaaaacacacatacatataaatatataatcaggtgccacatactgatgtttttgttcaatacagtccacatatgcaacagtgattccgtaagattatatttttaatatgtaaaatttttattttattttacttttttatgtttagatatgttgagatacacaaatatttaccactgtgttacaattgcctacaatattcagtacagcaacatgctgtacaggtttgtagtctaggagcaataggctatatcagacagcctaggtgtgtaaaaggctacaccacaccttctaggtttgtgcaagtacactctataatgttggtacaactatgaaatcatctaacgcgtatgcgtgtcattaagtcatgcatgactctatacctgtggaaaataggtaagaaagcaatacattgacatggtaacaattatttcagaatgatttttatattatttgtacttttctatttctacaataaatttacattgaacaactagaacaaaaagttgtttaaaagagacagctcatttagatgtcatctataacttgttcttaaggaggccaagaagggccagaagtgagagtggggagaccccagagtccaaatggttgatgcagtgtagggctgttactgatgtggctgagatgtagacagggagctgtggggaggccacccctgccaggctgacccctctcgtgctttctccctcccattttagtcatctgtgttgattctttgtctggagtaacaactgcttcactccttttccacccttagcttctaggagagaggaggctccttaaagatgtaaatacaggccaggagcagcggctcacgcctgtaatcccggcattttggaaggctcaggtgggcagatcactggaggtgaggagtttgacaccagcctggccaatgtggtgaaacccatctctactaaaaataaaaaaattattgtatatttgggggtggtcgtgggcacctgtaattccagatactcatgaggctgaggcaggagaattgcttgagcccaggaggtggaggttgcagtgagctgagattgtgccactgcactccagcctgggtgacaaagtgagactcggtctccccaccaaaaaaaaagagaaagaaaaagatgtaaaaacagaaatgaattgatcatcaaccaatcgatcattcagtcaattccttttgggtgaaggtttttatttttattttttgaatcaggaaacaataattacacagagactgtgagacaatcagttttgttttaagtcgttaagtgtgtggtcatattgtgacacagcatggaacgcggataccaggtcaaaacaggggctatgagagaacagagtggggagtcgctaggttttagacatcaaggggaactgtccggggaggtgtcatggggaagcaatgtggaggcacagcgtgtgcacaggttctcctctgcccctccgtgttctaggtcttacctggggagatgctccatgggaggcctgcttcctctggcactgtctgagtcctgggactgggtctaaccaattctgggatccagttagcaggcttctccgcctctcacaataagatatgagggccaacctgaactttctcagtaataaaggttatgcttgggcccccacttgctatcatttgctttttttcctcaattgctgagaactagagggtactgttcattgggggtcccctcgcagcagtgagaacagcaatccagcggggaggagtgaggttcggagagagacgagagcaccccatggcggtccataaattcaggctcgagcttagatcttgtcctgtaggccatggagagtcacaaaaaagtctgtgtgtttcagtggctacagactacaccgcagggcatgggcctccacagccaagaatctggttttcagttttccttaatcctgcatggtctggtcccatgcccatgatcaacttgggttgcagtggtggtggtggtggtgggcccgggagtgtgtgtgtaagcacaggcctacatgaggcaggtccatgcaggcttgctgtgagctcatgtgaatggatctgttgtctctctgtgtgcccctgtgtcacttggtgcagatgtgtgtttgtgtgtcagaatatatttgagtgtcccatgtttatgtgtaagcccattacttggacggtgttaagacagaataataccagttaatgtttgtggagtgcttagtatacaccaggaactctgctaagaacttgacatccattttcccatttttatcctcataatgacaccatgagattggtactattgttaccgcactttacagttgaggaaactgaggcacaaagctttacgctaagaaacaaacccaaaggcacagttctagcaaaaggcagattcaggagcagactgaagctttctggttctgaagccatgtctacatgtatcctcgtaagtctgtgggtatgtgaccaggtgcttgggtgactgtgttctcatgggctctgaaagcacgtgtggcgggcttatctgaacctatgtggccaggctatctttttcactatgtgctcatagacaccacatgtctgcatggcttgtggcatctgtctttgtgtctgcatgtcctgatataactgtgcatcctggtggcccatgcttatttgcatgaatcaacatgtctctgtgtttctgtgtgtctctggctgcctgtatgtggccgttcatctgcacacccccatgaggagttgggcagggctcagagccacatctggctctgacgcattgcctgtggggagagggtgactgcaacagtaatccctgccatgtgagcgtgtgtgccttctgccctcagaagcctggagaaatccaacagacgccccgctctgcagcaagcaggcaggcaggctgcgctgctgggggcctggctgggtttattttcagcaaccgaggaggccctgtggcatttaattaattccattccttatgtaaacaccagcaaacacagggcttcaatggcagaagcacatcctgcctcatgctccccatgctgccgttgcatgggacttcactgtggggactgcacgtgtgtgcctgaccacccgccacagtgatctcgtccgttctgccactgcatcacccccaggatctgccccctgagtctgattcctcatccctctcctccaccctgtgacatctcccctggctcaggccttgacagctctagcccagacctttgcaaaagtcttagggttgcgggtgagggggtctctgttctcagctccatctggtggtcccagggtgaaggagaaacttataaaatgcaggtccatcagatgtttggttcagatagtctgctgactttgtcatgcacataggggtgtttgtgtatgcaatagtcaccttgtatctaacacagacagcacctatgtgagcagaagcagaatgcccaccatagccaccaaggccctgggtttcagtcctggccttaacaggagagctctgtgaacgctaacatgccatgcagctctggaggggagcaagggtcacaataacctccaaatcaggtcatcaggaaatagccataagttggtagcttgtggggaaattttttatttgaggaacgaggaaggtaacagtgaggaaggaggcacctggaggggcaaagcagacgatgcaccccaggaaggaggcaggtaaaaggattgggagaggagtcctggagaagctgctcattcccacaacccccggcaggtctcgcagtaccatgtggtaacagcataaccctgggcaagtcacttaataacacagaaatctttctccaatgtgagctttccttgaagaacttacaaataataattatcattctagtagttctcacttttcaagacacactgtcaagtgcctgatttgtcttatcttacccactctttacaacatccctatcagctctctgcctccatatacccagcttgtaggccaggaaacggaggttcagagatactaaataccttgtccaaggccacacctgggttaagcagcagagttgggacttaattctaagtcaggcttctcccagagcccttggtcttgacattgtctcaaaattgagttctctagctcaaaatgctggtatttgagttctgtagctcaaaatgctggtattataggcttgatgttcaagttcatctcagtcatcatcagaattttagttccactgaaactcatacctcttggcaacaagacagagacataactagggggtagggagtagaaaaagaaggctgagacaagacagctggaggagactcagggatggaaagtaagtgtggccctgaatatggatgtgtcttggggcagcttctctgagatcttagaaggaccaagagcctgaagccttcagctgtgtcacaagtcaggacatctggatggttagccagacccagaataaataaatgccccagtgcatatgtactgtcttcaccaaaacacatttacaatcttcttgttccaactacagggaggcagatgctcagagggatggcaaacgcaaacccactgttcagtctccatgatgtctcacttagatgtgtaagtgccactggctttctctttattcagcaagttgcctgtattgctcattttagtgaaagtaaaaaatgtgctcaaagcatctgggaggtccatgcctactcaactttaccaaaagctctgaggttcctgagccatgatctctctctccatggggattttaggaagctgagcctggtgtcttggaaaggatgattgtgcttgacccccaggggatgtgggaggataaaatgtggccaggtacatggaaataaattctaaaagcactggatcagcatttgtgacagttaaataatgggaaagccatagagcctctagtctcacagtgctagtcattaggtgcccagtccataaatagtctggttctgcaatcttcccagagccctgtagggtggctctttcctatgctctttgaaaacagcagtggccgtgtgatttgctttggccaatgacatgtgaatggaaatggtgcctgtcacttctgggtggaagctttaagaaccagtgtggaattttcctgtcctttttccctctccaagttctggacagtggctggtctgaggcccccagcagatctgtggtgttcacacaacacggtagaaaataactctttcttgtttgaagacactaagagttttggggttgcttgttccagctgcacaccctggctatcatgatggtaactccttacaacctacacaccggctggtaagcccagaagcaaagtgtgaagagcatgtgtttcatcctaactcttctaatggagtccagcctcagtctcaacagtccattctccacacagtagccagggtcatctttttatttatttattttatttttattttttgagacagagtctcgctctgtcgcccaggctggagtgcagtgttgcgatctcggctcactgcaacctctctacctcccaggttcaagcgattctccagcctcagcctcccaagtagctgggactacaggtgcgcgccactatgcccggctaatttttgtatttttagtagagacggggtttcaccatgttggccaggctggtctcgaactcctgacctcaggtgatccacccacctcagcctctcaaagtgctgggattacaagtgtgagccaatgcacctagccaggatcatctttttaaactacaaacgttatcatggcactctgcctcccactttaagtgcccagacattcaaaacctgaacatagcacccctccccttcccctgccacccagctgctcaaaactacaaaagataaggctcaaggatatcatggacctggtccaattcacctctccagcctcagctcttgccacctcttgcttcatactctaacccctattaaccaaaattacttcattacaaggtgccatgctttctctcacttccaaaacttttgcacatgccattgcctgtacctaaaacactcttctctgtcctactcacttaaccaactcctacacatcctttgggcctaagcttagtgtccacctcctccaggaagccctcgctgactcccaggccaggctaggtgtgttctcagtgcctccactcttaccatgtgtatcactgtggaccgtcttatttacttgcagcaccccctttcaggctgtgggatccttgagacaaagggctgtgtctgcttttttccccatggtatctccagtgcccatcactgcatcggccatctggtaactgtggagcatcttctgaatgaatggatgatgaatccctccacatacaggtcctctgttggtggcaggggaccgtgatttaacgaagcaaggggaagtttctttatgtgctctccccccaaatctctgggttgaagcgggaggcagggagttcatggtgataaatgagggcctttcaagtagctcggtggccgggacacttggagggcagcagcctggggcctcctagggagctaatggttttcaggagcagtttgggaaggcatcctgcaaatagccaaaagaaaacataacctctctaggctccttctgtcctgagtgctcagctgagatagagctcaaaggagcttaatgaattattatgtccacattgcttgctgataaatgacagtctcatgctccgttaccaaatgctggttgtaatatttaatcaaagtctagttttatgcatcagttggttttgaaaataatatttatgggtctggaatgccttcaaccttcaggcatatggctgaagagaatctttattttgtagctattggataagaatataggaagtgagatagagaaactgcgaagttcactgagatggatactaattccttcatgccaaggattcatcctcaggtacaaactttttccctaagatccttccatcctcacccaaacctggttcattgtctaacccatcagttcaaacctgattcatcatctaacccacctcctccagggagccctccatgaccaacccagtccccagggatctccactcctccaagctctacttggtctcggccactatgcagagcatatgcactgttcagcatgatggatgaactttacccgctgaagtgttggccgttccactcggctcgggctcccgtggggcaggcggggtttgcttcttgttcctctctacctctcctcactgctggacacctagctggtgttagggaaatttctatcaaatggttgatagaactgaatttatagtctctgggctttgcacacatgagaagttcaaaagttatctgagatcctattataaaccactccctgaattttgtccttttccctgttctctccacctcagtgaacatgccaagccagacacctggaagtcatccatgagtcccccaacccctcttttaatcatttgttcattcgttcattcattcattcttctattccttcagaaataacaacaaaaaatattatgtttactcactgccaggccctgtgttaggggctagggacaaacagtggtgaattggccagaaatggtctagggggaattttaacttctaaacagtttttcaaacagtttttctcttgtacatccaaagggcctgccttggtccggggccatttcatctctgacaggtttctaatgtgtccctggccccctgctccagccttctccacctccacaccatcatcatcacacttggtaaacagttttgagaacatggaagtgggagtggggtggcgcagagaaagcactggtcaggaaggctgggttctagctccctgtgagaagctggataaacccttccctctctaagtctcagtttgttcaaaggtaaagtgggctaataatctacaacttgagtgtggctttaccttgaggtaaatctagtgataataattccatttctgagcaggccaaacacattacatgtattaacacaatccgctcaacaatcagggacaggcagaagttcctattactgctattcccattctgcaacatagcaactgaggctcagagaggttaagtagcttgcccaaggtcacacagctataagtggagaactggaattccatatacaggactgactgaccccagaggaccctgatcttaacttcgacatgctactagctctctcagtctgtggaggatgcccttatgcctagtggttttatctgtggctttgagtggggtggggcttgggagtcatgactcaatttcccctaagcagggaccaagagacatcctatgttttgagataagcacacttaaatctcccacttgttaaaacattttcaggttctttgccataagtgaaggatgtgaaagtcctggggtgggggccggcggggggtgggtgattacatgacaaagccaatgaacagtcttaacctgagcaaagcatgtggattgggccaagggcaccaagtgcaaacagtgttgctgcaggcaggggtacccggggaaaccagcctgcttcctattagcgctgaagagcagcgaagaaagggtgtaaatcaggagaggacggggccaggttcctgtctcccagaaccgcctttagtcttcttccccaggtccctccaaaccagtcctgggtgctccccgccacccctgacagcttcctctctcattaggatctctctgacaaccctgaggatttacaacgtgaaatgtttccatttccctgacaaggtgtctctgcttcaaagcgcctgtgcctgccctccggagcccaggatgaaggtgacttcacaagggagacaaatgaatcaaagggctgacacccatccctttctttccccccataatacatctgtttattattgaacgggggcttgcatggttcgtgatgaattgtcttctcctccatagccatgtccccagacggctggggaggctaaagtgtcttccaggagcatctgcttttgatctctggtcctttcaaatcttaggttaaaatctttagcctgacgggcctgaaaggcagcctccagcagcaaagcaggggcaaaggagtgttaaaaccctggagaggatcatctgggttctcccgtggaattccctctgatgggctgaaaatagagcagggggctttctgtttggagggaggcccctgcttgggtttgagggcagggttctcatctgcaggtgcagtgcccttgggaccctgggagaggagtggaggctcaggctgttcaccccatacaaggctgggcactggctgcagagaggaggagcctgtggtcctctggtcaaaaaagcaccagtcacctgccatcgctacctcctgtcccttcttcagatctcctctgaaatgtcacttctgtagggaaaattctcttgatcacctccaaactgggagtgacagtgactgtcacctgcttaccacacccatatcctcttctttccaggcacacaattcaactgccttcccctagcctcctctgtaggtagagaaggccatgagactgactctggccattggagcatgaggccacttccaggcttggcccctgagaccctcccagtgtgatccttgtcccttcccacggacgctgactgctgtttctgcccatgagagagcttctgtccacctagggccctgagttttccctggcccactgggaatactcacattggagctgtgaagctactgaatgatgggggcttgttgtcacaacagttagcatcacccaccctaggtcaggtgcctgtggcccgcgctccccagcccctgtacttctgggttgtacttggcgcccttgcttacactgcactctctggagtaatttgtatgatgtctgtctgtctcaggagacagtgttctccctgagggtagagaccgtctctcttcttcaccactgaaaatgtgggcctaacacagcccagtgcacagaaagaacccaatgaacagctaccagatgactgatggaccaggtgatggtgaatccttctgagatccacaacacaccttagcctcatggaagctgcccagaatgggaggtcaggatcgctggcttggatcccagctctgccccaccatgcagaagccgaatgtccttggtcatttcacaccacttctctaagcctcagctttcttatttgtcaattgaaacaatttctcacctctcagggtttggggggaaataaaggacagagagcctgtgcaattgccaagcacggtatgtggcttgtcatgtcacattgttcatgtgttcatgtcacattgatgacagatacctgaatcttattgccagatgtggggataagaccttggaagtgactcaagccactgttgactctgccaatagcaaactgtgagggcagtgaggcatatgtcaccagaagattgtaaaaataagacccatacagggttatctattaggtcaaagatgcatagctgctgagagttggtgaccaaaggattcagtggaaggattactctccaggtatctagaatcctggactggggcatttctactcaacctccagtccttggcccctgaggcatgagatctagagccaggcagtaccctgccactgcccagctgggcaaccacaggcacaacctttaccctctctgagtctctcgttctccatgttataaacgaggaagacaatacttaatgtcttgaggcgcagtgtagattacatgggtcagaatttgtaaatgtgcttaggacagtgtctcatctagaggaagccaaagtaaattattagctccctttgttcactgagctttttgctacctggatggaatgaagttgctgaatatctctggctgagtctcctttttctcatctggcacaggttaccctgcctgcctcacccacctgctgtgacagtcaaagcaagcatggatgtcactctgctttgtacactgcagagtatgctacacaggtaggttgttaataatagctacaactattagtactagtaataataatatcagtagctgtggttggaaatggtagaagtaactacaacagacttgggtaacaggatcggggtcaggtggtaatagcagcagtggctgtgatggatgtaatagcagtgagggtggccaatgcctaacactgccccagttagtagcaatggccatgaccagcgtggtcatggaggtggcaggtacagtaacagtagcagcagtgataggctggtggcagaagaggtgacagaggtagtcattgtgctcaagccttgctggcctcctttctgttaccaggcccatggagcctgctgcttggggagatgctgcaacttcctgggcatcagtgttctacagggtgaccaggcagtgaaagagcatttcttcagcttcctactgctgggggggcccaggtgtccacaggtgactgagcactgacaggtgggccaaaggatccacagacctgatgctgcaggcctctcatctgccaaatgccttctcacatggtcacccctaggagcctttgagaatctcctgagcaaagttaggtgttttttcctccattgtccctttaacgttcattcaacaaatattcactggagcctactgtaggccctgaagaagaagaatataattcccaacttcaaaaaggcaacagcttcgaaagaaatcctctgtgcatcttcattacagcaggtaggttgctgtattaaggacgtttatggggctgtccttggcactagtgccggttcccatccctatcttgtttggtatggagtctggaggtgcacaacagcactcgctggatcccattcatctaagagatatttttggagtagttacccaaggagagacatagggaacagtggctgagttccaatcccggctcactataaccttggacaagttgcttaatctctgcctcagtttgttataaggattaactgaattattattacaagtaaactgtttagaatagtgcttagtgtacataataatgctatagaagtattagctgtgaaaatgtgccaaggatcatactaggcactgttcacatagcaatgagtcaaacaaagttccagctgtcatagagcttacattttagcaggggaacagatgagaaacacacaaatatacacgccatgtaggaaaaggtgctatgagcaataaagcagggcgcagagacagagagtaagcggggctactatgcaggcaggggaggcttctctgggcaggtgatacttgaacacaggtttggatgaaatgaagtatatatgagccacgggactaccttgggtaaaaagggttccaggcagaggcaagaatatgttttgtgtgttcaataagagccaggcacggtggttcatgcctgtaaccccagcactttgggaggctgaggcaggaaggctgcttgatcccaggagttcgagactagcctgagcaacatagtgagaccccatctttacaaaaaataatttttaaaaattagctgggtgtagtggtgcacgcttgtagtcccagcaacttgggagacagagatggaaagactgcttgagcatgggaggttgaggctacagtgcactgagatcatgccactgcactccagtctgggctacggagcaagacccaatttcaaacaaaacaaaacaaaacaaaacaacaacaacaagaaaaaacaaaaatgaaagaaaaaaaaaagaaagagcaagggactagtatggctgaagtggagtaatggtgtcagtggtccaagatgaggtcagtgaggtagctggggtcagattatgcagaggctcttaggccacattaggatttagcttttgctaggagtaaaacagaaagccagtggagggttttcagaattaatgttttgaaggatggctccaggctctgtgagaagcacagcctcctggagtgggagaaggcaacagaagggagacctgttacaggcagcttattacacgcaattgtggtggtggctgaggccatggtgctgaacaggaagggtggggagaagtagtggaatcctgctgtctgtaggatgtagacatgacagaaactgctgacagactggatggaggttaagaaagaaagagaacagtcaaggatgactctaagacttttggcctgaacaactggcagaatggaactgccatgtgctgaattgaagaagtctggtaagaatcaggactgggaacccatgagggggagaatcaactattggttaaaagttgttaagctagagatgtgtatttgccacccaagtggagattctatatcacatctggatatatgaatccagagagtttgtacgaagagagaatttgggctgcagattgaaatgatggtctcctcggtacaaagtaagaatggataagtacagaaagaagaggactgaggactgagccctgggaccctccagagtttagaggtcagagaggtgagaaagaagcagcaaggagactaacagaggctactgaggtaggatgagtgaaggacatatttcaagaaggggcatgtgctgatgggttgagaaagataaggactgaaaatgaccctaggattcttctatgtgaatgaatggtgaggaggtgataacagctgaagaatgtatcacacactggaggaaatggaagccatcatcggaattcaggttgaccatgtggctctgggaaggccagcaccatgaaacagcaggtacaaatccagtctccagttttagagccttgggaagtgcagtctgacatgcaaagcttttaaaattttacgagggcatccagaggaataggaagaggaaaaaaggtaagctggtggggagtgatttatacacattacagaagtacataaatggtgctgagggcttccagcaccctgcagaagccattgtgaggtcagtggtgagacaggtctatgtccagacgcagtgtcatctggccagatggcccctcagctggtgggtgtgtttcatctcccctgggttaccaggagaagtggataaagttagtgacttatttattgttttctgtttcacatttcaattcagttgattatatatagttttcaaatatctaaaaaaaaaaacaaaaacaaaaactgatttgcttcctaaaagtgtcctcctcatcccaactcctggtgttctatgggacagagtgcattcacagaacctctggggggccaggcagagggagtggccagtatgtggaaagaacatcctttgagatcagacttaagtagaaaccctcactccatcacataccatctgggggatgttgaacaaataagagcctccctgaattctactcgggtttcctgggtgttgcctttttaggaaagccctacttttacctgcccttagcccaggctggtgtaggttctctttacagccatgctcttagcgcaccttgcctcacatttcaatgcttgagagcttgttgacacttggctatgagcttttagaggggagcccttgtgtttgatttgacaatgagtacactgcacagggaagttgccaaacatgctgttgttgattaaatgcacagtcgctaccttcctagcgttgttccagggactaaaagagaagagttatgaaaaagttccctgcccacaaatcaacagagggctcaggcatgtctgcaaactgcctagattcatcagaggggcaggctcttggactctgcgggggcccaacttctcgggctgcttcaggatcctggctttggtgatggaatcaccaaaaagcgatttgtgagacaatgctcttccaggcctggcattatcccgaaacccccaaataacctgctgtggatcctccctctgattgttgattgtgctcctccttgaacttacttatattgtcagcctatattcattcatttatattctttctttacttcagtaattcaaatactattattgagggctcggcgcatggggaggcactgttctgtatgctggggatacagtgatacacagtgtgggtgggggtgttgcggatgcagcctacaataatacttaggactctgccattgagagccaagccgccttggttcacatcctggctctgacacttagtactgtgaccttgggcaagctactgaacttttctgtgcttcaatttccgtatctctgtaatggagatataatggtacttggttactgagtttgggaggattaaataaattcatcacataaagtgctttgaacagtgcttgacacatggcaggcactcagtaagttcttgttattcttatagcagtgaacacagaaaagtcactagcctcacagggattacattccagtggggagacacacaacaagcaccttgacaaggagctacctaataccaagtgccacgaagaacagcagagtgagaagatggaacagaatgggaccagggtgtgctatgtgagatatggcagtcaggaaggcttctctgaggaggtgatatttcagcagggcactgaatgcatttcggaccacatgggaccaagtcattgtgtcaattagcaccccaccagcagtatgtgtgagtgctggtagtgaaggaggacacttccagtagcagaatgaacaagccaagagtgaagaatagggacagggaagtgaacatgacgtaccactccttccacaaagaatctggggcaccgtgacacatgctctgcaacatgtgctgaggacacagacatgactcagatggcactcctgccctcaggggagtggccagacgtggccacagacaaccagaatactgggtaggaagagctcaggaggaagagctctgccagtacaagggcaggagcctcctgcctcctcctccaccaccccagtcctggctcagcttcctgcataacaagggatctaaaaacgcatctcaaagggttgggagatattcaaacagccctcaggacaaaatcatatcctgcggcccctgcctcaccccaaggatatagatttgacactcaacaaaggaattccccaggagacggccacagggaggaagacctgagtttcatagcctgagcctacactggacacagaggatgagcggaggggacgtggatagtctcttgcagcccactcgccccaccccccagccaggaagcccagcccaacacccgcttctcactgaagttaccataaagcacagcctgtatctgatcactctgtgtgagcactgagcgagctgtgggttgctctgctgagcggagggaagcatgtacacttccaagttcaacaaccttgatgcctggcagtgggtgccctgggactgcccagcctggaccccactgcccccctcccaccacagttaaagaaaggctccttgttgaggagaggagctggtcaggttgccctcaggtctcgcttccccaaggaccaggtgttttactcggcagcaaaccagagctgtcctggaaccaaccctgttcagactttgtcaccctgtccatcaccctggcttggctgcagggcccaaggtggcaggagacagagttcactcctcatttattttcaacatccactctagggaggttggattaaaagtctcctggaatgacagtgccagaaagcccttgggtgatcctctgggctgaaaggggcccatagggcagagatttcctcaggtcgcactgctgaggagggaggggcagagatggtgctggcacagatcccatgcccaccccactcccaggcctgcctcctcgtactagtgtttgctttcccccaggcctgcgcatattctccatcactgggacttgtcccaccagtgaaggggggaaggttcctgtgtgccttggccccagtggcaggactcattccagcaatggctgccgggggcatggtgcccagcactgggcttcacaggcacacattgtgatctccagcccctaaaccacaggctgtccctgcatctgtcaagtgcgatctctcctggcccctgctggcccctccaaacaagctatctttatgaaatgcaatgactgccctccatatattaaaataacacctccccaggaaggacctcacgtcagggctgccgcacaaagggacattcacaggatggcagagggaagccagcggaggcttggcccagggcctagagggaagagaggatgaggagtttgggggtctcgggttacagagagaagggtgggttaagggaggcagggatggggctgtggaggctcaaggctaacaaagaaactctgggttcaacagagtcacgcagcccactccacactgatgatgcagaccctgggcctggctatttccagcctgggtccaaatgccatggcctgtactgcccaaacctccctctggaacccaagcagagaccctggtgggaagtggggatggaaaaggcctcagatattaggatctgcttcccaaagatgttgtagcgagagtgggcacagaagcccagtctgtgcgtcactaaaatcaggcaggcttggggaactgggcttgccaggctatgtgtgatctgcccacgagctgagctcaccctctctgaggtacctctacctctcggcctggggaatacagtctagattccgactggcctgggttctgatcctggtactgccacttcttgggcaagaaactccaactcccttggcatcagtttcctcatctgaaaagtgggaatcatgacaactcatctaaaagatgtgttatgaggattaagcaagatagtgtcagtaaaagtagttgcacatagtaggctctctctccctctctccctaacacatatatactgagcccctagtatatgttgagcactgttctcagtatgtgggatattcagcatgcaacaggcccaaattcctgctctcctggatctcacaaggtattggatgtgatagggtaagatggacagtaaacaaaaaacatagcaagtaaattatgtaacatgttagatgacaggaagtgttatgggaaaggagaaagtggagcaggaacaggggacaggtgcactaggctgaagttttaaatggagcagtcattgagaaggtgacatttgaataaagacacataagagatgagggacagcaaagaccctgagacaggatcatgcttggcatgtcccagaaacagcaaggaagacaacgtggctggaggggaggtaggagacgatcagagaggaagcgagctgggggcagctgatcattttgggccttgtaggctgctgtactgcacttcctaggcggccatagaaggagtaacctgcggaatggccctgatggatgaggaggagttcaccgagccaagaagcagacaggctcagaggtgtatccagaaaacaggctcttccacacggggaggaccctggagggcagctgcaaagatggaagatttttgatgtgttttggtaaaatgtgaattgcatctgaggaagaaatagctcttcttttaaaaggcaaggtagggccaccatatctcagatcctgtattcatcacctttcttcgtaactacatacttgtccttatcacagctcaatcagtttcctccctacccctcatttgcaccacacaggtgtacacacacacacacatatacaatctgacctgcccctgcccagctagagagcaggtacccaatgggccagacactgcagccgacctactctacctctctgagcttctgtattcttaagctggaactgaccatatcttttttagagggttgattattggtaaggattaaactaacatgtaaaaatcccttgcaaaggatagcgttctatacaaacagaagtgttagctatttacctgatacaagaaaaaaataactggaagttacttttatcctataagaattttccttcagtatctacactgtcccaattcactgataatcactccaacaacacaggttgttgggtggcacagaatactggctcagaacatttttgttagatgaatgaatgagcagatgaaggaagggaagaatctaggcataaaaggcataaaagcaggcaggtaagctactggtgaggaatgtggaggaggcaacttgtcaagcaggggctacgaaggctggaaccctgagccctaacaatggcaagaaaaacagtcacaacctcccccattcccagaggcctccgccccaatctttgagcccgggctgctctggctctccctctgataaaagtcactgccctctcacttaggtgccattaggatgctaatgatgtgtgattagacctgctctgagactcccatttgactgacctcaggatggcagaagtttgcctggaggccaggaaagaaaaacacacagaaaaggagaggcctaggctctggagggaagccagggaggcactgggtgggaacagtcaagagcaagttaggggctctgcatcttcaaggggacttttttgaagccagaaagaaccttgatggtcatacgagctctaactcccttatctacaattctgaaatccaaaacgctctgaagaatgtctttggtaacttgacctgaacttatccaaggctatatatagccttgatctctcccacgttttgtgaatattcatgttttgctgcacaaatgttaatgtatttgattaagaatgctgctccaggccacaatggggtgttaaatgatgtatggatatataccatattttgccatctaacatccaaaaaattctgaattctgaattctgaaacaaatgtggcttcaagggttttggaagagagactggagatctactctactcagctgtggatttctttaaattgcttattcctccattgactcattcactcattcattcattcattcattcacgcattcagtcttcacggccttcaccacctacatgtatccttttgctgttggagaaggccttacatccatatttttcctcagcaagtgcccactgagtctttctggatgtgagaccctggcctgggcccataagggctcatcttacatatctttctgtctctgcatttgtccactgggctgtgtcctctgtttccatctgacttccactccaggtgggggttcttatgtgcacagggcatgatcttctgcttgccccacagatcttggcatgcatgttggtctctgcaagtggagtgccctcaacaacctcctacagacatggagaaggcccaggccctgttctctaaggtgctcatgcacacctggaggagtgggccacccagagtgggacctagagaatcacagatcagtaaggcaagaaggacctgcgagcgcttctggtttagccccttctggtgctttggtcccctgaaacaaggccctgcaaggccacttggacactgctgtggcccactccattacatacaatgccacctctagaaaactgctgtctgataagaggatatctgcctacgtggcactctgcccatgaatcttgggagcagtgagagatgcaatcattcaaagttggggaaaccatggaaggctttctggaggaggtactattagaacattttgaagaagaaaaaggattttggtaagttttgtgtgtttgtgcaatagtggtggtggtggtggtgtgtgtggtgggtagatacagcattccaagggaagcccttggaaatgataatgagccctggttgtggtggacagggcgatgcagcccccaggtcccatgttaatgaaggacttgttgccccagctgctgtcagtgctgtcagagtgcagccttgcactgtcagtctcttttgccccagttgcagagcctctttgctcaaagttgggcccttcaatgcacgacccatatccaatgagagtcaattcaatgaggaataaaggcaggtatgcaaaggcccagccagctatttcagatccaagtttccctgtggaaagtgcttgggcctgcatctcagcttgacttctccctctgctccatttgttttctccacccacccccaaggacctccctaataaatatacatggaaaccacctcagagtcggcttcccagagaactcacctgccagactgagggggtgtgggggaggaggtcagaagagggtgctgttggcagattgttgttggagggactgttggaagattgggctggagaggcaggacctggccagcccacaatactctctctccccgtttgggtttagggttcctaaggcagggcccacttgctctcacacgacttcaggagagagtgctaaagccatgagttggcaggaaccgagcaagtgccacctgccaggcactctgttgggtacttagtgcctgttatttagtgggatcttcacaccgactttacctgtaggttgtataattatcttatccttaatagatgaaggaactgaacactgaagagtttcagtcattgccaaggtcatgcagctagaaagtgggagcacctaaaagtgaagtctgatgccaaatacacaagcctgtgtatttcctccaagaggcccccacccctccatagagcaagagcactgttatctctgatggccaaacctgttcaaaatttctatgtttgctaaatgaacgaagtaaaaacctagtttccttttcttggtgtcagctaagtgctccgactatggccggggtcggggctctgtgcctcacctgatgccaaggcctagttgtgtgtgtgattttgggttcagtctgagaccacaggacagcatttttgtcttggtaaaattaactaaccatgacactattggagggccatcctgctctctcaatccaagcaccatcttttaagagacaaagaaagcagaaagggctgggagtgggcaccaaggagtaaggagacggatttgaaggggttctattcaaccttttatctatcatcaaaaccctccatcattaggttagttgtgcccgtctgtcccataacatttacagacaatcataaaagggtgggtaatgactgcaattacaactgaaggactggtttaatgaatattaaacagctttgaacatcaaagtactggctaaagtggaaacctaatatctctcctctcagcccctgccgccctgcaaaagggtaaggcagatggcctggccttctgcagggctgtcaggaacaatttgcaagagtcaccaagtggcacttggaacaagttcttctgcctggaggccagcccaagaaataaagggatctgccattatcttctctgcagcaatcagcaggggagaacagccatctcacagaggaaaggaagtccacaagaagcagagtctcccttcctagggaagtctgctcaggtgggaccacagggaagctcttgctcagccagcatggctcagcggcagggggcatggacagcctgctttcacctctccacccctcccagtccctttcctgattctgtctgcctccagtcctctgcctccaggccagctggtattcaacagcctccacctccctgacttaactcattcactcaggtatttagagagctgaacaagacgtagcccctgcactcaaggagttcatggtctaatggaagcaacaggtacataagaagtaacactgatatagattgattacagccatgggggcagacttctggagaagagtggttcaggctaacggagcagcataattaaccaggcaggtctgtgtcctcaaggaagcccagggtctaattagggagacaggcacgttggcagtctgtgggacaagtgtcatgtgaaaatccaggatgaggggcagttggggctccttgagcaatcagagaaggcctcacagaggaggtgacattgaaactgagcacagaagaggaagaaactcacctgtggggcaaggagccacagggtgccctagaaacaggcagctactgtcctggtaagtctcctcctgatccctccacccactcttctgcccactcccctagtacaaccttcaattggccagcacctcacagttgccccagtgtttactgttcatgaacggccaaatattttgaccaagcctcccacaaggtgcatcttccctggttggccctgactggtctttaccaagagtttacatgggacacgtgatgtgctcactgctttctcataggacccttggaacctcatggcttgcggttctgaggaggcttctaacccttctcccataaccaagttctcaggcatgtgcctctcttgaaaaccaggggcacaataggtgttgataaaatggtgggatgaaagagaagcctctgagttcccagggtgactgccaagtagatgggcaaacagggggtccagagaagaaccgagacccacgagaaggagtccagggtcctcaggctctttaggatccacagtggctctatactctaaggccagcactgggcaactcgacttcctgtggatggaaattctttctttaagagacaaggtctcactctgacacctaggctgcagtgcagtggcacgatcatagctcactgcagctttgaactcctgggctcaagtgatcctcctgccatatcctcctcagtagctaggactacagggttacaccactatgcctagttaattttttatagagtcggggtcttaccatgttgccaggctggtcttgaactcctggcctcaagccatcctcccaccttggcccaccaaggtgctggcattacaggtatgagccaccctgttcggcttgatgatggacattctttagtacatgtggctgttgagcacctgaaatgtggctattgagactgaggaatataattttaatgttgtttaattttaattaaatagccacatgtgactagtagctatcatatttgacagcacaggtctagtcataaattcatcctggtatcttaaacatgccagattttttcatgcctcacagccccttctgcctggaaagtcattcccctcttctctgtctgggttcatgaagccactcaagagtcacctccctggaggagtgttcccaaggctgagtgagatgcctcctcctgtccctcagagctcttgggcttcctctggtcatggcactcactgtgcacagtgttgcttatttatgtgtctatctcagcttctagactggtgacatctgttggagggcacccttgagagtgtacgtcaaattgccttggggcttctatacaccctctccacctgcaacttctgcacaccctacgtcagggggcttctgacacccctctgcctaggggcttccaaccatcccctatgccttgccattcacagagacccagctgtgcctctcctactgcccagctgtgcctcagggtcttggtgtgaagatctcgctgtgacatagtgcataagaaaaacggttgggaatcattttctgagcaggggctccttgaggagaaggagctttgtctgcactgtgtctgtgcccccagggcccagcagagccaggcacagagatggggtgaagattgtgtgaggagggaggcagtgggagtttcctgcggggtggagtcaaggcttgagaccctgagaaaatagttggaagggaagccaaagctgaagctccactaccacagggcttcctgggcaggggcagttagagtcagtgcagttctgaacccagattgcaggcaggtggaggagtttcctttccaaatcccccagggtggcaatgcctctcattaccataaatgagaatggctgctaaatcctgcattaagctaaaaacttaacacccagtaaatatttattgatcacatgtaaccctgattaaccccaagagcactgggggctcaccaggccaggctacaggatctgcctgcctgctccagtttggtcagatcaggtcactctcctgcctctgcctcctgctctgaggtgtctctccttgaccacacccactgagcacaacctttgggccaggccctatgtgatgaacccatgagctcatcctggggaagaaaagagatgggcatatttcctccaaacctaacttgagcacaaactaaaataaggcctgcagaaggagctgtaacagggcactgattgtgagatttggagagtgggatgatgtttgcagagggaaaatgagggaaggcttcctggaggaggagtgatctgaacctaaccttgaaagatgggtggaaagaatgtggtaataggtcagggtcttggaggccattaaaagagatggaaatagcatgatcaatggctgggatgggggaagcacagagtgtggtggaggaagccctgggggctgagaagcaggcaggagaaatcgagtttagattttactcagtaggtgaagacatttatatgatggttcctttcccatcctggggcaactcttataggagcaaatattcaacccctgatggaaaccatgttaccgtgttacagcagtggagcagtggacagggaacaagtaactggaaagagggagaaatcatgactgctaaagcagggattcacaggacaaggggtgcttgcgaaaagccccagggtcctggggctctcgctgttcacctgagagaatctcatcttcacaacaggatcatgcactcccaagggagagactatgcagcctcctttgtctcctgcaaagcctagtacaggagaggaggaaggtcctggaaagccatgttgattcacagcccaattcctctctatcacacttgcctccatgccagaaattccaccattaacactgttcttctaattgagttaagcattgccctccatatattacattctcactctgctttcaaaatataatatcctctgtgctctctcccgatataggctgactcctaatgctccaaatcacttaaattatattcagtatgcctccctaaaaattaatcagatttaagttaacatactctgattctacagaaaccagctgacatgttgagcccatagcctgggctctctgtggaggaaacaaaggtagacacaggctgagcctgctttcagggagctcatggtcaaagaggaggagaggagacagggaacaagtaactggaaagagggagaaatcatgactgctaaagcagggattcacaggacaaggggtgcttgcgaaaagcaaatggaatgaggtaacacatgtataagcatctggctcatgcctggaggggagcaggttctcaataaatagtggctaagtttaaactccattccttcatttttctcaaaggatccaagacctggggactactatggcgtgaggagcaatgagaaccaacttcccagaggagccgtcctggcagctggggatggggaagggagtggtagctagatgtctgaacagggaaatgtctgaaggtttccccaacccagacttatctttgggcctgtttctggttgaggttctcagggagtacatgttgcaacctaccccatcccactcagcagaaataaactagcaccctacatctacatggttccctagccatccctgtccccagcctcccatggctgtgcctccactttggaaaagaaatctacatttcccatcctttgcacctgatgccacaattcttccactctgctgctctacataaactctcttgacattctccttttctctctctgtatgtctatctctctgcctccttctctctctctctcttttctttctctttctacctcccttttgtccccagccctcaatctctatggcatatggtgtgaaagaatacagtcatacatattttggaggggtcacctcactggcctccaatactgaaccagctgcagagagagcgagaagtggaaggcaaggttttaattctggggaagggctacctgatggttgttgcttcccatttggaatctcaccagcctctatcccttgcacctgccgctcttaaccccagcactccacattactcctgggcttagaggtcttccagcactcctgccatgtctcatttttttatgcccagaaacaagtaaacaatggctcagagagtggcacacccttgctcaaggtcatacctcaggcctgcggcagagctgggatcagaagccaggtttcctgagtgctccccacttcaatggccctcctgtggcactgactaaggccccatgaaagaaaaacactattggctacatcgtgtgttgtgcacacagtgtaccagccacagggcttcgtgctttgaatgactcattgaagaaacataactcatttataatgagttacagtcttgataaccctaggaggtggacactattattttccctatttcacagatgagaaaacttaagctcagagaggttaaagaacttgctaaaggtcaacagcagtgagttcacgttagcatttgattcaatccaggctttcttgcaccaagctccacgctcttagccatggcgagataatgcctttctgagaacccaggaattctgatcccagttttgaggttgcctttcttcccctcttctcagctccattctcccagataggattcgagcgtagcagggctctgtccaatctccccatgggatgagactgattccccaagcctagacgggtaatactgcaaccctgcttggtagcagcctggctggaggctgtcagccggctgtcaaccacaccacaggaaaagctggatttctccacagctgcccctgcagttcaaaggaacaggggcccagaatcttggctaggatggcctgtattatgacaggtctaggaaccttaaaagcaaaagacagcttaataatgcagcaaagaaaacacaagtcctttggcctggctcttgagggcagccagaagcttagcagggggacctgccaacaccaatcccttgtgctgtcggtccccctccggcaataggcacaatgttagaaaacacagtgcctgcccagtttcagccccttccccggacagtgatggcctgctccctggaataggcttggcggtctcctgcctgtacatgacaggcagcccgtgcgagcaccagccggccgctggcgtggggagggaaggaagtggggagtctggctccaataacacacactttccaggcacaaaagtgtggctattcaggcaaagatgctataagctccagcagctggggctgcgggccccaggctgccttcacaaatacactttcatgcttattagaaacactttctttcatgaccagggatttgttcattagtcgggctgggctactaacatggctttttacaagagagtcatggtcattgaatttggttttctagctctcctcaagccactgaataatggagatattaatgcaagaacaggtgggcccacctctcttaaagaaaacttctgagaacaggaaatgatataatatcagaaagtatttgagtatctattctgtaccctgcacctaccaggtacctttcatgtttcctgtgttccttccacttaatagatgaggaaactgaggctccaacatgagttaggacttgtggttgccctgtaaatagggaggggaactgggattagaacctggtttgtatgacttttgggcctggtgctttctccattatgccatgtcaggagggagaagccagttgccgggtgcactcatgtttgttctcactctttaaccatctaaaggaggaggatcccaggtcgctggaggccatgagaaaagcaaaaggagtcctgagtctagaagtcaaattggtaggaaaaccctcacagtgtttcctttgacctgcctcccttctgtgtaataactgattgaaagaactgagctttaactgtctttctagcaataatgttaactgcaggattcactggcatcacaatgtcgtagaacccacttggtaaggcaaattgaggtacctggctgtgggtggaacaaagagagggactaggtaaagtttttgcctcctctcttcttccaaattttccgtatttcttttcttttctcattaaaaagtaacctgagaagtgttctctcccatgaaactgtggaaacctggaaatgacctaaatgtggtctgtggccattagaaatgagaccatggatatgtatttaccttagtgggaagatgttcatgatatatggtgaactgaatacaggaagtttctgaagagtatgtataataataatcccatttttataactatgtattcatctatatgcacatatagagagagacacagacttgcaaagggaaatgtctagaaggatatacatcaaatgttaacagtgggtatcccaccagatggtggaattttataatttttttgtttgtgccttttacgatgattacataaaaagagaaaaaaagaggatttttaaaaagaggaaaaattttgcaatcagataattgattgggagaactcaggccaatcaagaagtcctctgggcctcagcttcctcatctgtaaaatgggcttctaccccacctccagagttgatgcaagggttagataaattccatggacggacctggtgcctgggactacccagtctgcacaggctcctattctctccctcctgtgcctctccttcactctcatttcctgtctcttgccacctcctctgtcccttttccttcctccattctgtctgcagctctttctcctccaagcctctctggccttttcttcaaccctcaatggccaaggagccagctcggccaggcacacaagtcccaccagtgtcccatctgggaggcagcaggccatggagggctctggctcctcataccatgtacagagatggttttgggagggggcagttccagcattctggaacacctgcccctgaggcccttctgactgctccttaggacagtctgtctgaactgcagctccccgaagacatagcggacttcctttacagagcttcagcgcatgaatctaggacggctgacaagggctggacatcaggaaggtctttcaaacctccaggaacctccagcaaaagcttctgctgagctcctgctgctcttgactttctgctttccaggccagcctcctgagtggcctgtgcggttggtcaccaactgaccttggctcctgccattctttttgctaggcatgctcttaataataactgacatctattaaatacgtgtggacacgttctaattttctctttaactgtgcaaggtagtgtgttagtctgttttgcattgctataaaagaatacctgaggccggataatttataaataaaaggggtttacttggctcatggttctgcaagcattacaagaagcatggcaccagcatctacttctggtgagggccgcaggctgcttccactcctggcggaaggagaaggggaccagccatgtcacagggcgagagaggaagcatgagagagaaagagagacagagagaaggggagagagagagagagaagaagaagaagaaggagaaggagaaggggaaggagaaggagaaggagaaggaggagaaggaggagaaggagaagggggaggagaaggagaaggaggagaaggaggagaagaaggaagaaggaggaggaggaggaggaggaggaggaggaggaggaggaggagccagactcttttaaacgaccggatctcatgggaaccaatagaatgagaactcactcattatcatggggagggcactaagacattcatgaaggatccgcctccatgacccaaacacctcccaccaggctccatctcaaacactgtggatctctccctccctcccttcccctcccctcccctccccatcccccccccccttcctcccttccttccttccttcctttcttgctttctttctttcttgtgggttgtatttatgtacttattttgagacactttggaactgttacccagggggggggctggagcacagtggcacaatcatggctcactgcaacctccaccttgtgggctcaagcaatcctcccacctcagcctcctgagtagctgggactacaggcacgtgccaccacgcctggctgatttttgtattttttgtagagatggggtttcgccaagttgcccaggctggccttgacctcctgagctcaagcagtcagcctgccttggcttcccaaagtgctgggattgtacgtgtgagctactgtgcctggcagggatcatgtttcaacatgagatttggtggggacaagcatccaaaccatatcaggaaggtattcttactaccttcatcttataggtgaggaaactgaggtttagagaggttaaataaagtgtccaaggtcaaaggctagacaataactccaattcatcctctaggacagacttccctaaaacctgactcctcagaaggcctttcctgactactcagccaggatcagggactcctcctgtcagctttcacagctctgtctgtccaggatggtctgctcattatttgctgaacggaaacagtcacaattaaccaacaaagttctaggatggccatgggaagtagtgagtaccttgtcactcagagagtgggagaatgagttggtgaccctcagtcacagagccatgcagtggaccggcactgggtagatgtaccctcccccatgggagtccaggacacttcttgaagctcaaagccctagagtgtagtagttagaaaaagcacagacctgtatgctgtgcgtcctgggccacgccatttctctctcggagcctgtgtcttcctctataaaacagaggtaaaatacctatcctcatatggcatagattgctcttttacctgcatgtcgattctctcctttttccatagtaataaaactcctcattttcatctgggcacatggccacccagaagagaccccatttctcagtctcctctcacagttaagtgtggccaaatgaccaagttgtggccaatggctcatgagcaggaccgacgggtctaattctgggctctgcctttctccttgcccaaggctggaatggccaggcagaggatggagccacctttgatcggaggcaattcctggtgatggtggagaagcagtgaaaggagcctgaaccctccatagcttcctggagcagagcgccagccccagccaggatttttacatgggggaaaatagaaatgtgtaatagaaagccagcctacctttagattgaatctgcattccttctaacagccttatagggtaattgtgacaattaaatgagataatgcacataaagggacacctcagcagggtgtaatgtgcagatggcattctggtggttaaattcattgtttccagtgagctgacccttgaggacccactctgcacaggcctggggagacaccatgccaagaccagtctcctcagaaactactggtgcaagttacaaccttttccccaggcctttcctatgacagaaagagtaagatgtgatagaatgatagaaagacacagacaggaggcagcaagtgactttctccttagataaagaacaggccgaagaactcctgagtcacagaagtggctggactgactcaggctaatgcatcgtctgtcagttctgtaagcgacactcaccttgcgaacaccaccctcatgtggacgggtccctggacatgggtcccacatggtcctgctccaggaggagcttatgggctattgcgagccccttgtgtcccctatggagccacagctccagagcgcaggccctcgtctcctctatccctgtgttgtctctatgctttctatgctgtctgtccaccaggacgggctacataatttgcaaggtccagtgcaaaaggaaaatgaggagctccttattcataaatcattaagaattacataacagcaacagcagaagatgaaataagcacagggacttgtgtgacacgcaggtttcatgcctgtgaaggaagccctgccacactgggtgccccgtgctctgtgccacacacagtaggcagtcatggagtgaatgtaatcagtgtggatcacgcaacgcccaagtactaaggcttcatcatcaaagcagttgggatggatgtggttttgtttttctttttcccaagcccaattctttgcatctcttggaggagggggctgagggaggcatggggatcagaggccagaggtcaaatagaaaacaaacttccctgaatgactgagtgggcaggagtgagcaacaggcatttctgagccgttctccttgtttcttgccacaagatataaactaatctatttagttagaaaaacatggtttattgcaattgaagtaatttgtatttctttttctaccacaagatgtaaactaatctagttagctagagcaagttggtttaactgaattcaaagtaattaccttccaaagcaaagcaatgtgtgcgttttttcagtttgtctggtttttaaatttttttcctttccagtattcaaaggttgagacatatatgtacttatgattaaataaaacccagccgtcttttggttttggtttgttgggaccttggcctttctggagggtctcagcctccatcccaccacctgggatttcccaaaaatgtgctggaggtggcatggaaaatccagtatgtgttctagtggaaaaacaatttgtaacaacatttcctggagtggtggagttttaactcattgagaggatatttaccatatgctgggagggcttagagagggcagcccagtgctggggagacactgggcttcgtctcggtcacctcaggttgggggtcctccggggcggcccttctgtgtatgctcagccttgtgagacaagggacactcactcttctcaggcccacctcgtcccaggagctggcaaggaagcatctcactctccctagtcattaccatctccagggcatgggggaagcctgaggctcagtgggaagaaaggacctgtggtggccacagttctaggaagcagcacaggccgcccctagcactcctaatccggaaccccctgtgccttccaccagaggccacagcaggttactgactgatttcaagtgtctgggcagctcttggctgtgaaaaggttcttttacttcttcagttcagttccccgaccaggcccagctccatgctctgtagccctctctttagcctccactccagggcagcccaacagacttttggggaaaatgactttgtccttcccaagcttctcctctccatgcttagccccagttcttacagttcctcgtagctcccaggttcactctcaccaccttcctatagatcgatccactctctcctgagcactcatgggcactgggtgctgccttttatccaaactgtcctggggctgggaacgggattaggctggagcaagccagtatggtttccatgttagctctctgcaagcgggatacttgggcgcgacctaagtgtgctctgcacccatcagaaacaacaccatttctgatggcagagaggcacccagtcggttctaggaaacccagctcactgtttacccagtgcctattttgcactttgtccccagacaaaggtgtctgacctttcctgcctggctttctaaatgatacttttgaatggctgctttgttgtcccttgaggtcccagcacatacccaagacaggaatgcatgcagcggtcagcaccccatgaatacgaaccgctatgaaagcagtccggggcagcatggagttcctgcttccctcttcccttcctttcctacctcatcatgctgccatcatctggctccaagagaagagcagccatgtcctttctagttgaaaacatcaggaaaagtacaataaacaattaaataaagaaacttaaggcaaggaggggaaagagccttctatgtgcctacacaggaaaactcatttcttttaatcctcctatcaactcctaatgaggggtactattgctgccattttatagatgagaaaactaaggcatggttgattaatttgcctaagttcagcaaccgaataaatggcagagtcaggctggggcctgtgtcattggcttctacagcccaaacatggcgcctgccttggtaaagtgctggaactgctcactctgtcgcagcttctcgaattctttgtagacttccaatgttcccaaacacaccataaggcaaagcctggataactggaaatgggggcaaattatccacctttgaaatcaattccagcacctggcaggtgacgtcgtgagccccagtcccaaagattacaaataccttcctttgcagttgccttggtaaaatgacccctggttgagaactagcccagggaatgcaagcattgcgcagacacaagagtagcaggaagagaggtgtctgacctgaaaccgctcacaagcacaagtgtttttcttagggagtttcctccccctcagctatttcaggctaccgtcctggtgacctggacagattccgcggtgcccgctgtgggaagagcggggagctccttggtgacagggagggagccagagcaatgtagggaggggctgctggaatgaatggagtgagggcccacagccagctcatctgcccaggggcagttttagcagcagtgtgcaattggataactgaaatctggggtgagtgctggtacacaaggagtggcttccaatacaaatagagaagactacgccagcgcccactgtgcctctttccctccattgccaaatcttccggggtgtctggacccggccccctccatagaaagagctggtccattggcactgctcagaaggcctgagtcagcagaatcggaaccaggtcttggtagaggatggagatggagttatcctttctgcaagggccagggaatgagcagagcttacctgagcccttcacttattcatccaaaggcactggctttaggctgaatgctgggggggcaaggatgaaccagatagacacagtcctctgtggcccgtgctctgggtatagacctggttagatgtccctgccttgcaggagctcagtcatggggaagacagacatgaaagcagcccacttcagtacagcgagacaaatgccatgaggcagattcattaacaaggagcagaggcacctgaagcataaggagggtcttgctcactggtgtattccaagtatttgcaacagggcctggcacacagtaggggtgcagttagcacatcttgttactgcaaggaatgaggagattaggtcgaggcattctgggcagatggaacatcatgcacaaaagcagggaggtgcaagagaggggtgacctatgcaggagactagaagcaactccagagagcattgcctcggtaggcaacagtagaatggaggctacagactcttctcaaaggcctctgaagttgggaataccttgctgaagttcacgcagtctttcagcgatggatttcagagccagaggcacggggacttacacttaacaagtgtattacacccaggccctacattggatcattaccatttgcatgtgtatacgctgcctggcccagtcccatcccactaacaggctgtgagagtctttactgacccattttacagatgagtaaagtaaagttccaagaggaaaataggtgcctaggttcacacagcttataagaggccaggcagggattcaaagccggtgatttaggacattccatgttcccacactccctggagtgcagcttaaatctgagatggtgaggtaggaacaagggccaggtctttgtgtccagctgttcatacagaaccagaactccctggctcctctcgcctttgggggatgtgctgtcagtcacagcctcctgtcacagggcatgaggtggctgctgctccctgtgccggaccctgggagctgaacatgcagggtaagccctgtcgtgcccccacgctcccctacccccaccaggcggtgaccccaagctgctgcgtagccatggctgacaggtctccgggagacacctgtttttcattgctggcccctgtggctctctggcagtgactgtgtttgttttggggaggagggtgcaggctgggaggaaaaagccttttctgcaggtctgcaaggacctggggttgctgaggacgccgcagacagccctaaaggggacaagagaggggaaggcacctctggagcagcagtggacaatggctgctcgcctgctcctcactcctcactagctgggcggggggcggggtttgagggggaaatgcagtctcagcagcagacggagatgaaatctgctgaggcccagcccttacagaagcctcccctgcttcaccacctccccttgcagctgttcactcattggttcatccattcattcaacactccaacatccactaaggagtccactactgttgggagccctggaagcacaaagatggatcaaacatgcccctggcatcaagggacttccagacaggtgggggaacactgaaggaggggaccaggcgtgggatgagcactgtgactgagggcagcagcagagggctgggtgaggcatgcagggctggaacagctaattactggggaccaggtcagtcaaggaaggcttccaggaagaggaagcactttgccaaatcttggaggtcaagtacaggtggaggaaagtaagaaataacatctcacagagggtgacgaaatggaagcaggagaaatttctgcacattggctgaatgacaagaaaatccacacaggtggagaagggcccattagggaagctgcaggacatgggccagcagtgggcagggtcagactgggggggcttgcaccccctcttctaacgccttcccacctggctcttctccttctctattcaaacccacttcacagttgccttctcttgtctcttttcttctccccattctgtttcacaccctccccagtgtatgaactgactgtgatcctgagaggcacagtcgagaaagctccaactatgtctcaggcactagccaaagcactgtacacagtttaacgtttgcacttaaaactgttctatgaagcaggtactgttttcccgtcttgcagatgagaaaacagaccctgagaggttaagtgatttgttcaagaccacgcacagctcctgcagagcagggtcagagacgcatccagacccaacagatggtgttcaggtgtcatggaccaagtccagcacgcaaggacgggctccaggactcccctggaagttggtgggccacagaggtgagaagagagagttccacaggccctgggcaggcagtccagataggccaggaaccccggaaacccttagaaagtgagtctgaaatgctgggtgctgaagtccaggatgctccactgagattctagcctatctttcctgccacagtgaatatccattccctcatatctgcggatgggtgggcgtcaggcagcaggctgagaggctattacctctgtcactcatgggacactcctcccaagttctaatgggctagaaaccagagttcttggccaggtgcagtggctcacgcctgtaatcccaacactctgagaggccaaggtgggaggattgcttgagcccaggagtttgagactagcctgggcaatatagtaaggccttgtgtctataaaaaataaaataaaaaaaaaaagccaagcatggtggcatgtgccatgtgcctgtggtcccagctacttgggaggctgaggtgggaggatcccttgagtccaggagtttgaggctgtagtgagctatgattgcaccactgcacttcagcataggtgacagagtgagacactgtctcaaaaaagaaaagaaaaaaaaaagagcaagagaaactagtgttctcacctccctcttgtcttttcctgaacaaatactcccggattctttatgatctatgacatgcatgttggcccgcaggcgtgtgctgctggggaagggctttagactcaggttggctgggtttggttggttgttttcatgaagaagtgctctttcccattacaaagcctcttaacatgtgctgtcctgtctcattcttgcaacagttattattcccattttgcatttggaagagctgaaggtcagaataaagtaatctagcagtcagaggtgctacctggatttagaaaagaaagcctcctatgtactctgcttttaaggcccagtcagaacatcaccttcactctacagcctgctgtggttccttgaagtgccctgagtggacctgagaccctggcagtaccacactgcatggaaggcaagggttcacctgtctgtctccgtggctgggctgtgaatgctttatgtgtctgcatagccagctcctttctggcagtcctgcacatggcaactgtgctacaactgtgtagcaagtagatgaataggaaaacattagccaccatatttggagaacagactgtctgtcaacaatggtgacacagagaatgtgacccaccctccgagttacatgctattagccacattttacagagaagagaacaggctcagagggacctgtccaagatcacatagctagtacgcagcacggcagaatctgaatccatgtctatctgattccaaacacagtggccttcactgctctcctgcccataaagaaattcttgttgagtttatgaataccccctccctccttctcttcctttcctccaactcaggcaagcaggggtagaggagaccacgtggaactgtgcacccagataataatcaggaagcctggccataagccaagacggggacggaaagaaaggactccaagctcttcctgcccagccagactcataccattctatgcctccatgcagactggggaaaatcagcgaccaaggtccagagtcagggctagaggtaaacatatccaagaactcgatctgagccacagtctgggctgtggttccttctgcctaggctgaccaaaagccaagggatttgggaagctcagctctaagtggccccagaaaaccacatcaggagctaacagatgttccttcctcctctctcacctggacaatccttgctcattcttacaggccctgttgggatgtcactcctctgaggtgtctccttggagcttagtcactccctcttgggctcccgcggtccgccaagctgcctactgtacaatcattgtgtgttgtggtcatctgctttattataggtctccccagttcgtgcaggcagagtgctctgtgcttgttaaatgagtaaaggaataaatgggtcagtgaataagtgaatgaatagacaattatctgaacaaatgaaaagggaagtaaataaatgtacagatgggaaaataaaagagagtgaatggagtaagtggtggctggctgggccagtgaatgaactgcatgcgctcagccctccccatggtgagctatccaaggagactgaaacatctcttagccatagagggctccagaaatctaaggggagccaaacagcaaagtctatcttaaaagctgcctggagctgtagtactatccctgttgggggtaacaggaagcagagaggagcttcctgccttcaaatctctccaagggaagctggaaaaagcagctccgctgctggttgggttccaccttatctgctggctgactgtggggaaatcagcacctctttatggactttggtctccccatctgtaaaatgagaggattggactggactagacagtttgtgaggaccatctagtggagcaatgcacagggcaagagttctaaggaggacatcactcaagggaagagaacttgcatgcccatgtcagttcctgtgcctgagctgggtcactgctccagtcagctcctgtcatgcccttccaacaaggcatgctaagtgcacagcactgcatgtcaagtgctcagaaggagggatatggtagggcttcctggagaggggggtgctggtgctggggcaggaaagagagggaggatgtaaataggaggagaggggttgagagggctcctggatgtcgcactgagcattagtgattgttcctttaggtaatgggacaggagatgaaagagatctgggaacagacctgcctcagcttcctgtacagactttacacagaaagctcaattacctttggagacattggtctgctactttctagttgtgtgtgagactttggtacatgtatagtaagatgagactcattatggcacctgtatcatagggttttcctgaggatcgagtggtggatgatgcccagtgcctggcagagtactcagtggctctgtgaatcagaggcaggtgttataattattcttgtacagtgaaggcagtgaaattcagagaggggaagtgatgtgcccaaagtcacatagcaagtcaaccctagatttctggatgtcctgtccctggcttaatccccgtcaaattagaggtcaagagggctataggtttaagaccatggcctctcctgtcctcaaaatgatgcatgacctagaccatgtgactctgaatcagagcactttccatccaaaagagtatttccccattcaaggtggccctggggaggctgggtgttttcccctgggggcagccccactggctctgccctgggttgctgcctctttggaagccactctggaagctgaaaagcattctttagcatggctctgaagtggggaaaccttggtcttctgagctggaagcagccaagatgtgcagtcaaaactcagagaaaaatggaatttagccactggtcaaaggtccctggcagtgcctgtcccctatcctgagctgtaactccctgcagggcagagaccctcttttccttattggtgtttctacagtgctgagcacagggttgcgtgcttaacaggtacttcaggatgaatgaatgaatgacactatgggagatctggaggacctcttagacatcatgtggtctatctcttgtactttatgaatggcctggcaaggggaaggggctttctcaaggtcatacagtcagtgatgcacacagaactgcaatccaccctcttggactcctctcggactatagtgttccttctgctgcacaactgccttaactatggaactacccattttattaaaggaatttagaaacacctttgaggtttgcactctcaacttgctgcaccatacttggcctagacacacactcactaaatgtttgtcaaactggaccacagaatttgatctgtgcttggtgctcactgaaacctttccctgccacatctgcacccttggtggtctcttcccaatttcagactccttaggaatgacaggtcacggtagaccaactgctgggtcagaatgacctgtgaatttccagaagtggagacgttttctgggctggagatgatgatctccaaagacacaaatatgcaagttgcctccgctgccagggccagcagctaagaaagacaagtcccaaggtggggctggcgggcagagcagaagcttcccaggtcctttccagattccttccaacaaccatcagacttccaaagggtctccagactgtgacacacacaactttcatgacaagagaggaaaaatgaagtcactgtttccctccaggcatcccagatgtctctctcttcccacccacctatgtgacagtgtctctgctgtattttagaactggattattctatgtttgtatttttgttgtatgttgcaaaaatgcttctgagaatctgataatgcagggctcagcaaagccaactgtctctaaaaccctctttggcttcacgaacttttatttacaaagcacctactatggatgtgtgctatgtgtgcgatggagtgtgctagaaattctgatgcaatgccaggagactctggccgtcacccttgcaacctcggcatctaataaaggaccctgaatccaaatacatagtagtcactgaataagtgactgtaaagaaaattaggggatctgatatgtattgagtacctaatataggctagagtctatacaagctcactaatccatacctcaactagaaaagtaggtctgtgatccccagttgacaagtaaggaaacatgttcagagagggaaagtaagctgtccatggtcacacagctaatgagaggcagaactggggtgcaggctcagggctgtccatctgcaaagcccacgccatttctgccatctgtgctgctgcagtcctccaggtctctgtttagccagcgggatgattaatatctacactctctcatctggttccctagataagcagcagtgtgagctggcctgggggagagggatccacgctgtggctaacatgtacctagcctactgccatggagagtggttacttgctatctctaccaagaataacagaatcaacaagccttggcccaggctccacaagaggccaagagcacgactgagtgggtgaccagggtcagggcctggtcagaggccaggtaggaatcactggggccaggtcagggctgaagcttgtggtcaaggactctgagtggtcaaggtggatcataacacagagtctaaaccttggcttcatcagcccacacagaatctagcacaattaaagaaaaccagccagaaagatgccaggggtggagttgcacaggcctgggctgcactctggcttcgcctgccactggctgggtaagtatgggcatctccctgggtctctctgagcctcagctgtcatctataaaataagataatgatatgcacctttgattccttcctttcctcacctcccagatccgatcacacacaatgctctgttgattccacctcctcaatgcactcaaatctgtcctcttctgttcatctccacagcacttcttcccctggaaatctagacttatttcctaagtttccacatctactccgacctccctctaggccattctctgcagtccactgatggtgtgcttttcaaaagaacaaatcttctcatgggactcccctgtttaaaacccttcaagggtccctagtgcccttcagctaaagtgaaagatcctgaatggccttataaagctcagggtctggcctcggccttcctctctgtctcaaagaggacctcccttccttgtgcactgcaaggcatgtacacagctgcttccctctgagcctcaaatgcgccaaggcctttcccaccttaggtcttcacactcgtggttccttggcctgaaaccttcctcttcaccaccttcccctgcccaacctgctcagccttcaggtttcagcctgagtgtcacctcctcagaggagccccctccggccttggtctcaggccacgccccatgccagtcattcttacatgctctgtactcctccttctctgagggattcatcaccctggtaattagacagtaatgcattcaggcaattacttgttcaagatgagtctcaccactggattctcaagagggcaaggaatgggtgtgacttggtggacgcagtatcttcagcacctaactgtgcctggcataaagtcaaggttccatgcagccaatttacaggatgaatcaatgaaccctgcccatccctgaccactgcacaggctgctagaggatcttgggaaaggatggctgagaaagggatttttcatcataactggctctttagatgtggatgatggttaattttatgtgtcaacttggctgggccatggtatccagatatttggtcagacattattctagatgtttctgtgaagatatctctttagatggggtgaatatttaaatcagtagactttgagtaaagcagattacttctataacgtgggtgggcctcatccaatcagttgaaggctttaagagaaaaagcctgacctccctcaagggagagggaattctgccagcagataaccttggactcttccctaggtctccagtctgctggtctaccctgaagactgtggacctgcacctttaaaatcttgtaagccaattccataaaatcaatctctctctctcactctctacacacatacacacatacacacacacacacacacacacacacacacacacacacacacacacacacacacatcctattagttctgtttctctggagaacccgacttatgaaagtggcctgagatttatggtctagaatgtttccggtctttattcagccttcagtatcactcaaaggggcagctgtagagccttgggtctgcatctaggattcaaggggaagttttcactctgccacggaatacgtgggtggcctcccccataccagagtccctgtccaggttcccacaggtggaaagggagtcacagtgaaatttaccggctcaagcatcttggctgcttccaggaactggactcagaagaccaaggtttacccccttcagaaccatctgaggaatgaaacaggctctcaggcagatcaaagcagaacacagtacagcagtgcattgtgaaatgaaaagtacaacttagggctgaaaagctcttctccccagcctacacctgatgctcagaacgtggactcctaccccggtacatggtcccttaaggaattcaagccaaggctgctttctctgagaacaagaggagcagtgattgggtaacactgaatgatgtaagatgatcctattagctggaacagatgcacccagccctttctgtcccctgtctagttcccaccttctcagacttgacccccagctgtggagggtgccaacagaacccagggtagactgctggacaaacgacgtggcattttcaaagcagtaattttgcctgctcttagcctgaaagaggagtggaagtaagcaagcagaggacacataagttcaaaacctcttcccaccactctgcttgcagtcacttctctcagtgaaagaaacttcctctggggccatctagggcagaggaccggtgctcccgctggcctgcctggggatgggaaaggtgcagggagctatccctcaccctttcttagtcatggtcccttagtgactaagaacctactcctgtgaaaagggcaagtctctgtctgcaaccagaggcagcgcttggctcagtgtggggccagggtcaactgttaggctgtgacccccaatggctttgattcctgggaagtcacctagcccagaaagtaactgaatctttctcttaatatttccagcaaactgatcaagcctttttgaaactcagtccagagatctcaccttctctacctcctaaggtaggatagaaactctcatgattccagtttgattagtttgacttccagtccttcttgttactctccctcaaaacatccctatcccatcctctggtgtccttacacagtttcatgaggatcttatagaaaatagactttaaaaacatattagcacttctcagagccttttatccttcataaacaaagaattcaaaaagtattaaggaattaaattgaaaaaagaaagcaaagaacaaggatatgaaagaagattttttttattttatactgaaaataattccgattaagattttacttcacgagattcaagaactgacctccaaagaaatgggaaaaaaaatctctgcagtgtaatagcaacagcaagtaacatttactgagaactaatcacttagcaagttctgttttatatactttctttcatttaatcctcactaagctactcagtgaggtagtttctattatctccatttcacacagtgctgaagatgctggagcctcatgctctggtttggtttaaattagatctcagaggacacagtttgtcctaaggagtaagtgtttctctcagagttcaagagatggagcttttctttctctgagcacttactacatgccaagcataggctaagcagtttacaagcattattttgttgaattcttacatccatttacaagtatcattatcctttcttacagagacaagaaagaaatgtctgaaaagtctaagctgccatggtgcaggaggagagggattaaagaagaggctggtatatatcttcctttatttatatctttattttctttcaatacattttgtagttctaggatagaagaattatacctcttctgttcaacttttccctgtgtcattcatataagtgtgatgcaaatgttataatcatttaaatgttatgctctatttgtttttgatacgtagaaatctaattgacttttacatgtggacacagtatcaagtgactttgctaaagtcacttgtttattcttataattcgtttttgatattttaggtaaatcatatgttatctacgaataataaaaaggaatcattccttctcaaaaataaaaagaagaagaggctgggtccctgccctctcaacttcttaccatgtcacagaggaaaaggcaccgaggcccaaggataagactggggaagtaaaatctcatacatacagcagcacggctccaatagtgcgttctattgcactgtagatctgcccgggccaagtcatggctcctgggggctcctggggatgaggtgttcccagcatctggggaggaggaaagcatcccagaggctcttgctccaggaatgagtgcttgtgcttcaaccctacttgatctgccaaggctctcccactttgcaggactgttggtcctggctgtgccaagcactctgtccttttaaaacccctcccttggcatccacctagaccacctccagatcctcccatgctgtgggataagatctggcggcaggccctcttcctgttgagaagggcaggcattactacccaatagttgtgggtacagaggggttggagagaatggggagggttgaggatagggcatagtttccaaacattttttagaggaaggaggccaagaggaattccctggggcatgcagcaccacagactggtgccaactactcagccctactcccttcctctccagcacacccttcctgccttgctttagagagctcatcctatagtctttgctaagcgctgactgtgtattcagctgaaggatgcaggttcagtatacatcctagttcccaggttcaagaagtaggttaaaaacaagatccacccacaaacaagtccatgcagcatacatctatacacaggcactatggtaggcaagtgctggattgtatgacgcaggccaagttcaaagaaaggattgatggaggtgagtgggaaagctgccttgaagacctttggagggtctagcaggactaagattgagaatggcacaagataagagatcattcttgggagggggacctgcatgagtgaaggtgaggacagaggctaagctggtcttggtgaaggcctggcacagtggccccagggctgggtgtgctgagaccaccagaggtgccgggtgcagccttcctgctctggctgagtcagtcttgcagccccgtctccctgacaatatggtaaatacagagcctataaatccaactgcaaacatccactcttccggtgccttctcccttccaagccaacaagcccaaagccatcccatggaacgtgagcctgccagtgccaagcactacggagctggctgcaggcacgtggacaggcttctgggctgaagctggctccttctcagagcacctccctccagagagcccaggcctgtctcagtctaaccaggctgcaagtgagggacagacagatgctccagcagccactagcagcagaaaaacactgaggccataaaaaaacactccatgtttgtcaggagggtcctccccattaggggaaatatgggggccatccattatgggaggtgcctactaaagaggctgatctccagtgtgccaagaagaagctgtcaaagggggaaaggcaccctgcaagcgctgttcctctctgagcctctgattcctcatctgcgaaatgggagacattctccttgccctgatctttgcatagaaactgaatggaatgaaaaagaattgcaagaataatcttcgcctgagcaagacctctgcttctctccccaacaagagtcaatctttctggatgggggacccttggagagggttaagcccttcgtattcaaagtgcagtcttggaccagaagcataagcatcccctggaagcttgtcagaaatgctgactcttgggccctacactagaacttctgaattggaatctgtattttaacaagatcctcaagtgatccgtgggcacagtaaagtttgagaagtattgttctagtccatggaacgtaaccccttcatgttaccagtgaagaagctgagacccagtagaaataagtcacttacaggaagccacacagtaaataagtggtagacatgggcccaagtagcagtgcagtgcaaaggaagaatcacaggccctgaaatcagagctacttaggttcaaatcctgcctctgccataacataccctatggcctaggaagaaagctaactaatttctctgaactttggttttgccacctgtaaaatgggtataataatagctatcttttaggattaatgatgaggattaaaatgagatgatgcatcagatgccttgcactgcatgcatttcatgtttgatgttcacaagctttgccttcatctgcactccacaacctctaaactccacaccccatgattattgggcccaagaatctgtgaaaagactgcttttctgcctccaacaatgcagacacagttgctgagctgagaagaagggaaagaataggaagagatagcaaggctcttaaagtctagactgacttatcctttaaattctgaagagttcccagtccaatcctctagcaaaaagtcaatctgcaaacatcatcagttactgtggtacctaagtgtactagtacatagcccatgctcagtaagattgatgaatgcaggactgaagggtccctcaggccctcactctgagctctttcaggctcacatccctcattttcacatgtctggattctggtcatccttcaaggcccagcctaaacatcatgtcctctgaaagttcatgactagatcccctgttggaattgatctcccaggtaaaaccctaactgctttaacataacttacaagactatctacctctcagccttgcattttgaccctagattagacaatttgcaggtctctgggcacagatgcttcttgcctcaaggcctttacacatgctgttccctttatctgcaatactcttctcgtaaagccccctctatctaattcctacccagcctttatgtctcagcctagatgttaatttagacatacatttttcctgcagaactgggactaggatgaggcaagcaaggcacctggagcacagaatttacagaggtcctgagtctcatgtgccaaccctgcacttgtgtgacttgaagagagagagcctccttaaattttgagtcctagatgcctcctttgcctctccctggtcctctggatgtttccttgaatcccctgctattttagagtccctgctctgtgccatcccctggtcatagtctttacttaagaggactgtgattgcctgggtgtttatcagtcctctctctgaactgttaagctccagagcaagaatacttcttccttgctccccatttcattctcagagcctggcagagggcagacattgcatcagcacttgctggatgtgcataaaagtgtcatctccctcatcctgtgctctcaaatcccactgaaggacccagtgtcctagcacctaccaatctctgccttctgatccacaaaactgccctcatctggctagactgcactcccaggggtcggccttcactttgcatgctcagaacccagctcgggacctggcagagtgggtgctcatgcgcatttgctgggcagggttagcactggaggaatgctgtaacgatgggcaatgcacactaaacctggtgtggacaactccagcaacatcctcatctccctcttcacctccaggctttccctgcccagctcctctttagccaaatgggcctgtcagaaacatctaactgtctctagctccatgtcctgagccaaatgcccttgcccagccccccaatgccctgctctggtatgaaaagaggtggttacgtgcatacctggctccctacttctcccacctccctgctccacatacataccaattctactgtgatacactgtgagaccaactctccctcgtctttggctccccaggcccagccagggaggtgcccagttctggagtggaggctgtggggaacagcacacccttccccttctccctgccaaaaggcagatcctgagccatggtgcgccaaggtttagggtccaatttcccagatgcctttcagtgtctgataggagatgccagagaagagaaagaccaggaggccaggtgatttatgagggaaatcttggctttgacaaagctttagccctagagattaaggcaggcgaaagcagagtgcacagcctcttcctgaggggtgttggggtttctctgggcatctggatctggatccctgaggatagcgctgagctcttggctgactccagctactcctcagcgccacatcctggagcagaacaaggcccctggtggcttaggaagtggggagagaggagctacgagtccgcgatagtaaaccaggcctgctctgcctgccctcctccctgctactgccctgcagaggcttcaaaggacagcaggagcctcagaactggctgtgtgacaggagacacacacatactttggcttatagttggcaacaaacaggtggagactaattttgccttcatcctctggtctcctcttcaaggatcccttatcccgagaaagaacatctcaagcctgtgaatcacacaactcctctctccctcccagtggccttcacctccagggctctctgtggttagaacatgctcatgtccctccctttacagacaggcagactgaggcccagaaaggaaaagggactgacccagggtctcaccagcagcttatgagacgagctgggacccgaccccacagctgttgattctcccttggtgctcccaaagaccaccccttcctgatgggagcaatgtaaaaaccgtggccaccttcaatctgtgacactgacattccagaatgtgggcatctgcttactttatatatcctgtgtcattcaccagaatatgggctctgtgagggctgagaccttttctgtattatcgactgctctatccccagcacctaaaacagttcctggcacatagaagagatcagaacaaatgggtgaaggaataaatgaatgagctaacgaatgaatgattatgtgtagaataggccacttgtcctgtacaggctttaggattccttcttttttaaaaaagtgagttgattattcttgcttcagctttggagtcctagattgttctagagcaggaagaactttagagagcctctaatgcaggcccatgaaggtatagccagatctttctcttttcgccaccagcagccataccccaccttatgttttctccatctggacacgtgtgctgagaagacctttggcagggggtctatgtccccactcctcagatcttggtgggttctgcaactactttgactgagacatcaggcagaagtgatgctgtgcctgttttctggcccaggactcagtaacactggccgttcccacttcctgtctcctggcatacatgcatgggttcctgaggtgccacgtgagaagttcaactatgcttctggagacaccacgtggggagggcaagtatcgcagctgccatctcccagccatacctgccttctagagggaagcttctagaactcatcacaccagcccagttgcctgcctaatacccgagtgaactctcaggatgctacagacagcaaaatggcccagctgctccctgtccaagtcctgatcccatggatcaagagcacaataaaagtactgtgaagtcactaagcctagggtggtttgtcacacggcaatagataaccccaacatccaagtagtaacaagtgctgtgagggaaataaagcagaggaaagggacaaagagtaacagggctgtacctctctgagaatgtctctgagaatatgatatttgatcacaggacttaacggagggttttgggcctgaatcattcactgagatgaagtcctggggaggaggagtttgagaggtgaaggaagagtacctgaaatcaagagttcttttatgaacatgttaaatttaagatgcctggtgcacatccaagaagagttgcagagtgaacacttggagactagtctagagctttagggtagagactgctccaattttaagacctctacatgatgtaagaccatccatgaggtaaacaacagcatcagtggaatgccaacatggattcaaggccatggagctgggtgggattccctggagtatagctacagaaggtgcaccaaggagaggaccaaatggctgaccaatggattgaacaaaagtggtggcaaagcagaagtgaggatgaaatagtgataaggattggattgagaagacaatggaaggcagtgaggacagacgtccgtggaggagctgagttataatgggaaactgagaaataaggcaggagctgaggagggatgtggagtcaagggagttgtttctagatgggagatcctatagcatgtgtgtctcctgagtgatcaggagagagtgagaaattgatgcagggaagagaagggataagcacaggagcaaaaattcgtgcaacaggagaaggaacttgtgattaaggaagcaagtgaacaagcgggtgtaatttatccacaagaacagccataacatggcagagccttgggttctcaaagaggagaagccacaggtaacagtcccagccccactatttaatggctggttgactctgcgcaagtcacttcttcctcatctgaacatggggattaatgatccctaactcacagggctgtcaggaggatcatagatactgacagttgtcaagtgactagttcaaagaacgggtggctcttacagcagttgatactggggttcttggtcccagaacgtgagcttgggtcatgtgatctgctttgtcatgcagcaaacctctttgagtctgagctttgtaattcagcactagcacagggcaaaggacatgagtggcaatgagcagaccaggaattgaactcagtctcccatctccttggcgttcagagccctccgtgagcccccatctcctgtcattttttttttttttttgagacgcagtctcactttgttgtccaggctggcatgcagtggtgcaatcttggctcactgcaagctctgcctcctgagttcacgccattctcctgcctcagcctcctgagtagctgggactataggcacccgccaccacgcctggctaatttttttttttgtatttttttagtagagacggggtttcaacatattagccaggatgatctcgatctcctgaccttgtgatccacccgcctcagcctcccaaagtgctgggattacaggcgggagctaccacacccaacctctcctgtcattctttaccttgcactttgtgctttggcagcaatgagtttctgatagtctcacatatgagactatgaaacaaccacactgctgttactcagctttatatctttgggaatgctctcctctctgccgtgctacctagaatgccattctccactttgatgtatataaatagcagctgagacattcccctccagagaaccttctctgactccctctagtcctatgtaggtgcccttccactggggctaaactcttgcacacactgctctgttggtacactgtgtgcccctggagagacagaacagagctccaatcatctttgtaactacagggcttgacacagtgagtatctgctgaaccaaacttttcccagatagcagatgaatcagagggatagacagcactgtccaacagaactttatgcaacaacagaaatgttctgtgtctgtgctttccaatacagtgatcactcaacacaagtttgtggttattgagcccttgaaatgtgctggtgcaactgagaaactgaatttttaatttaatttagtttaggtttaaatagtcacagatggctaagggttgttttattggacagcacaagttggagggtagaaagaaggggttggggaaaagctgatgttattaaacacttagtatgtgctaggcttttgacactctttagtatgttaatctttacaataattctgtgagatggcaagcactattttcccattttagacaaggaagttgaaccttagagagagagtcagtgacttgctgtgagccctcagcttggagactgcacagcaggtccctgactccccagtctctggttcatcccaccacactaggctgacctcacacctatgcagggcctggccctggaggtgctttgtgaaggagtcctccccattcccacaccccctcccacagtccctgcaggcacacaggtcaggcccacagccctgtcctagctggtaaggcgcattcttctggcagtgctgctgcatcactcacagacgtctgggggcagaggctgagtgtggtgaggcaggaggccttggctgccagcgggaggggcaggcgggcccagagcctgctagcattctgctccttggatctcccctcgcgtgagcagctttggggagttctcttggtgctgttgtaatttattgtttctgctctaatgattgctccatgtctgattataaatgccttctggctgggggcccagactcagaaaattcccgtgatctgcttccaaagctgatggagccacaaatgggactgatgtctctgtttcgtcatcggccacatttacaagggaggaggatccaaggccagacacagggcttagagtggagatgtaacaggaggcatctggtgacctggaattcccatcagagccccaacagggcatctcctgagtcctggagaaccttcaagatggtactcaaaagagcctactcccttcctctcaaaatgcaaggcagagtccgagttggaagcagcaggtgatacagtcacagtgaaaggggcctccgaaaaacactgtccaaccctgctaatgccctctctttatccacctggaaaattcctactcatgcctcaggaggcagctttggcatcctgcaagaagcctgctctgacacccacagcctcccacccgcaggtagacaagtagtctctactccctgtaaatctcttctagcatggcacaccataatcataattacacctactatttactgagggcttcctctttgccaggcaccatgtaccttatctatttttcacctcatccctgggagaaaggcactatccttatccacatttgacagactagggaacaaaagctcagagaggttaagggagttgcttaaggtcaaacaactgccaaataatggagctggacttaaattcagaagattccaacccaaaatttaagccttacaccacatgtgttcgcacccgtcgtcactgtattgcaacaggctgttttgtctcttgcttcattaaaatagagcttctggggacatatctgacctcaataacacgggtactcaggaaatgaccactgagcaaacttcacataaagaaagtcctagtgcactaagtaggtaataaaattagggcagtcacttattactgccctactgcaggatatttaagaggactcaaaaaagcaatgggcaaaggcttcaacaagcaagtaagataggactgcaggaaaaaaacactatatctcaactgggactgaaaagtcctgaattttctaggttagtcctacttttaaataccatatctcatcagttccttatgtcaccagaatgacctagaaaccccaatatttagatatctaaactgtatctcttatatgatatttcatgcccacgcatcccaaatatcccactatgtcttgtaatttaggatgcaggaaataaagccacagaaaaaaagagcttcaactttagaggaaggcagactcatgctcaaattccaattttgctgctcattagctgtgcaatcctggacaaactgtttcccttctctgagactcaaatgtaaaaatagagctaagagctgctgccttgcagggctgttaagcgtagtaaacagaagaacatatgggaaagcacccagaatggcacctggcacacaggagggactcaggaactatgaggtctctcctctctctcaaatgaggtcaggcaagaaagccattcttagcaacagactcagctgaatgcaaagggtgtgatgtactggtggaccaatgatcaaagagaagagattggtttacttggggctgaggtcatgaattgacttcttcatcatttatagactcacaatgagtgtggatgaaataacaggccaccctaagagcagccctacattagggcagatggaaagagatgggtaaaatcttgccccactcccaactaggagctcacagggtgctggagcagaaaaacaacaggaaaggtgaacagagaacccagcaggtatgagggcaaagggcagacagaccatgaggaggtctaccaagcctagagatgtcaggagaggcttgtggaagagctgagtcttgaggaagggatagaacttctaggaaagcgtatcttcagttacagaggagtgctgtacagacaaaggaaaaggcataaaaaggataataagttttaaaaattagtttgccactatatttcggattttggaggaagcttaaaaaaacctattgcactctccttgttgtcaaaggtattctgtttcctccgcttatgagctgcgtgatcttggccaagttaatcattcaatgcttcagttttctcatctgtagaataagtatgataacagtacctgccacattggaatgttctatggaataagtatgtggaaaccatttacaacacattgatcaacaaataagaatcatcatcatcatcaccaccaccaccaccatcaccatcactaccatcaccatcatgatcatcaccatcaccaccaccataattatcaccatcaccatcatcaccaccaccatcatgatcatcaccatcaccaccaccatcatgatcaccaccatcaccatcatcaccactaccatgatcatcatcaccatcaccaccaccaccatcattatcatcattatcaccatcatcatcaccactaccatgatcatcaccaccaccaccagcatgatcatcaccatcaccatcattaccactaccatgatcatcaccatcaccaccaccaccatcattatcatcattatcaccatcatcatcaccactaccatgatcatcaccatcaccaccaccaccatgatcatcaccatcaccatcatcatcaccactaccatcatgatcatgaccatcaccaccaccatcatgatcatcaccatcaccaccaccatcatgatcatcatcatcaccaccaccgtcatgatcatcatcatcaccatcaccatcataatcatcaccatcatcactactaccatcatgatcatcaccatcatcatcactactatcatcaccatcatcaccaccactgtcactatcatcaccatcatcatcactatcattgtcatcaccaccatcatcatcattattacaaatgagaaaactgaggcccagaaaatggaagaggtttgttcagggtgacttagagagtcagaggcaggccctgacacttttacttttctaccattcacagaatttttaggaaaaaaaaaaacaagcttcctgtcacaggtaagagacccaagatccttgataaaggagtagggttcatggaggtggggccacccaatgtttaagtgaaggtattgtctcttaaggccaatcattctgcctcctgccctgtggatgcaaactgtccttcagctcataccacctgcagccaaggacagaggggaacattccaaccccgatacccagggagataaatcaaatgctccagactcagtgaaggattgaagcaggggcagtgcacatgtctgtcatgacttccttgttccaagaggatatgggaaaaaactcctagctccccacctcaatcccacagtggtctccaacaatattatgattctccagttctactactcatgatatattttgccagccgcaaatggggcctaaattacatattgtagccaccaaacttccggcacaggcccacagaacaaggcctgagggaaattagatgaggccaaagggaactcaggcctggaagagactagaaaacagaaagggatgtatagtccattagcaggacccttctctcttttaagtgttatacaggtgagcggggttcaacgctgcaggcacagagaggccacagaaggtgaaggaaaggagagcagagaggccaagcaagagtaaactcaggattaaagagtcaaaccaccactggttattttagtcccagctctatctgtctctggagtatggccatctacaaaccttttcacctgtccatctgtttttctgaaaactatggtcctttctgtctcaagtcctggactaaacatagtggtggatagggaggtaggaagcagtggtagaaggcatctgctccaacctgtcttctttttggaagcactagacactgggaaaatgcatctttctcctctgctttgagaatagtgcatactccatgactttagcttactaacagctggagggatcccagaggaattcttctctctgggattgagaatgggaaatggagaagagagatctcccactttccttttactggaatcatgtgtccctgtctaaaacgatggtgttggactggattcagttcaactccagcaggaagcacacaacatttgagacctgtggggtgaagacagtgcacacagccggagagaaggtcttggctgagaaccagaggactcatttcttctggaagcagggatttgagatagtttcttggcaggaggaggataagaggttgactttaatgggttctgaatctcatacacagaaaagtaagagtgtgtgcatgagacagacagagacagagacagagacagagaggggcagactgacagaggggtgtgaattaggaggaagaaacagcttagggaaagatgagtggcatgcaggaaagagctttccaggctagggtgcctgggataacggtgatgaggaagagaacgaggatcacggagaccacatggtgaggagccttgaattcctaatgccaacccccccacccccaggattctgtaattatcattaattagtaagttccactttcgattagggtatgcaggcagaagatgggattgaaagcacaggcagagagttttgaaagtttttgaggtcaaaatccaataaaagccaacatgacaatgaagagaagacattcaatgagcaggctggtgcacacagaccaggataccaggatggatgttgtgatttaagttagagaagttctacttttaaatgttatcattaaatgataagaagattttaaatgatagtagtagtaatactaagaataaaataaggtagcagtgaagaacactgatgagagcttacagttatgcaggattgccatttgccaggtgccatgttctctgttctgtctgagttctcttttagtcctctcaacagccctatgagacagggacactgtaatcccctggacagaaaaattacgggagcttgaagaggtggagttacttgtcctaattcacccagctcatgagaagctgggctgggagtctaactctgatactaaccacaagactatttcagtgtcactgttacagacaggaaaactgaagcctccagaggacaagtgacttactcaaggtcacacaaggagtcctcctttccaagtccttcattcaaacataaactcagagcttcctaggaaccaggctctgtctagctcaggcctctggtaacttctggactattccatagcctccttactggccttcctgcctctagcctctcctttctagtccacctccctcccacactgaatccagagtggtccttctgagatccaagcaaaccttgcagagctcccaatgccccaggaaacactctatcatggaaggcccttcacgatctggctccaaccgaatttcctagccttccgttccccaccatccctgatgcaccctttattaagcttctccctggccctgatcaccatgtggtttcccacagggactcttgcttacaccgtctgctcctgtttacagtgcccttagaccccttctctgtcctatccgtaaactctgactcttcaagatgcagccttgctgaacctcccctggctcccaggtagaatggataatgcttccagcacccagcaccctgcagaattcttgtgcagcaggatcactctccttgcttcacaggtagctgagtagttacctgtctccaccatcagactgtgagcatctcaaaaacaagtcactgtgtccgacgatggcgatgatggaatttgttggggtgtactatggacagggactattattatataatacttgagaaaactgaggcgcagagacagaggaatggcccaagtccacacgctctaggaagaatcaagctggagctggtgcagaagtcacatgcctgcctgctgtgtcactactgcttcctggagagctctagatgtggcagatgtgactacacgttccctcccatgaactgaagatcagtggctgcagggccaggaccccacaggcttcctgagccccgctacagtgctctgtccccatctgccaggggggcttgctggacaggaccttgccatccagcttcgacctgagtcatctcctaaagtccaataaaacccagggacagaggcaggatgcaggaataaaaataagcttcagccagagagaaataaaggcagcagtgtgggggaatctcgagagcatggcagtccaggaatccggaggggaaaatgcccataatggcgtattttccagcagtgaaaaacattaagacccactttagaaatgtagttctcaccacagctattcctggactccagcccagaagagcagtagggccatatgaatgacactctccacccacacttacccactcccgactggctggctgtctctgtcccaaaacatcttgtgcttcttccgtgcagccttcccagacttacccctcctcctttctctctgtggccagaggatgccagagaagagcagcacctctgagactctcaccctggccactcctcatcctaaccaaggagaggagaggggacctattcaaggtcccagaacctcagtggtagagccaagatgaacaccaagttccttagagtagaagtccccaagcttccgctagccacactgtgtctcattaccctcccccgccaccagaccccatcctgataagcacacacgtgcatgtacacacacccatgcacacacatacacatctatgtgtacacatgaatatacacacaaacacacttgtatgcacacactcgcagacatacatgtacacacatatacacatacttgcacacacaaacacatagatgtgtgcccacttacccacaaaaatgcacctggttcaagaaaaagtgaactacattgagaactgggaaacctgacttccaatttacctggacactgcctagctatgtgaacctggctaagtcatttcacagtctcagttctccatgtataaaccaggctagtaatcaccttgcctacctctccaggctgtctgttacaaggttgaaaggagaggtgtgagaaggtactgatgagctacgctcacttgcctctgtctccttggaagctgatggcttggaagctcagaggcccagccacttgggtttgagtcccttctctgccacatactatctgtgtgaccctgggcaagtaagttcacctctctgtgcttcagtttcctcatctgcaaaaaaggaataattatagaacttagccaccaggttttagtgtgaggattcaatgaattaacacttgtgaagttcttggaacaatgcctgggctattataagtgccaataaatgttagtcaatggaataccattgtcaaattaatacttattaacttagctttgcctggtgcaacacaggagttcagtaaatgtttgtctaatgaatgactaaacactattggaagaggagggtgatgcaatcagatttactcacacctggtactgggagtaaatctgactgcattatggtctctctgaattaggttctgccttcctcttccttcttttgttctcagactccctggttcaccagggacaccaagagtccccagtaccccattcaggatgtcacgttctctacctatgggtgagcaaaagcctcctgccctctttggaaaataagcatggcagttcctaggctcattggcccagagcatttaagcacttaagagcagagcagggccagagctggaagtggttggaacggggtgaaggggacgatcaggggaggcagtggctccatagctgcagtgtttatacatttgcagtgtcctgctccagcaatcagcaagcactactccagaccaagtagggttcaggcactctgctgttcctctgcatgactcaaaggagatgtggctgctgctatgatgacactctcaggacatccctcaccacccacctactgccctcctgatcagaagaaatctcccagatcccgaggcttggatcaaaataatgatgactactgcaacaacaataatgttaatgacaataattttgcacatttaccaggttccaggcaggcattactttaaactctttatgcatattaatttatttgatgcttgtaacaacctaggaggcagatactattattacacttattttacagttgaagtaacggaagcagaggaggcttaggaacttgctctacacaggaagactggtaggggcctgagctgggatttgaatgaggctggcaatgtgagagctcatgcttcttacttgctatacccaagcatttactgattcgtcatttctaagtattttagttgttactggatttttcttttctattttgaaagcctaaacccaaacgtacttgaatccaaaagaagagcacaggctttgaagtcagggaacagtgggttcaaagtccaatcatttggttattctgagcctttagaaaagtttcttcctctctctgagccttggttccccaatttaaaaaaatggggataacactggttactccagaacggggttctgaagattcaacgaggacacgcacacgcaatccccactcaaggacatggcacatgactagtgtttaatccatgttagggtccttccatttttggcacgaaatttcacatgtgtgtgaaagatgccaatgttcccccacaggtaaactgtaaaatgtaattaatatcaagttataaagtgattattgagcttctacgtcccattattacaagtcaatattgtgcactttcagccttcatggagaaaggaggttgaaaaaagcacaaataatctcaaacaaaaaacaaatgcaagctcatttcattggttctacaccctaatgcaagaccttagttccacaaagatcacagaaatcagagtccaattcttcattacagatggggaaacagaggtccttagaaggacagggtcatatattcagctactggaagagacacccccactcacgctagaacttattctcctgactccagcctggtgtgctggcaccacaagaggaatgcacatttgcaacctctgcctcaaaaaagcaaaacaaaaacacaatgtagaaaatttcactgtctctctcttttccaactatacgtgagatgcatccagaaaacacacacacacacacacacacacacacacacacacacacacagaacacaatggaaagaaacatcagctgcaatttatgagatatgccttcaaatagaatttactggaactcaaccatgagcatttaccacacacctactgcctgccaggccccatgcttgttgctttacacacattatgtcttctaatcaatgctgacaatagtcatctgagattcagccagacactcaactaatcatttctgcaacctaatatatgctatgcactgtcatgagcaataaccagggccaggggccatcaagggaggcttcccagacctgaggcttggcaaagccttaaaggaggaagctacctggggaataaaggatgatgctgcaggacacgggagtgcatgagcccaggaatggaggggccacagaacatgaaattctcaggggtgtggagagagggagcagggggaatggcagaagagttggatccagctaggtcctatgaaaagagagcaaccttggcactgagctgtgaatggtgggaactctggatggtggttctcaagaaatatttgttgaatgaataaataaatgtatgaattcagagccagtggagaatgaagtaaagaccaatgggaaaaaagaaataaccattaggaagtgtctcagggaacagaagccaagacagagtcagaggtgcaagcaactcactgggagtaatgcttacgaaaggcaaaggacagaagaagcacaagtaggcaaggaaaaagttgactgtagtgcaggccagacatggtgaaaagagcaggtggaggaaggaagaaggatcaggtaggaagtgctgcagactgaagcccctctacacatttctcagcctgcccaacaagaagctccggtgcaaaaattgtccatacaggagtttgggcagaaatggtcaggcttgactgttagctggaagtctgccacttctctctactccctggcagcagactcttcccgaaggcagatgtaagcagctcacggacatggctaccacagtagaagatgtgataagcaggctgattccagaacaccaaggaggaaatagccagctctgtcctgggcaaacttcccgggagggaacatctcagaggagatttggaggttgagaacaaacactcattagatagaaaaaagggggctacaattcttggagtagaaaatgaacccccaaaggcactgatgcggggacaagtctgaaatgtgctgcaggacatgtagttcagtgattctggagcttaggaagggctggggaagttgggggtgggtggggaacagatctccaagggctgtgtatgccacgggactgattcagacttcacggcccaggcaatggggagctctgaaagaaggagttgtgtgtgcatttctgttttagatctctgtagcagcacttggagatagtgaaagggcaggaaggcagggaagcaatgttgccatgttccagggagacgatgagcccccaggcacatcttggattggacatggatgtagccgtagctctgagctctgaaactagtctaagggaaagaggcttcaggaaggattttaccaggtccaacaaacatttgcatgctttctgcctgtgttacagaccttaaagctttactagcctgctctcagagctttcatggttttcattattaaaaaataatttacatataataaatgcacctttttttggtgtatggttctgtgagttttgatgaacatgtacagtcatgtaaccacccaaattgagatataaaacagttccaacactccaaagaattcgtgtccctctgtagtaaaccctccctcctcctcagtccctgacaatcactgatgttttctgtctctatagtttttccttttccagaatgtcatataaatgaatcatttttcggtctgacttcttttcattcagcaccatgcatttgagattcatcaatgttgggcctgtatcagtagtttttttccttttgttgctgagcagtatttcattatttggatacaccacagtgtgttgtattgtctccccagtttagggatatttgggttgtttaaatttggggtagctacaaagaaagccactataaacatttctgtgtgaacagaggttttgatttcacttggttaaatacctgcaagtgggatttctggatgtggtaagtgtatgtttaatgttataaaaactgcaaaactgatttccagagtggttgtaccattttgcattcccagccacaatgtacaagatttgtaatagctccttaatctcatcaacccttgctattatcggttttaattgtagccactggattaactgtactgtagtactccactgtacttttactttgcatttttctaatgactaaacatgttaagcatcttttattatggtacttacttgccattcatatatcttcttttgagaagtgttcaaatcttttgcttatttaaaaaattgtatttgttttcttatcatttagttttgagcattctttatatattctaaagacaagttctttatcagatatgtaatttgctttgtctctgatcttaggggaaagtattttattttcaccattatatatgatattgcttgtaggttttttgtaaatgttctttatcagataaagttctcttctagtcctagtttactgagagtttttatcatgagcaatattgaattttgtcaaaggccttttctgcatctaatgagatgatcatatgggtttttcttctttagtctactgatttaagaaattacattgattgatttttgaacattaaaccagccttgtattcccaggataattcctgggtcatattgtattatcctttttatattttgctggatttgaatgactaataattttgttgagagtttttgcatcaatttaatgacacaaggggttttggtctatagttctcttataatttcttggccttgttttggtatcaggatagtcctggccttataaagctgggaagtgagttaggaagtgttccctcctctaccctctcaaaattttatattttgtcctttcactattctttgtagtctttttcatctgtgttactagttttgctaattcagtttgcttcagagactcaattgtgctacacacaatagctcaaggtgatgaaaaaagacaagtaagactaggttttttttttttccatatggaggtaaagagaaataataataataggtacctaccctttattgagctcctggtcttttccatgcattttactcatatgaacaccaaacctttgttgcaaccctgttatgccagctttaagcattttaaggatgagaaagtttaggcttagaagagggaagtagcctgtctaaagtcacattattctcaaaagcaagagctgtggtttgaagcctggttcaaagcttatgttcttcccaccttattttgtcatctctactaatgcttatgaacacctactaagtgccatctattttaaatcttttatttcttgtcactgttaatcactgcaactttatgagatttgtgctactttctcccacgttaacagcaaggaaattaagattcagaaaggccaaggacctcacccaaggttggtcaacactgttaggcaccaaacacccaggagtgatggggcaggaggtaattagcataatggcgtcattaacacatacaatatataactcatacaaagcagctttgcagagtgccacaactgaggcataaacagagaggctgaaggcaaggaagagattaattatgacttgggcactcctagaaagtgtacaggaaagaggtcaagcagccaagaccagaagacatggttggaggagttcgggcgtcaattgagttaaaaatcttggtaaacagcaaaggatggccatggcccatagagtgaataaaagccaaaacaaggaggtcatgcagctagattttccagtgtcatgacgctgatgctgagcagagctgacatgcactaacacaggaatagctcacatctgcagagcacttgccttccaacacattatctcccgcagctcacagggtgattacccgcactttataggtgaggaaaccgaggctcagagggtaaagcccctgctggtgactatacacaacctatcagaagctccaggcctagacctgattcctagtccagtactccttaagacagaaagtcaagcacagagcagcccaggtgtcatgaatctgaatgaagccagataagtaccccaaaaggctctgagacttttggtgacatggactcttaaatctgtggcaacaaaaattctggaatttggggggccgtgggctttggaatcttgaggtcaaaaggtctgaaattctaatgacgcaggccgtaaaatcttagggtcaaagattccaaaatagtgctaataggctctgggacagtggggatagagagacttgggcatgtaggcaaaggtgctgttatcctgagggcatatcctgagtgatggcttgccagggatgtcctttagggggagcagacagaccagctaaaggccaataagcaaaatggctttgcaaaaggtacaaggagtctagtcaaacattaaacttcccaatcaggccggaactgtcaccccagcaaacctgctgtgcttagagcacctggtggtaaacacacctatctcaggttgttaactttttacctcttcttgcccctggagacaggagacaaaagacaggagttgagggtcgagtacagccttcagatttaaacctcgaatgtctagacctccctatctctttccaaccctttaggtttaaaaaatcagaccatattttcattttcaagagaatgagggagaggaaatgcagctccaagacctcaccccaaattcttttctttgcacttggtttattgagaagaatacaaaattcttacccctccataagcttctaagaccgtcccaagtgacaaataagatgacctttctctctccttaacctcagtattcctccttcaaaatttcaagatgtttcccttccacttagttccttacacccgccacttctgtgcatctgaatcatctctctcaccaccctctcgccaagcctcctcatcacccctctctcacttttagtctccatctttctgtccctacatttccagctcccatgactttgctaagtttttaaattaaatcctcatgacaaatctataagactaatacactgacattaaccatattttataaataagaaaactgaggttcaagggggttacgtgactaacataagggcacacgggttgtaaatgtcagagctgagttcaaacaataactttaatgctattactaataatagtaaaattgctaatacatagtaagagtaactgcaattaatgctactatgatgcatgctgtgggacagacactattctaagcacttttaaaatattaaagtaatttttgagggtgatatggctattattattctcattttacagatgaggaaactgaggcccagagagctgagtaaattgcccaaagtctcaaagttctgtttgactctgaagcctgtgaagcctggtcacttccctgcccaactctattggcctctcccatcagtccactctatgattgtattttcttttctttcttttttttttttttttttttttttgagacagggtctcactctgtcacccagactggagtgcagtggtgcgatcttgtctcactgcaacctctgcctcccgggttcaagtgattctcctgcctcagccttccaggtagctgggattacaggtgcgtgccaccatggccagctaatatttgtatttttagtagagacaaggtttcactatgttggccaggctggtcttgatctcctcacctcaaatgatccacccgcctcatcctcccaaagtgctgggattacaggtgtgagccactgtgcccagcctatgattgtactttctaggctatggttcttcggatctgtgtccccaaggtcccagaaactttctagagaaaataatacatttttctgagaaaaagtccctgaaaatcaagacacaacatttcagatttcattcattcattcactcattcaaaaaataaacatatttaccaagctcctaggatgtaccaggcatggagcctacattccagtgggagagacaaaactataagaaggaggcaactaagtgccaagatttcaggaagtgacaaatggtgtaaagaaaggagagagaggtaggcggggcacagtggctcacgcctgtaatcccagcactttgggaggccaaggcagacggatcacgaggtcaggagatcgagaccatcctggctaacactgtgaaaccccatctctactaaaaatacaaaaaaattagccgggtgtgtggtgggcgcctgtagtcccagctactcgggaggctgaagcaggagaatggtgtgaacctgggagacagagcttgcagtgagccgagatcgggccactgcactccagcttgggcgatagagcaagactccgtctcaaaagaaaaaaaaaataataataaaaagaaagaagagagaggtaaggtgttcagaagcatgggcagcaggaaatcatgcaaatctaatggaccctttatctgtccaggaccagccacatacacacatcagaagagagctctgtgcagatgagctcaagtataaaggcccaagacagaaatgagtttgatgagctgaagaaacagcaaagttagaatgagatcagaatgggaaaagacaagggagatgatgaagctggagaggcagacagagagcacagaaggaaaacaggggccaggggatggctctggattattccacatgtgaagaatggcttcagccaagtcacaagggaagtgagaagagatggctgcagacaagcaaacaaggaatgctgagctcaccaacagaggctgcctcggtcactctcagcctctgctgattcactcgtctttgcctctaccagagtggtggaaaaatgtgtccccaaattttcagccaccaacacctccctatgtgaacttggcaagtcgctcagccccttgatgtctcctttattttttatctgcaaaaaggcaatggaaactccactggcagtggtgagggggcactggtgggaagggtactgatgctcacctgggacctgaacccttgggcctgcttccagtagagaagagggtttcatttccgtgggcacagtgccccacacagagcaggccttcaatgcatttttatgaactaaatgtcccaaacagagatctggaggtcacaggggcatggtggtcccaaaagtcctgcagggcatggtaagccaggctggactgatgggctgagacttcaggcgtcgactctcctttcctccccagcgccaagccaagcgggcagcagcaggcccactgcaccagaggcagacaggcaggcgggcaggcaggggcgagtcatcgggcacatggagaaaggagggcattgtctgctgaaacccaaccaaggggccagggccacaatgcgggggattcttttgggagaaacagacatggctttctttccaccaactgctgcttaaacagcccactggatttgattctatcccatttcaccccaaacaaatgataaataaataaaccttggtgagctcagagcactggagccaggaccctgagcctagaacagactggatgccgtcctcccagggccagggagttcctttgtcaggtgggcccgcctacactcctgctgccaggtatgtgggtgagtttgcagaggggcaggctccaggctaggctgctgcggcctgaggaagtccctccagatgtggggcacagctggttggctgtgccatctcatacccaaggtagagagggtggggcagcagaggaaaagatgggggcctggctgcagggaagcaggctgagcagtccctagtagcccggtgtcctctgacccctcaccttggtccagaggcttggtctggagagaccatctgcacagtcctctgaaactctcagtgaggtgacagcagtggcccatgcttctccccactttatatactagggaacaagtcccaaaagtgatgtgccccgctcaatgtcacaaagtgagataatcacagaatgccagaggttccctcccgtgtcctttttttctagatggtcaaactgaggcataaagcagtcaaaggcattgcctgatcccataggagctgggagttctgacccctgcatcgctcagcaccctcagtgccctgaagagggagcagcgacttctattgcagaagccttcttctgacccaaagcttcctccctggcactcactgcagttgggagaagtaagctacagcctcacctaaaggagccaggcattatgccatgtgccacactccaaggcacctacagtctgaggccccctccatgtcaggttcccatcctgcccctggttctttgctcctgttgagctcctatcctgctttccttcctacctgtccaaatgtgctccttcattgaggccccaggtacatctcctccaggaatcctcccttgctccctcctgcctctgctcatctagcccttcttacagcctctgctgcccattctgatagctgggctccactaagaccctgagcagacatctggtggcctttagataaggtgcagagggcagccaagcccacaatggccacaaacagaagaatgccaggctacttcaggcctccagtcccatctgctgactgctgttctctgtatctaagacaccctttctgctctttgtatggcagttcctaatcctccaggactccttccctgacactcgaaggcctcgagcacacctctccctctgtctcagcacctgtcacccactcctggactcacatgtgtctgtctatctctcccactagactgtgtgtccctcaagggcgtaatacattgtgcagagagaagggccacccagggctcctgtgacccaggccctccttgacttatacagtatttactgaacaccaaatgagcaaaatgaactatccccagtcttacagaactactctcccacatgacctgtctcctggaggacaccgaggcctccccaagggcaggtccagtctctttctcttctgggtcttctcgactatcagctcccagaggaaggtgcgggtctcctcttgccctgtcttttgggacagccgcactctgctgtgacagaaaagggactctgcctggctggcatctctggccccaggttctggtccaatccatggggcaactcagcaatccctagctaccattaggggaacatttgcttgggggaacatttgctttaattttcttagctcctgacagtgcataattgaaaaatgccacagaggactgcccagcccaagcagcccagaaaaatgggccgagagcaccaggcatgcaggtactgcacttgtcccagtgcagatgatgcacagaggggtgtggggcaactttgagaaagaaccagctttttgagagaaatcaggacagcataaatggaacacatacaaacgtgcaaaagcctaatttcttccttagagcttggagagacgcactttcacagcttttcatgacatcatgtcaaacatttccaggcatccaagacacagttttgccctaaatactgtgtattcaagtcacatggtcctttgcttttaaaatcatagggctggacacaggaagctccccaccctataccttcctaaaagctccgtcctaccatttctcagacaaaaggaaacctctcctacttacagaggcctccggggcagttggggtggccatacaatcaggcaacctgtaacttaccagctctgagaccttgagctagtcacttcacctctttgagtccccctactttcttaaataaaatgaagataatgaatcagcacataagccagtatcccaaggttgctatatggattaatgaaataaaatgagttctgacctttatgcctggcttcagaagacacttaggaaatgtgagtttcttattctttcacctagcttggggtttggtggctgagtgggggctgaatccacccagtgcctcccactccagtgctccagtgctctttctagtaaatggctcagcctccctcatagctgttcacatgaattcggagaatcagacaacgtgagctcccttctgtctgagtggccgactctttttcttctttcaagagttctcattttaagaatgtataacatttaattcaaactggcatttcttgagggcctactatgtacccagtcatgggagaagctcaagtcacagcttcacaggattgcagagacaagaaatgcaagtaacaaggaaaggccagtgagggtcactacagattcaaatcacggtagagatggtaaggaggtgactggcaacttggagatgagtgattcctggcagctggaagtgtggggtatgttccccaaattggacttcctcccctaccaccttccactctgactgcagtctcaaaggccatggctgaacacccaggggcttttccaggcctccgtttaccccatttccctccctttccctggaaactgtctcctcaatgggctgatatccatttgggagtcactacagtatcaagtactagccagggctgtggcaccacagagaaaaatcagacctgcaaagctcacagtctagtggggagaccctgaataaagcaggtgactgcaatagaatctgacaggtgctatggagagggaggagccatgggcttacagaggagggaataactaaaatggtgcttgggacaggaactgctgagagttttcaaggagagacaacaaacatttgagctgtcatgtgaataaggtcgtggggttgagctatgtgcatgtcactgtgtgtgtgtctgtatgtgtgtgcctgtgtgttgcggagaatggatttcagcagaggggccaggctggacgaagttgcagaagctctcagcggctggcacagcaggaagttgcactctttttgcttcctgcatctctggccatggtgacccttgccttctgaggctgccacatctcctcttcctgctcttagctccaggtatggctgtggtcccaacttctgtcattggtctcctctctgtctctgtgctccatccctccaagcctgtggcttcggctctgcccagaggcctcccacatcttcatctccagcccagaccctactccctagggcccaactgcctgacagcctgtccacttgagtccttcacattcaccttgagtcctgtgggatggaaatggaattcctttctacccacagctggcctcttggcctctcctcctaaacagtcccccattccccatccacacatgtcttctgtagctcatcagccactaagccctagggctttttccttcatgacatttctcccatctctcctttcctcagtttctactgcctccacctaagccttttcattttccagactatagttacaactactacgttaagaaccttctcccgctgtttctagtcacctccttccccagtccctttctccttccaccacctctcccaaatcccgcctgttactgatccagttgtctacagcacagaatagtacagactccacgtcaccatctgatccattatcctaatactcaactctgactataactgtctgctcaaagaatggccagtggctcttcaccaccagctcagccttcaaagctccccattctggccttatctcctcagtctgatctcaggcttctcccctacaagcactgaccatcacttcattccaaacacacaaatttactcatatttctggatctcatcatgcccaagcccacctgaatctccccttgattccttcctctgcctggaatttctcagctctggtcatccaagccctaaccctccttctaggcctcatttcaactctaaggccctcatgaagcctcctaccccaactcattagcctcagatgtctccaggaccccctcccatccaggcttcaggtcactgctgactgtgctcatgtggtccttgggccaagcctgccaggccaggagtccactgctcagcaaccccaggagggggacagatagtctggctaccacagatttcagttatacctgcaaggaactctaagcagcctgtacctcctaggctgctgcctcagtctccttgcttggcacatagatgaatctctgtatcctggcctacctagttggcttctgactgccctgcctgatcttgccagtttcctggatgctatttgctaaacttgctgccattcagtaagagtatgtgggggtgggaggtggtgagaggtatttgttgctcagaaccacaacaaggaggaagctgctggtcacttaattttgcctatgatctcctgcctctaccaccatagaaacccacccaccacataagacctgaagactacagagaactacagcttcagaaacccaactcatggaggttccaagatggccaaataggaacagctccagtctacagctcccagggtgagtgacgcagaagacgggtgatttctgcatttccaactaaggtactgggttcatctcactggggcttgtcggacagtgggtgcagcccatggagcatgagctgaagcagggcggggcatcgcctcacctgggaaactcaaggggtcggggaattccctttcctagccaagggaagccgtgacagatggtacctgcaaaatcgggtcactcctaccctaagactgtgcttttccaatggtcttagcaaacagcacaccaggagattatatcccatgcctggctcagagggtcccatgcccatagggccttgctcactactatcacagcagtctgagatcaaactgcaaggcggcagggaggctggcggaggggcgcccgccattgctgaggcttgagtaggtaaacaaagtggtgaggaagctgaaactgggtggagcccaccacagctcaaggaggcctgcctgcctctgtagactccacctctgggggcagggtatagctgaacaaaaggtagcagaaacttctgcagacttaaacgtccctgtctgacagctttgaagagagtagtggttctcccagcatggagtttgagatctgagaatggacagactgcctcctcaagtgggtccctgacccatgagtagcctaactgggaggcacctcccactaggggctgactgacacctcatacaaccgggtgcccctctgagacaaagcttccagaggaaggatcaggcggcaacatttgccattctgcaagatatgctgttctgtagcctctgctggtgacacccaggcaaacagtgtctggagtggacctccagcaaactccaacagacctgcagctgaaggtcctgactgttagaaagaaaactcacaaacagaaaggacatccacaccaaaactccatctgtatgtcaccatcatcagagaccaaaagtagataaaatcacaaagatggggagaaaccagagcagaaaagctgaaaattctaaaaatcagagtgtctcttctcctccaaagaaacgcagctcctcaccagcaacagaacaaagctggatggagaatgacttcgacgagttgagagaagaaggtgtcagatgatcagtaataacaaatttctccgagctaaaggaggatgattcaatccatcacaaaaaagctaaaaaccttgaaaaaagattaaacgaatggctaactagaataaacagcatacagaagaccttaaatgacctgatggagctgaaaaccatggcatgagaacttcatgacgcatgcacaagcttcagtagccgattcgatcaactggaagaaagggtatcagtgattgaagatcaaatgaattaaatgaagtgagaagtttagagaaaaaagagtaaaaagaaacaaaaaaagcctccaagaaatatgggactatgtgaaaagaccaaatctacatctgattggtgtacctgaaagtgacggggagaatggaaccaagttggaaaacactctgcaggatattatccaggagaacttccccaacctagcaacgcaggccaacattcaaattcagtaaatacagagaccaccacgaagatattcttcgataagagcaactccaagacacataattgtcaaattcaccaaagttgaaatgagggaagaaatgttaagggcagccagagagaaaggtcgggttacccacaaagggaagcccatcagactaacagctgatctcttggcagaaactctacaagccagaatagagtaggggtcaatattcaacattcttaaagaaaagaattttcaacccagaatttcatatccagccaaactaagcttcataagtgaaggagaaataaaatactttacagacaagcaaatgctgagagattttgtcaccaccaggcctgccttacaagagctcctgaaggaagcactaaacatggaaaggaacaaccggtaccagccactgcaaaaacatgccaaattgtaaagaccatcaaggttaggaagaaactgcatcaactaacaagcgaaacaaccagctaacatcataatgacaggatcaaattcacacataacaatattaaccttaaatgtaaatgggctaaatgctccaattaaaagacacagactggcaaactggataaagagtcaagacccatcagtgtgctgtattcaggagacccatctcatgtgcagagacacacacaggctcaaaataaagggatggatgaagatctaccaagcaaatggaaaacaaaaaaaaagcaggggttgcaatcctagtgtctgataaaacagactttaaaccaacaaagatcaaaagagacaaagaaggccattacataatggtaaagggatcaattcaacaaggagagctaactatcctaaatatatatgcacccaatacaggagcacccagattcataaagcaagtccttagagacctacaaagagacttaagactcccacacagtaataatgggagactttaacaccacactgtcaacattagtcagatcagtgagacagacagttaacaaggatatccaggaattgaactcagctctgcaccaaccggacctaatagacctctacagaactctcaaccccaaatcaacagaatatacattcttctcagcaccacatcacacttattccaagattgaccacatagttggaagtaaagcactcctcagcaaatgtaaaagaacagaaattataacaaactgtctctcagaccacagtgcaatcaaactagagctcaggattaaaaaactcactcaaaactgctcaactacatggaaactgaacaacctgctcctgaatgactactgggtacataacgaaatgaaggcagaaataaagatgttctttgaaaccaacgagaacaaagaaacaacataacagaatctctgggacacatttaaagcactgtgtagagggaaatttatagcactaaatgcccacaagagaaagcaggaaagatctaaaattgacaccctgacatcacaattaaaagaactagagaagcaacggcaaacacattcaaaagccagcagaaggcaagaaataactaagatcagagcagaactgaaggagatagagacacaaaaagcccttcaaaaaatcgatgaatccaggggctggttttttgaaaagatcaacaaagttgatagttagcaagactaataaagaagaaaggagagacgaatcaaatagatgcaataaaaaaatgataaagggatatcaccaccaatcccacagaaatacaaactaccatcagagaatacttttataaatacctctatgcaaataaactagaaaatctagaagaaatggataaattcctggacacatacaccctcccaagactaaaccaggaagaagttgaatccctgaatagaccaataacaggctctgaaattgagacaataattaatagcctaccaaccaaaaacagtccaggaccagatagattcacagcccaattctaccagaggtacaaagaggagctggtaccattccttctgaaactactccaatcaatagaaaaagggaatcctccctaactcattttatgaggccagcatcatcctcataccaaagcctggcagagacacacacacaaaaaaagagaattttagaccaatatccctaatgaatatcgatgcaaaaatcctcaataaaatactggcaaaccgaatccagcagcatatcaaaaagcttatccaccacgatcaagctggcttcatccctaggatgcaaggctggttcaacatatgcaaatcaataaatgtaatccaccatataaacagaaccaaaagacaaaaaccacatgattatctcaatagatgcagaaaaggccttcaacaaaatgcaacagcccctcatgctaaaaactctcaataaactaggtattgatgggacgtatctcaaaataataagagctatttatgacaaacccacagcccatatcatactgaatgggcaaaaactggaagcattccctttgaaaactggcacaagacggggatgccctctctcaccactcctattcaacatagtgttggaagttctggccagggcaatcaggcaggagaaagaaatgaaggggattcaattaggaaaagaggaagtcaaattgtccatgtttgcagatgacatgattgtatatttagaaaacccgattgtctcagcccaaaatctccttaagctgataagcaatttcagcaaagtctcaggatacaaaatcaatgtgcaaaaatcacaagcattcctatacaccaataacagacagagagccaaatcatgagtcaactcctattcacaactgctacaaagagaataaaatacctaggaatccaacttaaaagggatgtgaaggacctcttcaaggagaactacaaaccactgctcaaggaaataaaagaggacccaaacaaacagaagaacattccacgctcatggataggaagaatcaatatcgtgaaaatggccatactgcccaaggtaatttatagattcaatgccatccccatcaagctaccaatgactttcttcacagaattggaaaaaactactttaaagttcatatggaaccaaaaaagagcccgcattgccaagtcaatcctgagccaaaagaacaaagctggaggcatcacactacctgacttcaaactatactacaaggctacagtaaccaaaacagcatggtactggtaccaaaacagacatatagaccaatgcaacagaacagagccctcagaaataatgccgcatatctacaaccatctgacctttgacaaacctgacaaaaacaagaaatggggaaaggattccctatttaataaatggtgctgggaaaactggctagccatatgtagaaagctgaaactggatctcttccttacaccttatacaaaaattgattcaagatggattaaagacttacatgttagacctaaaaccataaaaaccctagaagaaaacctacgcaataccattcaggacataggcatgggcaaggacttcatgactaaaacaccaaaagcaatggcaacaaaagccaaaattgaccaatgggatctaattaaactaaagagcttctgcacagcaaaagaaactaccaccagagtgaacaggcaacctacagaatcggagaaaatttttacaatctacccatctgacacagggctaatatccagaatctacaaataacttaaacaaatttacaagaaaaaatcaaacaaccccttcaaaaagtgggcaaaggatatgagcagacacttctcaaaagaagatatttatgcaaccaacagacatgtgaaaaaatgctcatcatcactggccatcagagaaatgcaaatcaaaaccacaatgagataccatctcacaccagttagaatggcgatcattaaaaagtcaggaaacaacaggtgctggagaggatgtggagaaataggaacacttttacactgttggtgggactgcaaactagttcaaccactgtgaaagacagtgtggagactcctcaaggatctagaactagaaataccatttgacccacccatctcattactgggtatatacccaaaggattataaatcatgctgctataaagacacatgcacacgtatgtttactgcagcactattcacaatagcaaagacttggaaccaacccaaatgtccatcaatgatagactggattaagaaaatgtggcacatatacaccatggaatactatgcagccataaaaaatgatgagttcatgtcctttgtagggacatggatgaagctggaaaccatcattctcagcaaactattgcaacgacagaaagccaaacaccacatgttctcactcataggtgggaattgaacaatgagaacacttggacacgggaaggggaacatcacacgccggggcctgttgtggggtggggggatgggggagggatagcattaggagatatacctaatgtaaatgacgagttaatgggtgcagcacaacaacgtggtacatgtatacatatgtaccaaacctgcacgttatgcacatgtaccctagaacttaaagtgtaaaaacaaacaaacaaataaataaataaaaagaaacccaactcattgactgcagcccagcaatagattatttcctattgtagctcctcttcctttcaccccttcacccatctagaaactgaggtgtcctacagtttgctctgtctctcagatcctgatacctgccccctttgcccttaataataatatcagcatgaacaacagctaatgctcaattagtccttaccacgtgccaggcactgctctagacactttacatatgattgattcatttaggcttcacagcaaccctttgaagtaggtactgtgattcctccattttatagatgaggaaactgaggcactggtacaaagtggtgaagttagcacacaaacccaagcaattcagctgcagagtgtatgctctatacctctctgtttctccccagatcccatctcacccagtggggccaccctgcacactgatgcattctgactctagcccaagggctcttggtgaggacaagccatgtattgagcacaaggctgcctccattcacaggaaggggtatctactcccacataacaaagatgccatgcaagcaggcctgctgccccgccgtgaaacacaattagcctccctggtttacctctgagttggaattgaagctctagaattttggcatccatccatccattcattcattcactaaatattaattgtatgtgggatgccattagatgcagggagaccaactatgtctgtgccagggcagtgagcacagactgacttaaacacacatacgaatttatctgatggatcgtctcccaaagacagattaacataacaggtttctggaagcagggaccatctcacaaataggtgacttgcaatatgcattcactggatattcaagacatgcatgttgaatacagcgacagatggcaggtgacatctggacaaggcttggaagtgctctgctagccccatccccaggttacaggtggtgaacagagagaccagcaaagcatcagagcccatccctcttgattctcaggccagggcattttcccactgccaggagctgcctcttagggaccaaagcacttaggagaaaaagagcaggcccttgctttaagccaggacataaagaaacatgagagtaacttcaattaacccagaatgtgggaagaattttgaaggtcagggaaatggaaaaggtaagtcatgaaaaaagttagcattcagcagtggagataaactgagctgataaacggcctttgaacatttgggttatttatttatttgcttccagtccttgtgcagttgttaattctggctaaaatttcccagtgccttgcttgcatgtgtggtacattatgtacccatctggcagcaagactgacacctcccctggcaaccgtcctatgaagtttcaaacacacttacatgtttgcgtcccaataacaacaagacagaaagggaacagaaaaagaacaccccggagtttactgcgctgactctctggcggagttaacaacgtctagtctgcaacaggagctcaacaaacatgtgagcaagtgaacttgggccaggcccaaaggccagactgagacacctcatgaagcaaaagaaagatacaggccatggtcaccgtgaggctaccatctgaggtcccctttgcagaaataaagataatttgttctggagtgttgtttttttccccctacattccccctgcttaaacaaaccctggtgaaaagaactcctgctctgattgtccatggaaagtttccctggaatgttggaccgagtttctggaatgtatagatttaacgagccaatttggaaattaacagagatgaaaaggaagcgttacggtcacattacacactgaattcactacctgagtcaggcccaaggggtcaaggaggttccctgaaacttcccatgagtgggcttagcaggttccagacccaaaaccttgtccaacccgcagttttaggggagagtccacaaagatcaccaatagacttgctgaggaaggagcacaaacttcattaagaattctgaaacactgtataaacatcgtttccaaactttttactgagataagacctgcctacccttagactactgagtgtcatgttttgaaatattttccctattaaccaaaccacatccctgtcccaaatgattgtgtcaaattgccagtccaggcttctaatcaggaaaaagatgacagagtttgagccatggatattgatatattttggggggtagaaacttgaaattttagttatctttatttgcctctagcaatttgtttttaatgctgaacagccttgggatttcaactagggtattacggtaacaccatattactgtattccttcatgtctagggagctctggggtccaggccggacttagttacttcatccagtttctctcatgttgcaaaggaggcagtggaagcccagagagaggaaacaatgtaccggccaggcactgcataagtcagagaccccttggaagccctgcccaggaaggatgcggcccccacttcctaccccaggcagacaccatttcttctcatcccagatttttacctaactctttacagccttttctcctccattcagggcactgagccatctgactcgatcttcaaagaataagtcttttttgtttagagatgtactaaggggctttaagcattgcacatgattcttcctcaatagcctttgatttttcttccaggacttgatcaaataggttcaactcaagcatcaagaccaggttgcggtttcaaccaaagccactagggaacagggaatatcccatcagatttggcggggggcgggggggggtggaggggggggtggggggggtggatggggaggtggggggaaagtttcaacaagagtacaagtctgacttttctgcaaaattggggctacatctctgcattcaaaagcgacagggtgtctggcaaggtccaggacaaagttacagatctggacttgaaattaagcatctccttccctgcaaaaaaaaaaaaaatctccttgggggccaggaagtctagtgcactcctgtggatgaagcccaggcagagggagggcaaaccagatgcccctggactcactttggcaatatctgactgccccttccctccccttttcctgagaatgtctgccctgctgacccgggccccagccctcccccagccccaaccccaaacccaggggacactgggggagtctgtttctgaaaggtctctgacaaggtgcccaatacctaaatgtgacatcacacctctcttcccacttcagtacatggggaaatggggctacctcttccttcatgacaccatgtgatctggcgttgttttaagtctatgttgagtctcttctacttctaggatactaggatgaccactcaggatttcagatcatgaagagcaagggtactcgaagaagggtctggaaacctaaggctatcccagacccatggagaatagagcaggaaaggaagaatctctgactctcccatctctattccccctctatcccgtcaagaagaatattttgcagcagacacccctcactgtttatgaagggggaaataacctaaacaaacaaaaagccccagctgcactccacatcacagccatatgaagccatacatgtcacttgaagaactgtctggcgctgtttacaaaaaggcctattaagtcctcttgaaggtcagcacggggtctgagggtttgagtcccatataccaactcaggcatagacagcagggaggtggcagggctgtgtgttatgacgtctggaagtgccagggcagggggctgtgggaacccttaggaaccctggcactgctccccaacactgacccatgtagcccagaacctccaatgtgactctggaaggcagcctggccacgcttgtcagtatttatggccacacggctgggctcttgacttgcccagctgtcagctgacaccaaagaaaatgtcacccatttctagttgttaaggtgaatatctcacctgaggaggtgagaagggacatatctccactcagctttcagtgggatgacaaaaaggaggcgctcaccagactgcctgctgagtacatgacagaaactggtgattccagcccacctgggaagaggagtgctaagctgagccacatgtatacagtagatgtgcagatttatatttggctaacacagctttgccaatctcaagaaggaatttaaaatcaatcaggttggcctggtgcagtggctcacacttgtaatctcagcattttgggaggccgaggtgggcagatcacttgaggtcaggagtttgagaccaccctggccaacatggtgaaaccccatctctactgaaaatataaaaattagccaggtgtggtggcgcacacttgtaatcctagctacctgggaggctgatgcagtaggatcgcttgaacccaggaggcagaggttgcagtgagctgaaatcacaccactgcaccacagactgggtaacagagcaagactctgtctcaaataaaataaaataaaataaaataaaataaaataaaataaaataatcgggtcaatccttcaaatacacagtttagtgtagttcaataaagttgaacaaatcttaaaaatgggagaaaaacagttcaatagcttggcagatgtttaaatccccttgaccatgtgcttggatggttagtggcctggcctctgctggcacacagctccttgacaggagctcataccctcaaggcagctattctaagactggacttctcttttagcaagttcttcctactgagctgaaattgcctcctggaagcttttattcactaagcagggccataaaaaacacattagatcctggtgcttagagacagcccttcagaaattgaattagctgagttatccacccctcactatgtattatgagtgtatgtgaataagcaagaaaacacacacacacacacacacacacacacacacacacagcaatacttcgcttatccagaagtccactatctagcaacttcccgtatccagaacatatgttaaaacaacaaaattaacaccgcaccacatccatacacttgactcctagaacaatacctcaccatcttcacctgaaattatttagtttatctttggactctcgtttacgtctggttctctggctttctagctcacaaaagattaaaaacaaccaatacactgcaaaggatgctggctccagtaagaagtcaaaatgttctgcctgactctgttaagagagatagataaatgactggaaactagaaaaataggaactagaaaataatagcagcctagagtcatccagagaaaaggcaatactatatacacctcaccatgtgatatccaagaaaattataaatgacactgagtctccaagaaaactgtgaaccagttcaagagttggctgctgtacacaataaacatacttctataaacttttcatccaacatggttatgccaactaacatcatgatacctaacggttataactttttatccagataattcatttcggtggaagacttcactctacagtgatgttgactaaatgaggtgtcactgtgtgttatcttacagtgtacagcatggttttcaagggaagatgagactgattgtaatgcataatgcaatgatgagcatgtggtgggcaccaccctagctgactgattgccatggtaactggaactaggcaagaaagtattacctactagagatacttacattacctgctttcacagagataagaactgttcaaattagcatattaatatttgatcccaaacaaataacatccctgccttgtgataactatgcgttcatgacccagatgcacatttcctcatgaatatgtattttcattctaatttgctcagcaaatccttttcctagagtccgagaaggtaaactgcaggctgctcctacgacaaccactatggttttactccccctactactcaagtccccaaaccagctgccagaaggccaggaccttgggagtgagctgccacaaagggacaataactcttagctgtctgggcagctagaggaagtacagctaatatcaaacaacggttactccagagtcattcatcttgggctcaggaacacaggttcacactttggcatgcacatgcgtgcacacacacacacacacgctccaagacaacatatccctttgaatcacctcaaccactcaccatgtatgagcccccaggcagaagctccagcaatggttagggttcataggctgctctaactacatcaaacaagactagctctggggtgggcgtggcacttcaagagccttttcaccctgttcttctcctatttccacagcacacattaccttccaatctactattttatttacttgttatgtttattatttgctatctatctgtcctcactagaatggaagctgcctgaggaccctgaacattgttttgttttggggttgcgatttcagtacccaggccactccctgacagtagagtaggggctcagtaataacatgctgaatgaagacaaatgaatggtggctgatcctgcagactaaagaaagatatcagccctggtaagcatatgctgaattgcagtgtcccatgcctatcattaacacattatagccctgtgtcaagtccaatagagcctcagaatcattctcaacccaagatttcaggaagccactaccattaggtcctcgttaacataggagctctgctcaccattcccagcccaggctattatcacagaagcctggaggttttgtttgcttgcttgtttggttttcttttgcaagtggatccacaagcagggatttagtgtcttctgaccttgggtaggaaataagtgctcactgggtatgtctgcttataggcaggaactctgagatgcagggccaggcttttaaaaagctggcattctctaagtttacactcagcctgtcccccaggtgccatcctccaagatcttcatgccgtgcagagggagatgagaccaccactcacaagggctcagttaagcagtgattcactcaaggacagaagccagcatagggcagtttgagtagacctttcagtgatcatttcacagatgaggaaaaaggctgggagaggtccatgatgggccaaaagtcacactttagaaacttacaaacactggactgtgccctcctctagggaagagacctctcagtcactgatgtttccccacacccaggtcagtgacctagaacatataaatgatcgaaggcgtagacacaaagcctaaaacgattggacagcatggcattagtaatttggcctaaaaagaaaggccaaatagaatcagattcacaaacctagtgtcccttgcagagccagccctggggttcagagggaggacaagtgatgctgtcctggtcccaggtgaagccagcaaggtgatgtttcccctgccatgtcctcatgatcaagagaaaggagcatgccctccctcgaagctgccccttccagtgtccgacttcacctcccccaccgctcctcactctcacattgcagcctgacctccttgttgttctggtcccttttccaaaatgtttggggaaggaccctatggatctctcttcaggctctatccagccctgaccccacactcaagcacttactcattttaagagctcagcaaacattggtgaatggatgaatgggtaaacggatgacttatcagagactcctgttttccaagtccttgttatcaagtgcctggacaattctgttacacatatattcattcaacaaatatgaataaatatggagtacctactagataagaggcagggtgtcaggctctggagttcagtgggggacaaaacacagtagcttttcaaaaggtcttttgacttttagttccctctccattttaaccattttgcacttattttcaaatttacccttctatagctgggtttggatctcactcctcctgactcaacaactttcaatgcctcccactgcttattggaaaatggccagattccttacactgacatttaagaccttctaagatctagctgaaatctatgttcccattttcatctcccatccctcattccctctttccctccatgacataatttacggtcctgcccttgcctgaaatgcccttctcatctgtactggtcagctattgctgtgttacaaaccaccccaggcctctgtggcttaaagcaataatcatttattttcacttgcacgtctgtgggtcagccgggggttggttgatctgagttggacttggctggactcaacctatgtgtcttgggggtgactcttcattgtgggttggactcaggtctgctgtgtgcattctgggacccaggctgaagaggcagcagctacatggaagattcccttctcatggtgatggcagaggcacgagaggatgagctcaactaaagcaagcacatctaaggctctggtggcgcatgtctgctagcgtctcactggccaaagcaagtgacaagacagagcccaaagtcaagaagcaagaagtacacttagcccaccagaaagccaaagcaagtgacatcgtcaaactctacatcactggaggctgggggaaggaagaggcagagagtgaatatgtttgaacaataatctaatctaacacaccatctctgcctaatgaaatttgatagcacggtaaaagaaatcaggcttggaaatggaaggcctggcttgtatcataggtacacatcctactttctgagagacttagacacagtatactcccccaatacttcattcattcagtgcacataagctaacaatctactatatataggaatatcatgccagaccctgagccagttttgtaaaccaaacagacatgtccctgctatcctggtggtatgaatgtagctcttaaccttctgaatgtcagctctctcaatacatgagaaaccttgcaataaatgggaaaacccgtggaaagccagccttgggtatagttataagtggagaaaggcttatctccttggaaatgatctctctcgccaatctgaattcttaaaacaattaattaccaaacaggtaaaggcccaaccaatcaatgagaatttatccaggtctaccttgtgccaggtaggcctgcccagccctaactccctacactcagataccacaccttaacaggaggacaggtgtgttcttcctgccttccctgacagcacgcagcctaatgccacacccacaataggtactcaatatatgctcctgaccaagactccagaacctcctcaattgcttttcttactctttcctggatacagcctcaaacaatgaggtttccaccaaagacttcccattcacccagaaagaaaaattcagttaaagcaatctggccttttctttccattcccaccacccctcccactctcaccccagatgaaacctccctaagtgattaaatgttataataaggatttgacatatttgccttatcaaagattgtgcttttgtggtatctcatggagcacaaacagatgaaagagccaacagtgagatggactatcagcagagaccaaccaggaaagaaaacagcaaaacctcaagataagtccacaacctctaatcacacaaagacagggccaagcatgcaactaactgagactttctggcaaaaataatgctaattaagtagttataaaaattattgttattattagcagtatcattattattacaataaattaaatactggctagaaattcaagtctttcttcgggatctggtttcttccagttttcttgcacacaggttatatccagcagtggtcccccactacccatgggagccactgaattcctcattctggcctgagagtccctccaggcagcagtatccacctactttccaatcattcactcattcaacaactagtttttcagcactgttatgtactgaatgtttgtgtccccttagcctcctgactcaaattcatgtgctgaaattctaacccacaatgtgatggtattaggagatggggcctctgggaggtaataggccatgagggtggcaccctagtgaatgggattagcacccttataaaagagaccccagagagctctctagccctctttccaccacatgaggacaaaactggaaaacggcagtcttgcaatctgaaagaagacccttaccagaacccgaacatgctggcttcctgacctcagacttccagcctctagaactgtgagaattttttttgtttgtttataagccactcagtctggtactttgttacagcagcctgagctaagacaagcaccaatttttgaccctcatggtagtcaaagtccataaatttacctttccaatcctttctctcgctaattctctaacagaaaccccaaagacatggcccactcccctcaatgcccttcagatctacagtctgtgtccatctccagggagccctcctggatccctcctagtaaatgaggcatctctaaggacatgtgctttctctcttgtggggactgtacgtgcatggttgtgtactctttactggacatgcccccacacacttcattcaccttgtgtatgccttatctacccacctagacagagatcatggctcctgtctaagacagcattacgcaatagctggtgttcaataaatacttgttgacagactttactgtggaagtaattcaacacaaaccaagagatgctgatttagtggcagctgggataggaaaaaataaattgctatgggctggacactaggaaaggctagaaggtatacagttcaatgacaggcacacagggcctgggccagcagggggcagcccccgcagccaggtctctggcaactggtgtgcactttacatccagggtccccagccatgcacacttgatatttgcatctcctatttcaatagtatggactactggggagaaagggggcatgggaatcaagaaacagggcattattctaatctcaccaggtagatgatgtaacccgaagatgccactaacaatgttgccaacaaacgaattccaggaagcttctctaatgaaccacatagtacttgaaattttacaagtactgtgtgtatactcgtacttgctcctcctccagcctcccctaatttcagtgaatggcaccaccatggaccaaaatgtgcaagtgccaccccagattcttgaaatctccacaagcaaccaacagtcatgtctcagcttcacctccaaaacagagccacacctacctcactcctccccaggtcaaccactagtgtctcccacctgaactattctaatagcgtccatgctggcctcccagctttctctattctgttctccaggaaagtccattttgcataccacaggcaaagcaatgttacatttaaaaatttaattaggccggggccggtgactcacacctataatcccagcactttgggatgctggggtgggccaatagcttgagctccggagttcgagaccagcctgggcaagatagtgagatcccatcactacaaaaaatacaaaaattagctgggtgcggtggaatgtgcctgcagtctcaactattggggaggctgaggtaggaggatagcttgagcctggaaggtcgaggctgcagtgagccatgatcacaccacaccactgcactctagcctagggaacagagtaagattctgtctgcatctcctccaaaaagtaaattagatcaccttctgcttcaaaccaatgacttccactgttggaataaaatccaagtactgtcctattacctgtaggccaggtgagatctcacctcatctcctctctgctccatctcctgacatgcatgtcctgtacatgcatggctccagttacatcctttctgtcccttaagcagcctcaggtccttggcacgtgctgttccttctacccaaaatgtgccttccccaggtgttcatggctggctcctcctcatccttctggattcagctcttaaggcaccttctccccaaaccccaaggacaccaagcatctgtccccatccaaaccccacccacttgcagcctggtccctctctagcctactgatttttgtttttcattatacccttatcatgacctaaaattatttattaattcattgctaaatcctcactggaataaaagttccatgcaggaaaaataaatcttttatgttttgttcaccactacattttcagcatctgtaccagtgcccagtgcagactgagccttcaaaacgcacttgttaacgacagagcagttaactccccactttttaggaatgggttgttcacagcaactcctttccaatgtgtgcagtatgaaaagatggagggaaaaaagggtacctctatagtggagaaacctgacaaatactacttcatccaggtgatcaaggttaatatcaacagtaataagtcatgttgctagcatgtacctttgatatgatgtgaggagaatagcactttgcctctgtggccttcctccccaaaacacacaattccactctaattgtaagaaaaacatcagacaaatccctatggagggacagtgctcttcaaaactgtcaaggtcatcgaaaacaaggaaagtctgagaaactgccacagccaagtggattctaagaagggatgataagtaaacgtgatacagtaccctggataagatcctggattaaaaaaataactttaggggaaaactgaggaaatctgagtaacatatggactttagttaataatgatgtatcaggttcattcattatgacaaatgtaccacattaacataagatgctaataacaggggaactgggtgtggggagctctctgtactatcttctcaataattctgtaaatcaaaaactgttctaaaattaaaagtttatttaaaaaacatttgttaggtgaatgaatgtgcagtaataaatgctgcacatatattttcaggtctttttgtaagcatttactgagcacagggtttagcatgatactagaaaacagacgaattcctgaagtctgttaagcactgtctgggtcataccatttgcatcattactttgtgcacctgaaacattgtaaaggcagacattggttcacccgaaactgaaccatcagtggttctaagtgaggaaagttggggtcaatgacaaaaataacaaatcttgccctttttgaggatgaattcagttatctcactgttctcaagtccattcagccacaagcactgctgagggcctactgcacacccaagcctgggtttggcttaacagccagctcttgtcctagagcggcaaacacaaatctggccaaacacaagactcttctaaggggtcaaatgaagcaatacaaactataaatggcaaatatgttcagagaaaactgatcatggaagtggggtagtcaaagaggccttcctgcaggaagggccaggctggacctgaaataggaaacaggatttggagtgacaagaggaaggacagagggcaccccagggtaagcacagagtccagaattaactgcagatggtagtctgagtacagctgtggggttccctagaggggcaatggaaaaggaggttggtagctgagctggggccagaccagaaaagaccttccagaccttcaaggtcccctgcttcatgttccttttcatgtgtcatttgcattcttgtcccatctctcctactccacctgtaagcttcctgggggcaagatcttttcctgcctaatttctgcctgctctaaaaggtcttgcacttagtaatggcccaaaggaatatctggtgagtgaataaaacagagaattaatcagtgaattataatctaagaagccaaccttctaccccttacacactgggaggcctgcagggtttgtagaaaaatccaggatcaaaatgacatttcctccactatctccccaaccccttcctttgcttgttttcattcagcatttatctctctctgacttcttattaatcatttgtgtactttgcatacttgtttcttatctgtcaccttccaggcattcaacaatcattaactgattacctactatgtgctagacatagtaggtgctaagaatacagacgacacacaaatatttctactctcatggagctagcattgtagtgatggggtgaagagcaatacgtaaaatgtatagaacgcaattgatgacaggtgctatggtagaaaagggcaaggagaaaggaaagtaaattcaagggagtgatttgcaatttcaaatagggtggtcaggggaaaacatctttgagcacctgaggtagatagggatggaattcttttcttttgcatacatgcttggtacatgagcagtacctggcatgcagcaggcacagaagaatgaatgagtgtatgaactgagggtgttgggaagattgatccattttttaaattaaacttttaagagaattgtagattcacatgcagttgtaagaaataataccctttacccagtttcccccagtggtaacaccttacataactatagtacaatatcaaaaccagggaattgaggttgataacaatccactgatgtgattcaggtttcaccagttttacatgcactcagttatgtatatgtgtggatggtgtatttagctttatgcaattttaaggtttagtcctttttttttttttttttcccgcgagacagagtcttgctctgttgctcaggctggagtgcagtggtgcgatcttggctcactgcaacctctgcctcccaggttcaagtgatgcttatgcctcagcctcctgagtagctgggaccacaggtgcatgccaccatgtcaccagctaattttttaaatctgtagtagatggagtttcaccacactggccaggatggtcttgaactcctagcctcaagtgatccccactttggcttcccaaggttctggaataacaggtgtgagccactgcgcccagccaggttagtccatttttaatatgtgagttagaaggccacttgaagggtgtagggctgaaggagagtgggacaaagtaaaccaccagccactaggcacgctgttcattttcacatgcctgagctccatttacccgagcaatcatcctaagaagataggtattcttatctccattttatatacgtgaagactgaggcactcagagaaggaatctgttggaagtcacagcaggcagaaaaatcagaaccccaaatctctgactgtctagctacttcctgggactctttcttgagcacaagaatggccgggatgaaaaaaaaaaaaaaacacacaggaataaggaaccaagaggaaggacaggctccaggagacattggaggagagaggaaatgagggggaattgaaaagtatgcctctggattctgagttagggagaacagaagtatcatcacaggaagaggaaatgaagagctggagggctctaaaggagaagaaaagggagatgtcctggttcagccctgatttcatgtgtgatcttgggtgagtcaatttacatctctgggtttcatgttcctcatccatacaagggtgggaatggccaccccattccatccatctggtatgctctaaatgtccataatatgttcccattcacaaaattctcccccaaatttgtgtccctccccaacccccaaatttatacgttgaaacctaatccccaatgtgacggtattaggaagtggggatttggggaggtcattaggtcttgagagcggagcccacatgaatagtattagtgcatttataagggactgaaggggccatagttctccccttctgccatgtaaatacacagagacatggcaccatccgtgaaccagaaagctgttcctcaccagacactgaatctactagtgtcttgatcttggacttcctggcccccagaactgtgagaaatagatttccgttgttaataagcaaactagcttatggtatttcgttatagcaacatgaacagactaagacaactatccaggactgctctaaggccaaggagcgatgatggggcagccctctgcaaagcaaggtgcgaggccaactgccaaaaccggaaacaaggcaacccagcacaggcccagactgcctgtggtatcccgacccgaatgactggctggcattcccaaagatgaaaatgcagaatttaggtcagcacacacagagaatctcactttgtttacatgagacagagagtgtgtgttcctacgaaatgcctttgaatcccagcgatgatgagagacccaaggctgtttatggctttggatatttacttttctcataaacaaatcagcttgggtgccgtcagagctgacgccacttcacactgcggccctctgacgtcctcgctcctccccggtgccccacacatggtttgaatttattggttttagcagctttcatttatattgtgtgaggatcacggaatgaccagcaaacagaagctctgatccgtgctctgggaaaaacacagaagcacgaagaaggaggttgtggggaagagctgggaagtttcctccagtccaaggagaagcagctcccacccacagggtggtccagtcaaagcccttagggcccctttggaaatggaggatcagggggatgctacagccgcaccaggagtcggtcagagcacgaggctgagaaggctctcagtggtcacggcctcccaaagccaaagcacccaaggactgccgtgggaagtggaggtggctgctgaggtacttggcctcctggaaccaaacatctagaaatgtgggaacaatgcgggaagggggcttcctgttttctaccaggatactcaggcgatgatgtgtagacatggtcaataattttacagctacacacagggtccctgcatgtgtactcaaagccaggtgtcagggaaacccagattcattctacgaggttccttcccacaaagaacttcagtttaatgaaggagacagacatgtgaacatataaaagacaataacatttaaaatgccactttccagtgaggtcagagccagcttagaaagtggctttgcagcagcaggggtatggtttatggtttaccaaccaatctcacacccaccaagggggctgagcgaggggagggacttgctctggtcatgctgtgggactcccaacccagtgctctattcaccgaccaaggatcctcccatcccccacttctgctggggctggggcgaacatcaggaatcgcctgccttaccccgcccccactttgaacaggtggaatcccacaaataaatcacataaaataagtgacacaaaatgcaggaaatgttatcctccagcaacgacgttagaaatggtggtcaaggtctcaggctccctcacaaaaggccctgtaatgtataactactctggtctcattcagtcaccagatcgctttcaccaccttgtttctaaaggaaacccagtcctgagttcctgtcccagaagctgggaacccttctgctctggctcaagcaagagggttgggaaggtacagacaagcctgggtgaggtgttccagtttagccaacaaaggaatgagtgggtgggccaattattaaccagaaggaattctgaaatgcagaacatgagagtgagggtcagtggccccccagtgcacccaggatgaagcccaaacttcttaatatggtcctaaggcctccatcatgtgacccctatgtgcttctatagtcaattgcctagtctccccatgcttcccactagtgttctccacatgtgagtgttatgagtaactatattccttcaatccggatcaatatcaccatcagcacccacccccataacatggtgccactcctgaacccaggacatgcccacttgtccttcaatacagctcaagtggtatcacactaaagccaaaccaggtactcacaaggaggtgaggccagtctattgtatacaattgagtatatgcaacagcaaagagaactaactcctagacagcaagaatacaggctcatccatttggtagcatccataggaccctccagatcacctgagctctgcaaagccccagctgccatgggggtgggggactcagggtcagcactcaacagtacactaacacagtagattgaatgacaggtgggaagcgacattctgtccagctactgaggcaaattgaacagagattcctctaggctgggggtggccctccatcacatttcccctttccctgccctacactagaaagctctgcagagaagcatcccagccatctagactggtggcattacaaatttggcacctgtacgtctgttgggcccctcagcctgccctgccatcgcttcaactgccaaggtcagcttctgctctgaatgcccaccacagactttctcctcacactccctcctcattctatctcctagaaaatggactatctcactctctgcttcccagggccacagccttcctcaagagggaccctcagaagtctctcagctccttgtccctgtcacctcctggcctcttacctttcatcacatctccagtttcagaagggctgtcgcctctactctcagattccagctccacctcctctgggtcacattccctcttttcttttttcttttctttttttttgacagagtcttgctctgtcgcccaggctggagtagagtggcacgatcttggctcactgcaacctctgcctccagggttcagttcaagcaattctcgtacctcagcctcccaagtagctgagataataggcgtgcatcaccaagcctggctaatttctctacttttagtagagacagggtttcaccatgttgaccagattggtttcgaactcctggcttcaagtgatccacccacctcggcctcccaaagtgctaagattacaggcataagccactgcacccggccacattctctcttttccttagatgcagataagtcaagagaacaggggtctgcagccagagtttctgtgtttaaactccagatcctccactcattagctgtgtgaccccaggcaagtgaattaccgctctgtgactcagtttcctcacctgtaaaatgcggctgaatctacttgagagactgccatgaggattaagtggggcagtgcacataaagggctcagaatcattcctggcactctgcagtgaggcacctctctctcaggtctcttcaaccccacccccttccccactagccccatatacctctctgaaccctcaggatctggaactgagcctggcacaatgtagttcccagcagtgcttttcaaagaaatgaacaaataaatgaatgaacagtttaataataactaattcaattaattatttatggggaatttcactttgggagaaaagaggaaaaacacatgcacctctagcactactgagagcatagagcacctgatggctgataaaggccttctcagacttgatcccactggattctcccaagagctgtaagctgttgctaggtaacatccaacctgtctgagcagtagaggaaaaggatgctgagaggcaggaaccccaggtcacagatctaacccagggcagagctgggcctcaagctggggactccagcctaaacctttcactccctccttttggtgtgtcccaactccagagagtagtgggagaccacagtgaaggcaagccagaatgaatacagtcagacattacacactgcagatggtcagaaaaataaatggccatgctctgggtggtccaaccacatagttcccatcagaccaaccaacaacccatccctgcactggatgatgctcagtgtgtgagagaccaaaggaccaagagccatcttttgtacagaatgggcttcacttcaagacagacattgtgaaaatgggccaataataataatgaaaatgaccattacttaagccaccacagttaacattcattaactcttactgtgtgccagccactcagctgtgtggtttatatgcattatctcatttatgcctcacaacaaccccaggaggtaaatactgttgtgagcaccattttttcagatatggaaacagatgttcagccatctagccaaagtggaggagctggatttccaactccagtccagtttcttccttaaggtatcaaaagatccaagtagaaatcctggctccatcattttgaacaaagtacttagcctcagtgtcctcaaaatgagggaaaaatgcttacctttcaggattgttttagaaatttactgtgataaaccagaggcctagcatataacaggcaccaaatagcaatggctctcttaggggctggataggaaacaggaagaataaagccagtggagggagtgtagaaaggcttgttctgcattccctctgcattttcccatcctggcacttccgtgtaagtctgcttcctttccacctcatctccaggggcccaaatcctatcccacctgcaaggtgtctctcaaagccacctccatcaaaaagcctccccacaaaactactgatggaagcagaatattaaattacctccaagaccaccagcaggcctcaccatgcgggttctgtagtggtgggtcaacaaacatcactgtctatacccagaggactataaatcattctaccatagagacacaggtttgctaatgttcactgcagcactattcacaatagcaaagacatggaatcaacctaaatgcccatccacagattggataaagaaaatgtggtacatacatgccatggaatactaggcagccataaaaaagaatgagatcatgtcttttgtgggaacacggatggagctagaagctattaccctcagcaaactaacacagggacagaaaaccaaatactgcatgttctcacttccaagtgggagctaaatgacaagaactcaggaacacaaagaagggagcaacagacactggggtctacctgagcgtggaggttaggaggaaggagagaagcagaaaagctaactactgggtaccgggcttaatacctgggtgatgaaataatctgtacaaaaaaccctctgtgacagtagtttacatacgtaacaaacctgcacatgtacccctgaacctaaaagtttaaaaaaaaaatgacagtcaaggtcaagcacaatgaccaagcattgttatcaccgaagtccccaagtggctcagtttacccatcctgtgaccaatccacagctcttccagctgcaactcggccccaatacagggtctggttctcaaaaatgtactataatccagtggatgctggagccacccagctggatatctgggggtcccaacgcctggcactctgaagcaaatccagttccctttctgagctcagtaaccacactggcaaaaaaagaaaaaaaaaaaaaaaaagaggagccaggaacagactaacactagaagtgtccttgttggggacgggagggaacgcggtcgtgcatgtgaaaagcctctggaaattgcaaaccgcgatgcaaatggttgaaattatcattgccaattaggcttttgtctcttttcagactcaaggccaagcagctcaagaaagggaaaccgtgtgaactaaagctaaaagatgagccagagagatttccaaatggctttctccgctgatatcattctaaaaggggctgtcgaatgggaccccaggcttaaattactaacggccatgaaggcgcattaagtccccaggagataacactggccaggaaactttaaataaccttaatagggaggaaggaggcaaatcctttaaacagaagacaaggaggggaaggcctgtccttttatctttgcaccgtggctgcccgggcagggctggccgcgcgccgcgccgcctcctccaccgcaggaacgcctcgccccgaggtgcctgtccgcagggctccgcctgtgtcgctgcctgatcgagtgacgggcgaggacatacacactgcggcccccaaggcgcagccgcccaaccgctgctcttttaggaaacgtgcacttgcgctcgcggaggccaggccagagaggcggcgcggctcgggccaaacgcgtcatgcacagagcgctcgcctctgcgccagggcgtgaaatgggcacagtcatgcaagcctcccgggggagcgccaaggtgaactggaggtggagggacaccagcaggcggctttatgcagcatggtctctctctagtagcagtccatgcagagagcggccaagctgaactgctctcggccctcaaatgcacaactcgcgccccgtcctctagcgtaggtgcctccaatctcctgagcctagtactccctaggctttacctggcttttttactccctccgatctcaggttcacctgggcttcttccaggaagccttcctggatctcctcagggccaaggaagctgtgcctcttctgtactcccacaacacaccacaagacaagccacagcctccctcctcccaacacctgcacggatgctgtgtcccctaccaagaaaggaagcacctgggcaacagcaacgttcttctcgctcactacgtccagcacttatcccatgtctggcactcagtaggaactaacaaacatttcttgaaaagttgtataacgataatttgaaaatgaagtaataactatgagctagtatgtactgagcatttgtgtgtgtggcactgtgctgtagtgctttacattaatcaattaatcctcacagcaatcctatacagttgacatgagaaaactgacgcacagacagcttatgtaactaccccaaggttacttacactcccgataagtgcacttattctgggaactgaaggagcactgggccatccggccaatgtctggaagttttccagtggaggggactcctgagctgagtctgcactatgacgtgtaaacttaaagactgacttttggttctgaaggtagaatcagaccaggatgttcctctgaataagggaggtgggaaggagcttaatgtctcctcctgcccttcctgagtcaatgggaagtaaagggagaatcccaagaatgaaggtgacagagtgtcagcattcagggcaggggtggtggtcaggtgctgtttggaaaagcccaggttctcccaaggaaaccaccttgtctaagtccttcggaaggaacacagaatccagcaacaggtgcaaaggcagagaccacacatctcttaaggccctaggttgtccctcagagatggccccagggccctgacttttataggcatggtctgatgacctcatggctcttttccagtaaagccaggcattcagtgtggcccaagtacaatttacctaccagttctttcaaaaaacaatgctaaaagccaattacattgttgcacctaaactcaaactactgagttatgattacatggcatccatccaatctgatgaccatggataaaagtcttgctgtaaagtgacatttgtttgacgagcccaagcttttaacatggatggtcctcaggggcctttaccaattcaaaggagtaagagttagccagaaaataaaaactgggaaggggctcccaggtagagggaacaacatgagcaaatgcatggaggcataactaaggagtatatgtgagagggagggagggagatatcatacagctcagcaaccctggtgctccaaaaccaagatagcaagcaaagaataaaaagcattttaacatgaaaataagtggagggatgctgtgagcctggagaagatcatgtgtgctctggatagtgaagaggagaaaaacagagacttgtttgcaagtaacagttgaaaaggaaggaaaaaaacccaaaatatcccaggatggagattaatgaatccaacagggacccatgaatgttacaaagttttgaccaaatgggccagcaacagtactgaatatgtctcaggtggaaagcctaagaagtttctgagaattagagaggccaagacatagtccctttttagcatccagagctgccaacactccaaccacagaatataccacaaagccccaacttcagaactggagaacattcaatctaattttgtaatcaattgtgagcacattttgagctaggtttgaatcagaagagaaaagactgcctgagaaaaaagtataaacaaaatatataagtgctgaaagaatgtcgtaaaatgccataaataattccacagaggggaaaaatatatgtggctgggtcattaagtaaagctttggcccaagtctttctgagcagattagacctgggaacattctaggaagacttcctggaggaggtacagctttaagctgagccttgaaaaatctcaggattcagaaatagaatagaaaaggaggaaattcctaaagagggagggggcctagcagaagcaacggcgtttccaagcttggggcaacagttttgtgttccagcggatatagtgcacagatttaaaagcctgtggatcctggaggagctgctcggcgagacggcttggcagccgctgaacagaactgaaggctcggccaccggctgcctgtggattaagtgggcggacagagagccagtgatgggagataaaagggagtgaagtggataatatttagaagcaaactcaaggggaaaagagcgtcagcagcccggctggcaggctgtggcgctcacgccggcattcttgtttcctccctaggaaagctgcattaccaggcgacctcttcttggctttgagagacgtccaaatgggaactattaacaaaggcacgctcccatttttatctccgtcagaaagtgctttgccggtcaggttttctctgcttggcctgggattggagagcgggttgggggaagatcagacaatatgtttgcggatgagggttcttggaattcttgagagctggccccttccaactctaagattttagaagtctgtgtccatgagctgacaattcttcaaagctaagaggctaggatttcatgaagtgaagattctttgagtccctaaatgtctctgagcctaatgttctgagatttcaccattcctagattctttgagcctcagagtttggatttatggttggagattctctgagcctagaagtcttcttgctgtgaacttccaattctgagactagaatatctcatgacattttggtcacctccagctttaggacctcactctcctctgatggaggtgcataagctatcctgtgctcctgcttctgtgtgtgttatccccctacatttagataatatattaaatattaagacacgaatgaaccaggtcatggagaggggatggacagagctcgccatgcctgcaggggttcttcacaaacagccctctgggcacagaaataatctgagtgagcacatgcccaggggtccctgctaggggacacccggtgatggacatttgctgagcagctccttaccagatggctctgtgggggagacacagcgggtgtggcagactgccgaagcacaaggtgaaggtcgcgccagaagaagcctgtttctcagtccaggttctggaggtatatggtataggcgatgccagcctgtgtttaattccacggtgatggaggggctctccctccatggttgacttcctgggagaaaaggcttcggcacggtctgaggtcctccaggggtgtctggggcctcggggaaggcttgctccctctactctaaggagcgcacatagatctgacaagagatctgacaaggtataacactgtgggctccagggctgccacagaggcccagagagggctggaggactcaaggatggccattcttggaggacaggaaattagagaatggttctgaaaggtgggagcatacaaccaaaaggggaagaaagaacagggtctctatctgaagtgtggagaaccagggcacaggagagactaatattcaggtgctctgtgcctcagtttccatgctgcaaacaggactaataatacccacctctcagggcataaaagcaatggggtgcacactcaggtaatgaattctcggcaggcaaagacacatttcgaagtctcttcccagacccttcactggcacaacacagtgaggtgctctggttgaatgagtgaggagcaacagagggagaagagtcacaatgaaggagagcagctgaggctgggtgggtgtccagcagcctgtgccgtgacaggctggggctctcctgtctgaagcctggcagcaggatcacccactggaaccaacaggctctggacaaataggtatcagcagcaactgccaaagacaagcctgccagcccctcccaactacagataactcaggctcaaaatttcagacttggttggcctaggctctccaaaatatgggagatacgcatcacagaagtcagacctgggccaacactggaaatcacctagcccagcgctctcatgggacaaaggggggcaaattaggcctagaaagggaaaagggctggcccaaagtcacaggcaaggtactaacaggatcaggattagaacctgctttgaatacgacctgcctatgctgtggtccaaatgtatgtgtccctccaaaattcgtatgttgaaacctaaccaccaaggtgatgatatgaagaggtggaacttctgggagtagattagttcatgaggtctgtacactcacgaatgggataaggacccttacaaaagaagctagaggaagcttgttcaccctttccaccatgtaaatacacagaaggcatcacctatgagaaacaggccctcaccagacacaaaatccgctggtaccttgatcttgaacttcccagcctccagaactgtgagccataatttctgttgtttataaattacccactgtaaggtattttgctgtagcagcctacatgataattttgacattttttgtccttataggatggaaaggagctttcaaagttcagaagggggctccttgctgtgatttatacttttcttcatcgttcattccttcaatgatgctgcatggtggaacggaatcagggatggtcacatcatgatttttgaccatttgctcattaatccattcatgctcccaatagttactcagcacttactaatacttgctggccccgccagggtgtagacataggagctctgactataaaccaaggagatctttattcaactgtgcaggcttagcctatattggggggtgtgtgtgtgtatgtcttcacagcagtggcttagaaagtttgggacatattccctgggagtagctgatgcccagaatgtctttgagaactcctattttagaatcaccttgagatccaatttataagtcaaggagaaaatcagttccagcacttttcaattctctctctctctttttcggcaagaaatgatggtctaccaccattccaacacacacacacacacacacacacaaacacacacacacacaattcagcagaaatgtcatctaataaaaaccaggtcatctttcagacactgggaaagcaggggttgtggtaatggactcacctgagtttgaacactgagtctacttggcctgtctgtgtaatcacagccaaatgacttcaccttttcagatctcaatttatggtcttgaaaataaatacgataataaatcttgttgcatctctgtgagggttagagataatgtaattatgaggtctaatgcagcaccctgcatagagacaaaactcaataaatggtattgtggtttctaactcctcaagtgagggacttgtagaattttacaaacattttgcacacctttggcaggcacggttctgtgttcaggcgctacacatattagatgggtaatgctcacatgcttggtaaagtacagaatagcagagtccttgttttcttattatacctcacagaaccatgtaactttgaggtctcatccagtgtctccgactctgccatgcagggagttgaaggggaggactcaggtcccctagagggagaagtagtggcagccggtaccagtccctggtggcagcaggcagagctgatagaaatctgcaggtctcaagcttgtcataagatctggactcaagacttaggcatccttgggcccccaagggcaggggctcaccgcctcctaatactccaacgttcaacaagggatgacgagtggatatggctgctgggagaagggagtggcaacttcccatgcagccttcctctttccctgccctggagccagcctagactgtttgccaagcacaaaaccaacatccaagtagtcattttaacccatcaacaacctcccacaggtagtatcttctcatgtccccacaaaaaccagctcaactttgaaagactggtaattgctgccccattggatggatgggcataccaagtcttgcccaagattatatacaagttgttggttttaaaacgttggttttatatatatatatatatatatatatatatatatatatatatatatatatatatatatatatataaaacgttggttttagtgttgaggctgggactgacacctggaagcaagtctcctatctccagcccactgtgctgagctgtctacaatacaacaagaaaaccttcagagacctgcctcaccaccagcctcatagccgaaggaaatatctctacaagtataaattttccaagaaagacaattttaagccctcaagtcctaaaggggagagagaaacagaagaaagaactaaggaatgattacagaagatatcaaatacctagacaggaggaagtctagagaaacagtgtggggaagctgggagaacacatccttcatacagagtcaggctgactggctctgttccttattagccacgtgaccttgggcaagtcattcaacatttctggatgcccaccttagaaagccatagggttgttatgagaattcaatgcagtggaaaagcgtgtggagcctcctgcagggtgcctggcacgtggaattgattagaatcatcctatggaatgtcagggctagaaggagcttgaatgatgacctcatctcagtgtcttatttcacagaccaagaaaacagggcccagagagaggaagtgacttgcccaaggtcacatagcaaagtcacggtgatgttgggtctagcaccctcagtttattttgaaatcaaagaccaaaacctaacaatagacctgatcttccaagctgcgcaagggtggaagaagctttttccagggttccaaaacttaagctttctttctccatttaacaagcaaaattatggttatttctgtccagaaaaaaatacaaaaattttaaaaacaacattaatactaaaatcccagatcttaacaaaaagacactgttttaagccttatttttcccgccttcttctctcactgtctccccaacccaaatattttgcaataacagtaatgctgcgaggaaagaaaaaataaaaatctgatgcacttaacagatatttcagtgcactaatgcatcacagatgttcatatcaaactgtgcacgcgtgcatgtaattttactgagaaggctgttgcatttctgattttgaatttttggatccctaatgacctcatctgcctaggctccagaatcccacccttcccatttagtccaaggctgcccaaggggatggaggagagatttcatcgcctccctacaaaatgataacaggacaaattggcatgattggacactctggcaggtggtgaagggtatggagattagggaactaagaggagttctgttttcttttgtttgggacttgctttctgcagctcttttgaggagctggaccaaagaacaattttaagagtgggcccaggctggtgatgggttgggcacatttttgaaatagaattggagtctgtttgatcttcaaacatgagctttggagactgtcagcaggctccctcccggccgatgaatggctctcagtaacttttcctaaaacataacctcacacacactttccagcaaatgttttcaccctaccaaagccatcatttggttgaacaggagtgtctcccgaccccaaagaaagatagttttgttgttttaagagagacggattaaagacaggggctgcttagccagagtttgtgtgtgctcccttcagcctttgtcggattcctctgtggttggtgcaaagagagtgttgagagtgatggtggatacctcacctccccatcctaaaaaagatatcgaggccagacctaggcctctgaacagagaggcctcccacaaacctgcctccgaaatgagatgggcggtgagcgccgggggtcccgacacagataatatcagctcccgaggctggcaagggaaaagtcacttcagagggagaaagcggctatgttcagaggaatcagcactgggccatagaatacacaggattttcccccgtggagaaggagtcaggcgtagtcagaaccctgcagggcgtgactaactgccccaatactcctgccactggggccctctgggtaaggactccacaattatgggagagccagcaggagaaccgacaaacccgcctttcatttggccggcaaatcaatctggcttcttacctccccagggacaatattgcatttcccttggaaaaacaaaggccagagatcttggaaaggggatcagtttctgccgctgtttccctggtgaagagcttgcaacatctccggaggagcaagcaggtctgattccaatggtagtttctggtccagccaatttatgaggctgtctccttaatgggcagcacgtctctgagccatgcctcactcaggaaattgacccaagccccatcttggggcctccttgaaggagtccccatcctgggattgacagccccgttctcaaggcacagatgtgaactcattgttcccagggtctcagagttgagtttggggccagtgagtagcaagtgacctctgcccatggagaaggggcttttaatgacattttgctctatcagatctctggcagccagagactttaaacctcttaagcccctcccttctctcctacttctgaggttcagaaatcaggactgtcaacctttaagcgaacacgcttctctgaaattattaaccttaaaactctcctggctgactttctcctggccttagcgaggcggtccgagggtcacctagagctttgcacagagccgggaaactgatggtgcttaacctcaaatggcaagcagcactctactgtcgccaggtcccaggcaactccttgttggctcagccctgggagccatgccttcctcttactttcttgggcactgtccacacaccagcctcaatacagcctccagggcctcaggaaggcctgacacaaaccggaagccccctctttttgtttttgatcactctgatgctctgagggaaattctttctgcccaggcaagcacagcaggtgaggagtgtacatccccaacatgtaatactgctgaaatagaagcaaacacgcagactcttaccccaaattccagtatacgccactctcaactgataccaccagagcagccaggtgctgcctcgctgcccagcagaacctctccttccagaaaaaggacctgactctggctgcctccccctccccctcggagaagaaagacaatcagagaagaggacccaggtacccagggctgtcagctccgggctggggcactgcatgcctacctgggagaagttgagcccgttgttgaggggatggcactgctcctccacctgctccacagcccctgtggtcttcttcatcttctcagcctgctgggccaggtagaggtcgagcacgggcacaccacggaagcgcacgtccctctctgtgagcgagtttaccatgagcatcacccagacgggcctcttgcgctcccagttgcccgcgatggcattgaataggtagtcagcatagagccccttgccccgctgagcgggcgtcatccaggagggcatcatcaacttcacgtagtccaggtggcgcttcaagcgccagtaaagctcgtggggcagcacgtcctgcaggttttccccgtgcggcagcagctggcagctggccagggccgagatggtgtaggggtctgtaaggtccagctcaaagtagacacgggtgctagcctggaaggctgccttggagttgtccgggatgaagtcccagacgcgggtgtaggggacgtgaatagtgccaaacaggtaggccggaggatcacgccgaatcgtccacaggaaggagttcaagtccctctgctgcaggagtagagaagaggcaaggcagtgaggccgaaggcaacagagtagagtcagggtagcccagaggcacgttgcagagggaggtggggatgggaggcagagaccatacacaggccgtggtaaagagccaggtctttggagcctgaaagacccacattgaaaacctagctttgccctgtcttagatgtatgatcttgagtgaatcatttcacttccacaggctcagtttcctcatctgtaaaatgggggtgaaagcaactacctcgggttgttgggaggattaaaagatacaatatatgtatattaagccctcagagcagtgccaggtacagaggaagtcagcaatgaagggaaactctcatgattagcgttccctgtgagtgccaaggactgccacaccacctgagaatattcatgcttggccaagtcaaaccttcaccggtggtgtttcatgcggagggtggggaaaggaggaccaagagtcctgctctggcaagaagggaggaagtcatataacttttaaatccaaccattagaagatataagccaagagcactttgaaagcagaacacctattaaaaatagcacacctatttaaacagctacttcacattcatcacggtgaatacacttttctttttggagggcaggtctggggtgtcagctactttgctcgaccagctgagaccatagatgagaaagtgctttaaaatcttgcaaggccaagtcaagtttcagaatctggtttgggaggaaaggattccattacaattagtcccaagaaatgtacatattctgggtactttccaggctcctcccctaaaaatgtatacctgatttccaaccccagttgtttgtcattttctatgacctaagctccgacttaggggagtgtgtgtgcgtgtgtgtgtgtgtgtgtgcgcgtgtgtgtgtatgtaggagctgaagagaggcatgcagacaggggtcctttctacagatccaagtcagggctaggcataaagggcaaagccattttccaaccagaaaaatccctggagtgcccactgaccacttgcaagctttagaccaactcataacacttttctgcctgattctggcacaaatgaaaagtatgtgttgggatgggtgggttgtgggagaacagtaccttactttactaacaaccccaaactgttaatcccagcatgttggcgatagactgagagcccagtcagccaacgagctccctgtttgtgcacaaggcaggctgctggaggtgcaccttgcccaaggtcagcgaattccgggctaacaggcagcacacctacagcagccagaccctatggtctcctggcctccaattcagggttactgtcaatgcattaatttacacttagagggaaagatactgaaggaaataaagaggttctttgttttggaaggaatattaggagaaccagtaattactcgaccccaagaaatattaggccagtatgtcctggcattgccttttcctctcctctgaaatcttccctcttttcacgaaatatggacgcttgggagagtaggtggtgggagcctgggccgcagagatggaggtgagaacgaggaacagggagaaagtttgtcttaggtcagagtgggagggcagggagagagagggaagcctgggagggggcagagtgtgtgaatgggagagcaaaagggttcgatggaagtcaagagaagggcaaggaacggtagaaaaacacagtcagaagcgggcagagagaccagaagggtaaagacagaaaaaatatgagaaaggagagacaaaaaggggcagagagagaggaggcgtccaagcaggaccacaagtcaagaggagagccccagagcggcagcgtgtggagaaggaaccggagagggagcgccccttctcgctcctggctgggagctggagccgggacaggcaggagcgaaggaagggcgcccgaggctgcgcccggggggtggaggtggagcgggcgggctaaggtgggtgcggaagcaggacccaaaccatggtcccacgggactagaatacccaggcaggcgggagagtggccgggcaggcgctcgctcaccgatccgggcggccggcactgtcctccgtccgggggctgcgggcgggcgcgagcggtggcgaggagggcggcgagcagcggccccgccagggcggcgtgcatcctgccagggcccgcggggcgcgggggaccctcctgggcggcgcccctcagcggggcggggagcccccagttgggcacggagtttcctctggagcacggggctccagccgcaggatgctgggcgccctctggggcgtggctgactgtccctgtcggacctgggggtttctctggggccgggctccgtctgttggaagagggagaccctctagggctgggcccctcccccgggcgctcaacctcgctggccgagcccccgggtgctgagggcgtgttggggtccgggggcgcgcggggtcccggagctgcgtcgcggtccaggggcgcgcggggttcctggggcagaaccgagaacccggggtgcgcaagggtcccggggttatgctgggcacccggggcacgcaagggtcccaggggtgcgcggcgctccaggaggcgcgcagtgggacaagtgcggcggaaggcgcggcaggggtggggggcggctctggggcgaccggctgcccccgagcccggctcagaggggcggcgggcggccgcgcggccgctgcccgggctccgccatgctgctccgcggccgggagggagggagagaggagggcgggagagcggcgcggagccgggccgggctgggggctggggccgctggggcgggggaggggaggacctggcgcggggggcgggggggcgaggggccggggccgcgccgggccgggccgggacgggccgggcggcagggagtcagggctagctccgcgcccgggcgcggcgaggcggggtctgatgggcatggcaggcgctcgctcgctcctctctcgctccctcgttcgctccctcacacgcgcggagggaggcgaagcccgcagcagccacttcccaactttccaaacttcccagcgcaactttttcctcccctcccctgcccgcgcctcctcctcccccatccctcctccttcccttcgccaggcgcgaccgggccgcagcttccccgtgcggccgccagagggcgcccgggctaaggacccgctcggccaacctccgccggctcggcggcggacgcggactggtggcagcgacagatttggggaccagcctcgcccaacgcatccgtcccgcagatcctggcaggagcgaacagcgagagggacaggagttggactggggaggcagcaatcacacaaaattcagaaagctgctgtgtgcaaccttatgtcacgcgtagctctgggatgcgcttggtagatgctctgcaaacaccaaatgtaaaagaaaagaaaagaaatcctcaaaattccttggaatcttccatttaagtaatcccctcttatctatgtccttggacccacgcaggatccctgtgtctgtctctggaagagtgagaattgatatcccagtttcttagaccacaagacttgaaagaccccttaaaccaacctacccttcctcaagaggcaaatgagacttagagaaggccagagcacaagatctaagcttctgagccgtttccagcaaatgaagaaagggaggcacaggcacccctgcttggttctgttaaaggagagtttgtcgtctcttcctatcctgacaacaaagattgacag
